United States Patent Application Publication US 2017/0114356 A1 - sequence listing, part 82

SEQ ID NO: 127609 - DNA, 1041 bp, Zea Mays
atggcaaatgctgccacatcagaaagaaggtgtgatgcatcagttaagatggcaagactgtttgctttgatgcccccgaccacttccaccatcatgaatatgatgcaaaggatcactgtgattataagcttcctcatggacgtggatctctccttggcatctttcgaggagttactggaatcagagaaatcacaggcacaatatgagaatgtaatggattatgcttttccatctgaaattcttgctacagctggtgtggaaattgaagaggcaggcaatctatttgtgccactaaaggagcaaaacactacattacactatccaaacaaagcaaaccaagtaaatctcaaaaacagattcaaagcagaatcaaggccgatgagaatatctgctgccccgaaagcaaaagcacaaaaagctagattcctcgagataggtatggaaaataagatgagcataaacaaaggatatgcaagcaaaccagtggcctcgtttcgctggcagccaggccgcacggtcggcgcgaccgtgtccttcgcggccgccgtcatctgtggctacctcgccgcggtgctcgtcctccgccgcctcgtcttaccccgtctcccggtgctgtcttcgccggctctccgcggggcatccgccgcccacaacgctgtcctgctgacgctctccgcctacatggccgccgggtgcgcgctctcgacggtcacaacagcgtcggcaccgcggtgggcgtggcccttctgcttcccaccgtggggcaccacggagatttcccttaggcctggcgccgtcaccgaggaagaggaacgtctggtccaagtgctggatgcgaaagccgtcgaagccagcgcgcgtcatgtcggcctggagcgcggcgccatgcttccagatgcggtaggtgtcggagggctcgatgcggccgatgaacgggttgacggaggatttgaagtggaaggagatctccatgtagaagttgcggatgtgggagatcgggaggcggagaaggaggggcgacagatggaggaggagacatga

SEQ ID NO: 127610 - DNA, 732 bp, Zea Mays
gaattttgaatgagtgccaagtcaccacatatgaacataccaaggagactgctattccgactggctatgtaacaaacaatgcccctgtagggttttactatactaggcttacacatcaatataaaaaataattcttcactatttagaaaaagaaaagaaaagcgaggaatgagagggtaacacctgacgagtatgtggagtctgtgaagtcgcatgtggtgtctactgagcaggatgttgcgcccctccaggatgagctggtgtaccctagggtggaacatagcgaggacagatgctactgctcccctacccctgggtgatagccttcctcttcatcttgcccagctgaacacgtttgtgttcaacaactatagccttgtcgagaagcctctggaaagatgggaaggtgtgagataccagttgatactgaagtggcccaacaagtccctccatgaaatgctcctgcttcctttcatcatcagcaacctcatttggagcataccttgttagctgaataaatttatcatgatattcacttactgacatgttgccttgcttcagtgataagaattccttcttctttattttcatcaggccagcaggaatatggtagtttctgaattgtgtagaaaattctacacaggtaatagtgttggtagcagcatgggcagcaatgtaggagtcccaataatcagcagcggggctagtgagatgatccgaagcatagagcac

SEQ ID NO: 127611 - DNA, 190 bp, Zea Mays
gttctgggtgtagggcttccggctcttcctgtggctgggcatcaattccttcctcaaggacggcatgggcgttgctgcctcctcattgcagatcctccaggcctccaccaacctacccatggtcaccaagccgctccttggcctcctctcggatgtcgtccccatgccctacgtcgccatcggcggtacg

SEQ ID NO: 127612 - DNA, 438 bp, Zea Mays
atgggcgcgcgccggaagctcgacggcggccatgagaacgagcagaggaactccggcatccatggtaaggagggtttcaccatggccgagcagacagggagtgccgtgagcagagaagtttcgcgcgctcggctggacgcaggagaacacgcgcgcagggacgagctcggctgggctagagcagggaagaccgcggctggggaaaggaggagcagggaggtcgcggccagagagatgggcgccatgggcgagttgcacagccggcgagctggaactgagcgccgtggaggagcaggaggtgggacagcgctagggagggagatggacttggcaagcaggaagccaagcgctggcgagttggaggacgggagggcgctcggccatggggagcaagatggagggagctcggtgggctggggatggacaccagagagatga

SEQ ID NO: 127613 - DNA, 517 bp, Zea Mays
atgggcgcgcgccggaagctcgacggcggccatgagaacgagcagaggaactccggcatccatggtaaggagggtttcaccatggccgagcagacagggagtgccgtgagcagagaagtttcgcgcgctcggctggacgcaggagaacacgcgcgcagggacgagctcggctgggctagagcagggaagaccgcggctggggaaaggaggagcagggaggtcgcggccagagagatgggcgccatgggcgagttgcacagccggcgagctggaactgagcgccgtggaggagcaggaggtgggacagcgctagggagggagatggacttggcaagcaggaagccaagcgctggcgagttggaggacgggagggcgctcggccatggggagcaagatggagggagctcggtgggctggggatggacaccagagagatgagcgagcagagagataagcacgagagacagaatggccgcgtgcgcacgctgggataagaacgatgctgaaaatatccagg

SEQ ID NO: 127614 - DNA, 315 bp, Zea Mays
gaccactaataaaagttgctgcactcactgaagatcgaagctgggaggcctcaccttggaacggatgaagggcacgatggtgacatggctggaggttgaacacagccatcaaagttgacaaccagcgaagtacgggtgacggcaaagtcccgaggtgatgaacaggggcaagtgtccgagcgtgcgatggagggcgcgcgaccagagcgttgtgtcggtgtgcaccaggaagctgatgccgagtgcacagtgaagaaggggacggtggccttcaccgaggtgggtggagctcagggcgaggagggtgacggctga

SEQ ID NO: 127615 - DNA, 113 bp, Zea Mays
ttcaaggaaagaaagtggggtggggtgcaatgattccctatgtatgatagtggctgagctcgaactttgggaaaagctcatccttgctcacccaaaggtagcgaagtaccaaa

SEQ ID NO: 127616 - DNA, 104 bp, Zea Mays
gaatatttgagaaggatttgatttgatgactaatctggagtcagatgaattcgtattcgtcatttatatccaaagttttggatcggggcaagaaacgacagacc

SEQ ID NO: 127617 - DNA, 1526 bp, Zea Mays
attggcacgtatgaatgctcagccacatgcgtatgtatacatcacggccacgttcacgcttcccccttctgcaagcaaacctaaccaagcctctgcggctcttcttcgaatccaactcctccccgatccccaaaatcgaacccaagtcgaaaccctaacctcggccttctcgatgtcggccgccacaaccgccccaacccctgcggtggccaccccgatggcgccgcctccgtcgtacccggcctcctccacgatctccgcctccgtggccgcgtcggtcgaggaagaggacgacctctatggccgcctcaagtcgctccagcgccacatggagttcgtcgagatccaggaggagtacgttaaagacgaacagaagaacctcaagcgcgaactcctccgtgcgcaggaggaggtcaagcggatccagtccgtaccgctcgtcatcggccagtttatggagatggtcgacggcaacaacggcatcgtgggttctactacgggcagcaactactatgtgcggatcctcagcaccatcaaccgcgagctgctcaagccgtcagcatctgtcgcgttgcatcgtcactccaacgctttagtcgacgtgctgccgcccgaggccgactccagcatctccttgctgggatcgtcggagaagcccaacgtcacctacaacgatattggaggatgcgacatccaaaagcaagaaatacgggaggcggttgagttacccttgactcatcatgagttgtacaagcagattggtattgatcctccaagaggggtgcttctgtatggtcctccgggtactggcaagaccatgcttgccaaagcagtcgcacatcataccaccgctgcttttatcagagtcgttggttcggagtttgtacagaagtacttgggcgagggccctagaatggtgcgtgatgtgttccgtttggctaaggagaatgctccagcaatcattttcattgatgaggttgatgctatagccactgctcgctttgatgctcagactggtgctgaccgagaagttcaacgcattcttatggagctactcaatcagatggatgggtttgatcaaacagtgaatgtgaaggttataatggcaactaatcgggcagacactctagatcctgctctgttgcgtcctggtagacttgacaggaaaattgagttccctttgccagaccggcgtcagaagaggcttgttttccaagtctgcactgccaaaatgaacctgagtgacgaggttgatttggaagactatgtttccagaccggataagatcagtgctgctgatattgctgctatctgtcaagaagctggcatgcatgctgtccgcaaaaaccgatatgtcatcctccccaaggactttgagaagggctaccgaaccaactgttgagctcgtttcttgtttatcaattgaatatgttttagcataaagatgagtttcaggatagttgccaatatcaaatgtcgaagttgatggctgtaatgcttgagtcaatctttttacttgaaggtac

SEQ ID NO: 127618 - DNA, 2257 bp, Zea Mays
attggcacgtatgaatgctcagccacatgcgtatgtatacatcacggccacgttcacgcttcccccttctgcaagcaaacctaaccaagcctctgcggctcttcttcgaatccaactcctccccgatccccaaaatcgaacccaagtcgaaaccctaacctcggccttctcgatgtcggccgccacaaccgccccaacccctgcggtggccaccccgatggcgccgcctccgtcgtacccggcctcctccacgatctccgcctccgtggccgcgtcggtcgaggaagaggacgacctctatggccgcctcaagtcgctccagcgccacatggagttcgtcgagatccaggaggagtacgttaaagacgaacagaagaacctcaagcgcgaactcctccgtgcgcaggaggaggtcaagcggatccagtccgtaccgctcgtcatcggccagtttatggagatggtcgacggcaacaacggcatcgtgggttctactacgggcagcaactactatgtgcggatcctcagcaccatcaaccgcgagctgctcaagccgtcagcatctgtcgcgttgcatcgtcactccaacgctttagtcgacgtgctgccgcccgaggccgactccagcatctccttgctgggatcgtcggagaagcccaacgtcacctacaacgatattggaggatgcgacatccaaaagcaagaaatacgggaggcggttgagttacccttgactcatcatgagttgtacaagcagattggtattgatcctccaagaggggtgcttctgtatggtcctccgggtactggcaagaccatgcttgccaaagcagtcgcacatcataccaccgctgcttttatcagagtcgttggttcggagtttgtacagaagtacttgggcgagggccctagaatggtgcgtgatgtgttccgtttggctaaggagaatgctccagcaatcattttcattgatgaggttgatgctatagccactgctcgctttgatgctcagactggtgctgaccgagaagttcaacgcattcttatggagctactcaatcagatggatgggtttgatcaaacagtgaatgtgaaggttataatggcaactaatcgggcagacactctagatcctgctctgttgcgtcctggtagacttgacaggaaaattgagttccctttgccagaccggcgtcagaagaggcttgttttccaagtctgcactgccaaaatgaacctgagtgacgaggttgatttggaagactatgtttccagaccggataagatcagtgctgctgatattgctgctatctgtcaagaagctggcatgcatgctgtccgcaaaaaccgatatgtcatcctccccaaggactttgagaagggctaccgaaccaacgtgaaaaagcctgagacggacttcgatttctacaaatgaggcaacctgagtgttgagctcgtttcttgtttatcaattgaatatgttttagcataaagatgagtttcaggatagttgccaatatcaaatgtcgaagttgatggctgtaatgcttgagtcaatctttttacttgaaggtacagcggtgttatggaagttatgattatgtagggtggattaaccttttaccgacacggtggggcttggatttggcattaagccaatcttaccaatcaatcaccagatgtgatgtctcattggtgatactaatacctgcagatctggtctgtctcaaccaaattatgccgaagacaatagaaaaactacgtttgcgcagatcttgtattctaagcttgcctgttcatttattactgagagcaagtgtaatagtgatatagttgatgctaaggtagaggtgagaagagagttatgctgttgtagaggttagaagagaagagtgcaatcaacgagctcagcattttttgtgtgtgtgtagctttctgaactagataacaaagactatgtatgttttttttgtttagatttctgaactaggttcgctctaaaaatctacaatctgaaccaagtacaatggcaggatagattgtatagaaaatctatagatttttatagttcaattcagaatcactttctactcccaaggtttctagatttttgttatctatgttaccaaagtatcaatattttacagaatctatatttaacagctgtttgaacctaacatattacctaatatatattttagcttttcatcactgctaagattaaaattttaagaatctacagctgagccaagccaaa

SEQ ID NO: 127619 - DNA, 989 bp, Zea Mays
atggacaatgggggtcatgtggctgtcaagatcctcgacaaggcaaaggttcataagaacaaactagatgagtataaagcaatagttggagctatagcacaaaatggatactatgtagcctatgatggctggggaaacagggaagagcatggtcaccatttcagtattaaattaattctgaaaaatgtatacaatgcaggtcaaaggggcatatcctgtcttggattgggagtttcggaccgctacttagatgatcaagaccatatcttgtctttagtcttccacctccatatttctcctcatgttactgaagaaaacctcacaacactatttataaattgcggacaggttgtggactgtcgcatgtgtggggacccaaattcagtccttaggtttgctttcatagagttcgctgatgaggagggtgcaagggctgccctgaatctgtcaggaaccgtgcttggatattatcctgtcaatgttctgccgtcaaaactgccattgcaccagtcaaagaaacattcctacccatgtctgacgatgaacgtgaaatgtgtgcaaggactatctactgcacaaacattgacaagaaggtttggtacctgcactcatgctactaccactagaaatggcaccatcaagatcgatctagagaccaacaagatcatggacttcatcaagtttgacgttggcaacgtggtcatggtgaccagcgggaggaacaccgggcatgtaggagtgataaagaacagggagaagcacaagggcagcttcgagaccatccacgtgctacttggagctttttgctatgtctagttttctcctattttttgtataggaaaacatagaatggaattcaaatttggtggccacaaaagtgtggagaattgaattcatataaagttaggcttaacattagtgcaaacagtcgtattttagtttagatttagagtacacttatgtatgtgttgtttgacaatgcttattta

SEQ ID NO: 127620 - DNA, 258 bp, Zea Mays
atggacaagccggtcgggtcaagcatgacatccgaggtggcagtggcagcaaagaaggctgttgcaacacaagagggcggcgcgggagcgacaaaggaagtagggccggcagtagtgatgcttgggagaagcagagcggtggccacggcgccaaggaggggcagggcggcgaccatggcgccaaagggaggggaggaggcggcgttcacgccggcgggtgaaggaccacgctggggccagcggggccgccagcgatga

SEQ ID NO: 127621 - DNA, 2284 bp, Zea Mays
tggcagccaataggtccgataccctagtcacgcgccgccatgcctacgccacgcgcctccctgctcacgctccttctcctactcgccgtccagctccctcccgccgccgccgcgtccaagcaccgccacgcgtcagaatctgccccagcaccaccagcctcctacttcctcgtatcgtgggcaagcaacctcacgttactgggctccgcctctatccaaccaggcgccacagcggtcgcgctcaccaccccgtcccatgacggcgttggcgccgggcgcgccctcttctcggagcccgtccgcctcttcgtcccctcctcctccgcagccgcctccttctctacccgcttcaccttccgcatcacgcccgcgcccaccttcggtgacggcctcgccttcctcctaacctcttcccggactttcctcggcgcctccaacgggttcctcggcctcttcccgtcctcctcggcctcagacgagggcgaggccgacctcggcggcgtcaccaccgtagccatcgagttcgacacccaccgcgacgtggcgctgcgtgacccagacggcaaccacgtggcgctcgacgcgggttccatattctccgtcgcgtcggctagccccggcgtcgaccttagggcaggcgtacccatcaccgcctgggtggagtaccgcgcccggcgccgccgcctcagcgtgtggctctcgtactcgccgttccgccgcccagagaagcccgccctctccgctgatgccgacctttccggactcatgcgcacatatatgtacgccggattctcggcgtccaatggcaatggcgcggcgcttcatgtcgttgaacggtggaccttccgcactttcggccttgccaactcatcccgcgcgtcgccaccatctgagcccccaacagaacccagcaagccactgctgccgcccaacaaaccacagctgcttacaggaaaccacaagcaccaacacctaatctacaaggtggtcggcggagtcattggaggcatagtcttgctggtatttgccatcgtcgcatctgttgtctggttttccaagccagttcgtcgcccaagtgaagaagaagagcgtacagtgacgagcgaggacaaaccttatgggacgatgtctatggaggtggttcgggcagccacaaagggcttcgacagtggaaatgtgattggcattggtggctctggtgccactgtgtacgagggagtgcttccgtctggctcaagagttgctgtcaaacggtttcaggctatatggccgtgcacgaaatcatttgtaagtgagcttgcggccatgctcaattgcccaaaccatcccaatcttgtgcggcttgctgggtggtgctgcagtaaggctgagctcgtgcttgtttatgagttcatgcccaatgggaatcttgacagtgcgctgcacacaatgggcggagcaacacttccgtgggaggcacggttcagggcagtgcttggtatggcctcagcgcttgaatatctgcatgatgggtgtgatcgccggattctgcatcgcgatgtcaagtcatcgaatgtgctactggatggtgagttcaatgccagactaggcgattttggacttgctcgtctggtgagccatggtggattaccactgacaacacagccagcaggcacacttgggtaccttgctccagagtatgtgcattctggtgttgcaacagagcgctctgatgtgtacagttttggtgtgcttgctctcgaggtggccactggccggaggccaacagagaggggaatctctgttgttgactgggtgtggggtctatggggtcgtcggaggcttgttgatgctgcagaccagaggcttcagggccgatttgttgcggaggagatgcggcgggttcttcttgtgggcctctcgtgtgtgcatccggattgtaggaagcggccaggaatgagaagggtagtcaagatgcttgatgggactgcacccttgacaatggtgcctgataagaagccacctgttttgctccagacacaagtagatgaagcttcatcaatgaactcagtggatactgtcaatacaacgttctacagttgtcgctgatcttatttgttaatcggttggctaataaccacatcctgattcatatgttgatggctaatatacatacaatgtggtgttgatgctccagttttcttttctgaaacctgagtagaaggtaatttcggagttgttccacattgttcggacatatcctacttgttcacaaaaatctgcataaagtattgtttcctggttc

SEQ ID NO: 127622 - DNA, 91 bp, Zea Mays
attttacaaaaaatcatatatacatatgtacaatttatattcaatattaaaaacacctaagcatgatgttctactggttagacggcttcac

SEQ ID NO: 127623 - DNA, 76 bp, Zea Mays
ctagtctctctcgcccttcttccaatagggcgtgggttcgaaccccacctcctgcaccacttttttaacattttac

SEQ ID NO: 127624 - DNA, 3926 bp, Zea Mays
gcaccaccctcagccatggcgccagcggcggcggaggctggtcccggcgatgacgggcttaggaagctcgaatacctttccctggtctccaaagtttgctccgagctcgagacccacatcggcgtcggcgacaaggtgctggccgagttcatcaccgagctcggccgcgactccacaaccgtccccgagttcgacgccaagctcaaggagaagggcgccgacttccccgactacttcgtccgtacgctcctcaccatcatccacgccatcctccagcctactgcttccaaccctagcgctgccaccgtcgccgagggccctgctggtgcggagtcggccaaattccccgggctcgcccgccccgacgaccccgaccatgcccgcaacctccgcctcgagctcgagcgggatgccgatgcggcccctcctgctccgatgagggacgaccgcgaccgccgctgggatgggagaggccgagaccgggactacggccgcggcggccgtgagcatgatcaagaccgcggtggccgtgaccacgatcgtgaccgccgtgacagggatcgagggcgcgaccgcgagtatggccgtgatagggatcgagggcgcgaccgtgagtatggccatgatagggatcgagggcgcgaccgtgagtatggccgtgatagggatcatgaccatgtccgggatcgtgacggggaacgcctccacgatggagatagagatactggtaggaacagagttagggacttggggaggagcaggaggtatgcagatgatgaagaagaggagaggggcaatgtaggaaggggaagggaggttgctgtttcgaatcccagtggggagccagagctgtaccaggtgtaccgagggagggttacccgggtgatggataccggatgctttgtcaggcttgatgatgttcgcggtggccacgagggacttgttcatgtatcgcagatggctagcaggcgggtggccaatgcaaaggaggtggtgaagcgtgaccaggaggtgtatgtgaaggtagtctcggtgaaggggcagaagttgagtttgtcgatgcgggatgtcgatcaggatactgggaaagacctcctgccgatgcagcgaggtggggatgatgcaccaagggtgaacccatctggtggcaggggcagtggcatgggatctggcaagaggttgggtttgtcaggtattgtgatcacggaggaggatgaggcagccccaacatcaagacgaccactcaagagaatgagctcgccagagaggtgggaagcaaaacagcttattgcctcgggtgtgctggatgtgagggattatccaatgtttgatgaggatggggatggtatgatgtaccaggaggaaggtgcagaagaagaacttgaaattgagctaaatgaggatgaaccagcattcttgcaggggcagagcagattttcaatagacatgtcacctgtaaagatctttaagaatcctgagggttcattgagccgagcagcagccctacagactgctctcataaaggaacgtcgtgaggttcgagaacaggagcagagagccatgttagattcaatccccaaggatctgaatcgaccatgggaggacccaatgcctgatacaggtgagcggcaccttgcacaggagctgcgaggtgttggcctttcagcttatgacatgcctgaatggaagaaggaggcctatggaaaagctttaacttttgggcaaaggtcaaagctttcaatacaagagcagaggcagtctcttcctatttacaagttgaagaaagagcttatacaagctgtacatgataatcaagttttggttgttattggagagactggttccgggaagacgacgcaggtgacacaatatttggctgaggcaggttataccacgcggggtaaaatcgggtgtactcagcctcgtagggtggctgcaatgtcagttgcaaagagagtggcagaagagtttggttgtcggctgggagaggaagttggttatgctatccgtttcgaggactgtacgggtccggacacagtgattaagtacatgactgatggtatgcttctgcgtgaaattcttgttgatgagaacctttcccagtattctgttatcatgcttgatgaagcccatgaaaggaccatccacactgatgtgctctttggtttgctgaaacaacttattaagcgcagatctgatatgaggcttattgttacttctgccacccttgatgctgaaaagttctcaggatatttctttaactgtaacatcttcacaattcctggaagaacattcccagtagagatactgtacactaaacaacctgaaagtgattacttggatgcagcattgattactgtgctgcagattcacttgacagagccagaaggagacatccttgttttcctgacagggcaggaggaaatcgatcatgcctgccagtgtctttatgagaggatgaaggggctgggcagggatgttcctgagctcataatcttgcctgtgtatagtgcccttcctagtgagatgcaatcaaagatctttgacccagctccacctggtaagaggaaagttgtggtagcgaccaatattgctgaagcttctttgacaattgatggtatatactatgttgtggatcctggttttgccaaaatcaatgtatacaattcaaaacagggtcttgattcattggtcatcactccgatatcacaagcgtctgcgaaacaaagagcagggcgtgcagggcgtactggacctggcaagtgttatcgtctatacactgaaagtgcctaccggaatgagatgtcccccacaacgattccagaaatacagaggatcaacttgggatctaccgttcttaatatgaaggcaatgggaataaatgacctgttatcctttgattttatggaccccccagcacctcaagcattgatttctgccatggaacagttgtacagccttggtgctcttgatgaagagggccttctaaccaaactcgggagaaaaatggcagaatttccattggatccaccactttccaagatgctactagccagtgttgaccttggatgcagtgatgagatactgactatcatagctatgattcaaacagggaatatattctacaggccacgagaaaaacaagctcaagctgatcaaaagagggctaaattttttcagccagagggagaccaccttactctacttgctgtatatgaggcctggaaggctaagaacttttcagggccctggtgttttgagaactttgttcaatcaagatcattgaggagagcccaggatgtgaggaaacaacttctcactatcatggacagatacaaacttgatgttgtctccgctgggaaaaacttcacaaagataaggaaagctatcactgcaggcttctttttccacgccgccaggaaggatccccaggaaggatacaggaccttggtcgaaaaccagccagtgtacatccaccctagcagcgcattgttccagcgccagccagactgggtcatctatcacgagctggtgatgacgacaaaggagtacatgagggaggtgactgtgatcgatccaaaatggcttgttgagctggcgccaaggttttacaagggtgctgaccccaccaagatgagcaaaaggaaaaggcaggagaggatcgagcctctatatgatagataccacgagcccaactcttggcgtcttagcaagcgccgagcttgattgtaactcactgtaactgtgcactgcatgctcttcatggccagttgatactccataatgtaaatgtttgtgagttgtcacatgtagatgtagctgcagatagttttcccgtttcatttcagcatcaccaaaagctaccatttctgctcagtacaaacctctgaatgtccaacgaactcaatacttgtgcctgaatctcc

SEQ ID NO: 127625 - DNA, 1228 bp, Zea Mays
caagcaagatcattatcaaaccaatctctctctctcttgcaatgaccctctcaagcgcctagggctgctaccctagaaccaagcctgcggcagaggggtataacctcgccggagaagacaactatccccatggaccatgacacctggtatcagctccaggttatcctcaccaccaccagccgcccatccctcaccaccaccagccgccgcgccatcagccgccacaacgccctcccacccgccctctccaactccagatgcattcactcggctcgaagagagttttggccgtctcgaagaaaagtgggatcaatccgttgtgatgttccaccgctacaaggagaagacagagaaggaactccaagcagcggtgcggctttaggcggcagcgcgagggttcctggcacgccgccaggtacagtcccttcgtggggagaagcaccttgctgtggcctccagggccaccccatggccgtcatcacatgagcaggccgtggtgcgcctgtaagccgcagtgcgcggcttccttgttaggcgggcggtgcggaagctgcacttgctgatcagctcatcgctgcaccaacttgcagcctgtgcgtccaaccaccaggtctcgtctatactttttgaaccccctgcagaagtcgagatctaggtatgcagcccccctgcatggccaaagagggtcgtctccttcattcgggcaactgccttggtgctggacagacccaatataagaacggactggttcctccttcacctttcatccaacgtgaagtccgcagttcagctctttccttgggatccaggaggacatagctgcagttcaaatttatattttagttccacaattattttgtattttcatcttaaataataaaggtaagccgagatgtaaaaggcttaaccttaaatcgtgtcaggtaagtctatggcagctcaaggacgagctggtcctcaagggaggaggagatgtcatgggcatcatagggagcgagaggcaacaaccaggctgggataaggctagagaataagattgagatgagctgggataagactagagaataagattgagatgagagaattgtggagagttggttagcatcagataagtccaagaaagtaggagttagttgagagtttgtaggagaagttggttagccatagggctatttataagccgcatggcagcagggaataaatcaagcaagatcattatcaaaccaat

SEQ ID NO: 127626 - DNA, 1428 bp, Zea Mays
tgtacctatcgccgacgccctcgaagtcgcggtgcacgtaccatccggaccaacgccaaaagtcgcgttattaacttgagggcaaaataaaaaggtagaaatttaggaagcaaacaaaagctctactgccttgtatggaattgcaatggcgtctggggcatttcccacgagcgccccccctgccctgcccatttcgctctcctccctaggcaactaaacgccgcgctcccgcagacggtaccagccgccgcgatggggtcctcgtcctcgccaccgccaccaccgccgctgccactgcccatgattgggcgggccgggaacctcaccatcttcatcacgccgccatcccccgctagcacgccccggggcgctgggcgcacgccgccgctcgagtccccgcgctcggatatctccacacccatcccgcagagggcagccccgtcgccctccctttctccctctccgcggaaccacgagagccgggccgtggcgcctgcggtggtgttcaccccgcccccgccgcctgcttctgtgaatgtcgcgctgccgccggtgcaggtgccgccgccgcagtacgagaaaggcgtccgcggggggcaagcatgacgtatcggcgttcggcttcttctgggacgccgtcgcgcgcgtccaggaagcgcacgcgagcctcgacgagtacgtgtctacctggttcgggttggatcagtccaagtaccagtgggcgcttaacgactactacgagaccataggcaaggtcagcaaggaagtggattgtataaaaggtggtatgcccaaggagcctactactaaagtgcagaaactctaaaaaaacaacttcgttttgtgttgtaagatgagtagctagcagcgtatgtatggagaagtatgttacatttttgtggagccttgaattgaaaggtggtcatctctgctttgtcggcggcccaagtgtaagccctgcaccgagcgccattcatctgggacttctggaggccgggccgcgaacggtcgctgttttgttccgccgttcaggatctactgtaatcctctaaggttatgtcaaagcacagaatcagtctaatctgcatgttgggcgttgtttactatcacgcccttgtgttttcatggctacattagctacgaccataacgtgatgtgcagacgatgttacgaacggcgtaaaaatctcaatcatcaactatccgccggacctggcccagggttgtaaatcggaggcgttccctttgaggtcgtaaaagccgaagcgttcatgaattacgattgtacactgcgttccgaccggccttagcatatgctgaattgcgtggactaaaacagcagaaatccagcgtcggtgttagtgcattgcatgtagccacgtactagtctgcatctaggtctattcatgtttggttgtcccagaactaa

SEQ ID NO: 127627 - DNA, 506 bp, Zea Mays
acagccgcactctcctccctgcagctcgctccatcttcctccctcccatggtcgtgccctcggctccctctgttcaagcccccatcagccgctccagttcgccatgggccaccgtcgcacatggccatgccaagctggccgtccctgctccatccgatagcgctgctctctgcatctcccatggtcgagctcaccgcgtccctgtgtttgagtccgtcgacctccagctcgccagccgcgccctccctgctcgcccagcccctctgctcactggtttctccccacgccagcagcagcaagcagccatggcacctccttcccctgctcgccctccctctgtgcccagcctcctctctgttcttccgtggagcaatagccctcctctaattctgcagcagcagctctcccttttttcatttgttctccatgaatgaaagcccaagcgccagcccccctccctttcgtcaagtgattggaagagagttctagggaaatcgatggagacg

SEQ ID NO: 127628 - DNA, 101 bp, Zea Mays
cagtttgttgtccatgtcatgacgcttgtgaaactctatgtgtttgtgtgtgagattggaagagagttctagggaaatcgatggagacgaaaccgtgtttc

SEQ ID NO: 127629 - DNA, 617 bp, Zea Mays
acagccgcactctcctccctgcagctcgctccatcttcctccctcccatggtcgtgccctcggctccctctgttcaagcccccatcagccgctccagttcgccatggccaccgtcgcacatggccatgccaagctggccgtccctgctccatcctatagcgctgctctctgcatctcccatggtcgagctcaccgcgtccctgtgtttgagtccgtcgacctccagctcgccagccgcgccctccctgctcgcccagcccctctgctcactggtttctccccacgccagcagcagcaagcagccatggcacctcattcccctgctcgccctccctctgtgcccagcctcctctctgttcttccgtggagcaatagccctcctctaattctgcagcagcagctcccccttttttcatttgttctccatgaatgaaagcccaagcgccagccccctccctttcgtcaagtgattggaagagagttctagggaaatcgatggagaagaaaccgtgtttcagttcgacgcgctctaggtgtttgatggaatggatgaaccggagatccttgttgctcttgcgaaatccgagtctatttagtgttggtaagctaattcatta

SEQ ID NO: 127630 - DNA, 1047 bp, Zea Mays
gatttcgtagtaagtcctcgaccatccctgcaaattaccgcgatggctcccaagatcctagtcatccttgtgttcctcgccgtggcctcaccggcggctctggccgccttcgatgtgatagagatgctggccgacaagcccacgtactccacgttcctgaagctcctgcaggacaccaaggtcgcgggcgaggcgaatcagctccggtcggcgacgctactggtcgtccccgacaaacttgccaagcctctggcgtcgctgcccgccgataaggtgcggccggcggtggagaaccacgtccttctcagttacttcgaccccatcaagctggacgagatgaagacacgcaccgccatcctccccacgctgctctccgtcaccgacaagaaactcggcgtcctcaactacaccagggccgacgacgggcagatgtacttcggcgctcccggcgccccctgcgtggccaagctcgtgaaggtcgtcgcagcgcggccgtactctgtgtccatcatggagatcagcgagcccattttgccggccgcgttgccctcccccgtcgcggcgcccggccgccgcggcaagggtggtaagcgcaagatcaagccatcagcggcaacccatgaggattccaacatgatcccgcgcaagcccgtcgaagcagtggtggtgggtaagggtaaggtggccaaggataccgtgtccgagtcacctgctccaagccccgcccccgtctccgccccttagttgcgtgttgggcgccgctgcccgccggcccccggccaccatgcgtcgtgtctgcgcgcgcacgcacgcattgaacgggagatagaatatggtatcgttcaatgcagattgccatgctatagctccagagtttatctacctggtagcaccatgacacgatggcccgttcgtattttctggcttgctcgtacttttcagttccatggttttacaacaccttttactcccagcagaaaatacataatatgcatgtactcctctttttttccgtatagtaatataaacaaattttcacatgtgttt

SEQ ID NO: 127631 - DNA, 651 bp, Zea Mays
ccttgggcgccctgttttcttcctcccgcccgatacatttctcgtacatcgctctcgctctcgctctctctcctgctgtccacgaccgaccaaaggcgccgggcacagactcttcgtcggatccaagagaagctcgcgccctccccgaccatggtctcggcggataccatccgtacggctatcggcgtcatcggcaatggcaccgcccttgtgctcttcctctccccggtgtaagaatttatcgattctgcttctgcttgttattttttatctacaaatcaaaataataaaaaaataataaaaactagtactacgcaatccagctttctccttataaagaaatcaatggataaatttaaaaaaagcagagcatcaaaccaagaagaaaaactgatgtcacgaacttgacagttgacttttcgcgcaaacaaacaaacaaacactacgtactgtgctctgcttatggatacatacatgcatactagtagctcatatatgcgtacaaatgcgccccgcaggcccaccttcgtgggcatctggaagaagcgtgcggtggagcagtactcgccgatcccgtacgtggcgacgctgctgaactgcatgatgtgggtgctgtacgggctgccgctggtgcacccgcacagcatgctg

SEQ ID NO: 127632 - DNA, 1830 bp, Zea Mays
ccttgggcgccctgttttcttcctcccgcccgatacatttctcgtacatcgctctcgctctcgctctctctcctgctgtccacgaccgaccaaaggcgccgggcacagactcttcgtcggatccaagagaagctcgcgccctccccgaccatggtctcggcggataccatccgtacggctatcggcgtcatcggcaatggcaccgcccttgtgctcttcctctccccggtgcccaccttcgtgggcatctggaagaagcgtgcggtggagcagtactcgccgatcccgtacgtggcgacgctgctgaactgcatgatgtgggtgctgtacgggctgccgctggtgcacccgcacagcatgctggtggtgaccatcaacggcaccggcatgctcatccagctgacctacgtggcgctcttcatcctctgctccgcgggggcggtgcgccgcagggtcgtgctcctgttcgccgccgaggtcgccttcgtcgtcgccttggccgcgctggtgctcaccctggcgcacacgcacgagcgcaggtccatgctcgtcggcatcgtctccgtcttcttcggcaccggcatgtacgctgcgccgctctcggtcatgaaattggtgatccagacaaagagcgtggaatacatgcccctgttcctgtccctggcctccctcgccaacagcatctgctggaccgcctacgcgctcatccgcttcgacctctacatcaccatccccaacgggctgggcgtgctgttcgcgctgggtcagctgggcctgtacgccatgttctacaagaacaccaagcagatcatggaggcacgcaggcgcaaggccgaccagcagtcaaccatgatggaggtggtcaccgacgcctccgccacgccgcccccgccacccaacaacaacaacggcggcggcggcggcaacggctactgatcgcatgcaacaggaaggacgacgacgatcgaccagcaagcaaaagccacatacatagcgtcgtcgtagcgccccgccgcccaccgaatgcttgttgttccgattccgatctccccaaggggacgatgctccgttgcattctctgcatatcctactaatataacgaaacgaaacaaaacaaaagacagcacaaaagggcttgctgggtttcacatttaccatatataatcgtctgctgctgtcttgttgctggtatcactgctattggaaacccttcttgcttgttctctcttcattccgcccgccgcgtaggcgtagctagctgatcgatcgattttcacgtcatttattgctcggccttcttttaattttccagtttctgtatatactccctttcattttcaggatgctcagttgtaggtgaggtagtagtaagcgtttggatttttttctagtagatgaatagaaggaaacaatacccctcatctctatgctcctcgtcaccaacagcaaaaatgctatttccagttagcaacatctaaacttgtatctacaacacttgaattagttcctagactgtctcatctgaagtaacttcacaaatttcgattattttgttactctccaaaattagaacatgatagccacgtgaatgtacagggaaaagaattccaaaaacaataccatcagttgatctagattcaaatttatctttctagattttagcacagatcagtatttgcatccaaacgcacatggatgaaaaatggactatgtcttatttcattataatagtggctttagtatttgataaactttgggcttactttggtcctccaatatctcccccgttgaaatcaaatgacaaaaagaaaaaaaaaagattttaagcac

SEQ ID NO: 127633 - DNA, 1280 bp, Zea Mays
atcagcaggctagctaccagcagtacacttgtactcggcggccaattacagctggttcttggatcctagctagctatacagcctcagctctgctgttttctttctttctttctttctttctttctttctaaacgtacgtacgtataatgatcgtcaacgatatgatctcgcatatgcagatccccaacgggctgggcgtgctgttcgcgctgggtcagctgggcctgtacgccatgttctacaagaacaccaagcagatcatggaggcacgcaggcgcaaggccgaccagcagtcaaccatgatggaggtggtcaccgacgcctccgccacgccgcccccgccacccaacaacaacaacggcggcggcggcggcaacggctactgatcgcatgcaacaggaaggacgacgacgatcgaccagcaagcaaaagccacatacatagcgtcgtcgtagcgccccgccgcccaccgaatgcttgttgttccgattccgatctccccaaggggacgatgctccgttgcattctctgcatatcctactaatataacgaaacgaaacaaaacaaaagacagcacaaaagggcttgctgggtttcacatttaccatatataatcgtctgctgctgtcttgttgctggtatcactgctattggaaacccttcttgcttgttctctcttcattccgcccgccgcgtaggcgtagctagctgatcgatcgattttcacgtcatttattgctcggccttcttttaattttccagtttctgtatatactccctttcattttcaggatgctcagttgtaggtgaggtagtagtaagcgtttggatttttttctagtagatgaatagaaggaaacaatacccctcatctctatgctcctcgtcaccaacagcaaaaatgctatttccagttagcaacatctaaacttgtatctacaacacttgaattagttcctagactgtctcatctgaagtaacttcacaaatttcgattattttgttactctccaaaattagaacatgatagccacgtgaatgtacagggaaaagaattccaaaaacaataccatcagttgatctagattcaaatttatctttctagattttagcacagatcagtatttgcatccaaacgcacatggatgaaaaatggactatgtcttatttcattataatagtggctttagtatttgataaactttgggcttactttggtcctccaatatctcccccgttgaaatcaaatgacaaaaagaaaaaaaaaagattttaagcac

SEQ ID NO: 127634 - DNA, 1377 bp, Zea Mays
tttttttatttttcttagaaagctgttaccgttactactttattacttagatgagagagagaaagcgcgcaagaaagacagaaagacgacactgtagtgactagtgtgagagagagctagatacagatagagatggaggtggagtggaggtgggcttggtgggacccgatagatgtccgcgggtccggccacggcgaggccagtgactcatgatcctcctctatttaagctggcgtccttcactcgctcgtcactcacaaagaagccggggacggagagcagagagcttcagcgcaactgtgctcaatcgtttcttcgtctttagttggtgcttggtctccctccgtcctctgtttcccaaacagaggtgtctcagctgactcttttgcttgctagcaaaatagcacactctctctctagagctgagcaccaccttgctgaaggcagctagctagcgacgaccatggtctcctcggacaccatccgcacggccatcggcgtcatcggcaatgggaccgccctggtgctcttcctctccccggtgcctacgttcatccgcatctggaagaaggggtcggtggagcagtactcgccgatcccgtacgtggcgacgctgctgaactgcatgatgtgggtgttgtacgggctgccgctggtgcacccgcacagcatgctggtgatcaccatcaacggcaccggcatgctcatccagctgacctacgtggcgctcttcctcgtctactccgcgggggcggcgcgccgcaaggtgtccctcctgctggccgccgaggtcgccttcgtcggcgccgtcgccgcgctggtgctcgccctggcgcacacccacgagcgcaggtccatggtggtcggcatcctctgcgtcctcttcggcaccggcatgtacgccgcgccgctctccgtcatgaaaatggtgatccagacgaagagcgtggagtacatgccgctgttcctgtcactggcttccctggtgaacggcatctgctggaccgcctacgcgctcatccgcttcgacctctacatcacccgggcggcgaccatgccgcacaggcacgcatgcagcagcagcagtactgcagcttgcgcctgcttgctgctgtaggcaaaagctgggagagacgacaggccaattcaagttggtaggtaccgggcgagctactagctagcactagcagcagcgggcggtgcagtgcagtgcggctgccgcccttggccttttgcccccaaatgcatgcgacgacaccacgctttgcggcttgtgagttcgttcgagcgcgcgcctgccgacctcaacagagaaggcgatcccgtgaactatgaatggatgaccttgtctagttgtctttgagctttgactctcca

SEQ ID NO: 127635 - DNA, 2188 bp, Zea Mays
tttttttatttttcttagaaagctgttaccgttactactttattacttagatgagagagagaaagcgcgcaagaaagacagaaagacgacactgtagtgactagtgtgagagagagctagatacagatagagatggaggtggagtggaggtgggcttggtgggacccgatagatgtccgcgggtccggccacggcgaggccagtgactcatgatcctcctctatttaagctggcgtccttcactcgctcgtcactcacaaagaagccggggacggagagcagagagcttcagcgcaactgtgctcaatcgtttcttcgtctttagttggtgcttggtctccctccgtcctctgtttcccaaacagaggtgtctcagctgactcttttgcttgctagcaaaatagcacactctctctctagagctgagcaccaccttgctgaaggcagctagctagcgacgaccatggtctcctcggacaccatccgcacggccatcggcgtcatcggtgggtagtagtcaatacctgcttagtatgtctttctctctctctctctcgccaacaagcttgcttgaaacatgtcccggtactcgtcaacgcaaagcattatttatgtgcatgtcaggattaatttcgtggaggcaggcctactcattttccttcccatatgctgcttgttcatatataggactaatttgccccaaattaaagttcaattggtgaatttttttctatttgttgccacaaaggaaaggacgggctatatatattatatactcacttttgggtttcttttctggtatgggtgtctcgcaggcaatgggaccgccctggtgctcttcctctccccggtgtaagaacagccaattaatacagatactcatacaacatgtgtgtgtgtttgaaggaggatgtacgtactaaccgaaggacgtattatacaacgtacgtacgtacgtacgaacatgcaggcctacgttcatccgcatctggaagaaggggtcggtggagcagtactcgccgatcccgtacgtggcgacgctgctgaactgcatgatgtgggtgttgtacgggctgccgctggtgcacccgcacagcatgctggtgatcaccatcaacggcaccggcatgctcatccagctgacctacgtggcgctcttcctcgtctactccgcgggggcggcgcgccgcaaggtgtccctcctgctggccgccgaggtcgccttcgtcggcgccgtcgccgcgctggtgctcgccctggcgcacacccacgagcgcaggtccatggtggtcggcatcctctgcgtcctcttcggcaccggcatgtacgccgcgccgctctccgtcatggtaagtactgtagtatatgtatgcctttgttcctacatgtacgccgcgcctaatgcccttcttttaatttgttaccctcgtatgatgcgtgcgtgcgtggatcagaaaatggtgatccagacgaagagcgtggagtacatgccgctgttcctgtcactggcttccctggtgaacggcatctgctggaccgcctacgcgctcatccgcttcgacctctacatcaccgtaagcaactacaaccctgctggacctggacatggcacgcgcgcctgtccgccgcacatgtacagtacgattcctatcctgtgcagttagatcatatcacccggttcaaatgcccatctatccagcgggcggcgaccatgccgcacaggcacgcatgcagcagcagcagtactgcagcttgcgcctgcttgctgctgtaggcaaaagctgggagagacgacaggccaattcaagttggtaggtaccgggcgagctactagctagcactagcagcagcgggcggtgcagtgcagtgcggctgccgcccttggccttttgcccccaaatgcatgcgacgacaccacgctttgcggcttgtgagttcgttcgagcgcgcgcctgccgacctcaacagagaaggcgatcccgtgaactatgaatggatgaccttgtctagttgtctttgagctttgactctccatctcatctgaccgccagcgagctccattcagttccttggatgcgtcgtccagccgcccaggaccgcccgcccgatcgcatcaaatccaaaggcggtggtgatgggtacgggtccagctagccacgcaaggcaccaaccatatagcccacagcac

SEQ ID NO: 127636 - DNA, 1656 bp, Zea Mays
tttttttatttttcttagaaagctgttaccgttactactttattacttagatgagagagagaaagcgcgcaagaaagacagaaagacgacactgtagtgactagtgtgagagagagctagatacagatagagatggaggtggagtggaggtgggcttggtgggacccgatagatgtccgcgggtccggccacggcgaggccagtgactcatgatcctcctctatttaagctggcgtccttcactcgctcgtcactcacaaagaagccggggacggagagcagagagcttcagcgcaactgtgctcaatcgtttcttcgtctttagttggtgcttggtctccctccgtcctctgtttcccaaacagaggtgtctcagctgactcttttgcttgctagcaaaatagcacactctctctctagagctgagcaccaccttgctgaaggcagctagctagcgacgaccatggtctcctcggacaccatccgcacggccatcggcgtcatcggcaatgggaccgccctggtgctcttcctctccccggtgcctacgttcatccgcatctggaagaaggggtcggtggagcagtactcgccgatcccgtacgtggcgacgctgctgaactgcatgatgtgggtgttgtacgggctgccgctggtgcacccgcacagcatgctggtgatcaccatcaacggcaccggcatgctcatccagctgacctacgtggcgctcttcctcgtctactccgcgggggcggcgcgccgcaaggtgtccctcctgctggccgccgaggtcgccttcgtcggcgccgtcgccgcgctggtgctcgccctggcgcacacccacgagcgcaggtccatggtggtcggcatcctctgcgtcctcttcggcaccggcatgtacgccgcgccgctctccgtcatgaaaatggtgatccagacgaagagcgtggagtacatgccgctgttcctgtcactggcttccctggtgaacggcatctgctggaccgcctacgcgctcatccgcttcgacctctacatcaccgtaagcaactacaaccctgctggacctggacatggcacgcgcgcctgtccgccgcacatgtacagtacgattcctatcctgtgcagttagatcatatcacccggttcaaatgcccatctatccagcgggcggcgaccatgccgcacaggcacgcatgcagcagcagcagtactgcagcttgcgcctgcttgctgctgtaggcaaaagctgggagagacgacaggccaattcaagttggtaggtaccgggcgagctactagctagcactagcagcagcgggcggtgcagtgcagtgcggctgccgcccttggccttttgcccccaaatgcatgcgacgacaccacgctttgcggcttgtgagttcgttcgagcgcgcgcctgccgacctcaacagagaaggcgatcccgtgaactatgaatggatgaccttgtctagttgtctttgagctttgactctccatctcatctgaccgccagcgagctccattcagttccttggatgcgtcgtccagccgcccaggaccgcccgcccgatcgcatcaaatccaaaggcggtggtgatgggtacgggtccagctagccacgcaaggcaccaaccatatagcccacagcac

SEQ ID NO: 127637 - DNA, 1897 bp, Zea Mays
tttttttatttttcttagaaagctgttaccgttactactttattacttagatgagagagagaaagcgcgcaagaaagacagaaagacgacactgtagtgactagtgtgagagagagctagatacagatagagatggaggtggagtggaggtgggcttggtgggacccgatagatgtccgcgggtccggccacggcgaggccagtgactcatgatcctcctctatttaagctggcgtccttcactcgctcgtcactcacaaagaagccggggacggagagcagagagcttcagcgcaactgtgctcaatcgtttcttcgtctttagttggtgcttggtctccctccgtcctctgtttcccaaacagaggtgtctcagctgactcttttgcttgctagcaaaatagcacactctctctctagagctgagcaccaccttgctgaaggcagctagctagcgacgaccatggtctcctcggacaccatccgcacggccatcggcgtcatcggtgggtagtagtcaatacctgcttagtatgtctttctctctctctctctcgccaacaagcttgcttgaaacatgtcccggtactcgtcaacgcaaagcattatttatgtgcatgtcaggattaatttcgtggaggcaggcctactcattttccttcccatatgctgcttgttcatatataggactaatttgccccaaattaaagttcaattggtgaatttttttctatttgttgccacaaaggaaaggacgggctatatatattatatactcacttttgggtttcttttctggtatgggtgtctcgcaggcaatgggaccgccctggtgctcttcctctccccggtgcctacgttcatccgcatctggaagaaggggtcggtggagcagtactcgccgatcccgtacgtggcgacgctgctgaactgcatgatgtgggtgttgtacgggctgccgctggtgcacccgcacagcatgctggtgatcaccatcaacggcaccggcatgctcatccagctgacctacgtggcgctcttcctcgtctactccgcgggggcggcgcgccgcaaggtgtccctcctgctggccgccgaggtcgccttcgtcggcgccgtcgccgcgctggtgctcgccctggcgcacacccacgagcgcaggtccatggtggtcggcatcctctgcgtcctcttcggcaccggcatgtacgccgcgccgctctccgtcatgaaaatggtgatccagacgaagagcgtggagtacatgccgctgttcctgtcactggcttccctggtgaacggcatctgctggaccgcctacgcgctcatccgcttcgacctctacatcaccatccccaacgggctgggcgtgctgttcgcgctggcgcagctgctcctgtacgccatctactacaagaacacccagaagatcgtggaggcacgcaagcgcaaggcgggccaggtcgccatgacggaggtggtcgtcgacggcagcagggcctccaacaacaacaacaacggcggcagcggcacctactgatgatgatgagtacgacgtaatattgtgcatggtgaccacgccaacacaacaccaagcaacacggggggccaacgccaacgccgtgtgtatctagcactagcaagcgtccttcttcctgacgaagggatgatctatgcatcttaagcagccgtcgtcttcttcttcttcttctgttaatccctagcttttattttctccatgcttcctagtaacgaagctttgcccactgattattagtacttatatgttgaatcataatattacgacctcggcagcccaaacacttctcttaatccatctaatcaatagaccttagccaagtcaacttaatcaattgactgatagtactgcttgact

SEQ ID NO: 127638 - DNA, 1588 bp, Zea Mays
tttttttatttttcttagaaagctgttaccgttactactttattacttagatgagagagagaaagcgcgcaagaaagacagaaagacgacactgtagtgactagtgtgagagagagctagatacagatagagatggaggtggagtggaggtgggcttggtgggacccgatagatgtccgcgggtccggccacggcgaggccagtgactcatgatcctcctctatttaagctggcgtccttcactcgctcgtcactcacaaagaagccggggacggagagcagagagcttcagcgcaactgtgctcaatcgtttcttcgtctttagttggtgcttggtctccctccgtcctctgtttcccaaacagaggtgtctcagctgactcttttgcttgctagcaaaatagcacactctctctctagagctgagcaccaccttgctgaaggcagctagctagcgacgaccatggtctcctcggacaccatccgcacggccatcggcgtcatcggcaatgggaccgccctggtgctcttcctctccccggtgcctacgttcatccgcatctggaagaaggggtcggtggagcagtactcgccgatcccgtacgtggcgacgctgctgaactgcatgatgtgggtgttgtacgggctgccgctggtgcacccgcacagcatgctggtgatcaccatcaacggcaccggcatgctcatccagctgacctacgtggcgctcttcctcgtctactccgcgggggcggcgcgccgcaaggtgtccctcctgctggccgccgaggtcgccttcgtcggcgccgtcgccgcgctggtgctcgccctggcgcacacccacgagcgcaggtccatggtggtcggcatcctctgcgtcctcttcggcaccggcatgtacgccgcgccgctctccgtcatgaaaatggtgatccagacgaagagcgtggagtacatgccgctgttcctgtcactggcttccctggtgaacggcatctgctggaccgcctacgcgctcatccgcttcgacctctacatcaccatccccaacgggctgggcgtgctgttcgcgctggcgcagctgctcctgtacgccatctactacaagaacacccagaagatcgtggaggcacgcaagcgcaaggcgggccaggtcgccatgacggaggtggtcgtcgacggcagcagggcctccaacaacaacaacaacggcggcagcggcacctactgatgatgatgagtacgacgtaatattgtgcatggtgaccacgccaacacaacaccaagcaacacggggggccaacgccaacgccgtgtgtatctagcactagcaagcgtccttcttcctgacgaagggatgatctatgcatcttaagcagccgtcgtcttcttcttcttcttctgttaatccctagcttttattttctccatgcttcctagtaacgaagctttgcccactgattattagtacttatatgttgaatcataatattacgacctcggcagcccaaacacttctcttaatccatctaatcaatagaccttagccaagtcaacttaatcaattgactgatagtactgcttgact

SEQ ID NO: 127639 - DNA, 1613 bp, Zea Mays
tttttttatttttcttagaaagctgttaccgttactactttattacttagatgagagagagaaagcgcgcaagaaagacagaaagacgacactgtagtgactagtgtgagagagagctagatacagatagagatggaggtggagtggaggtgggcttggtgggacccgatagatgtccgcgggtccggccacggcgaggccagtgactcatgatcctcctctatttaagctggcgtccttcactcgctcgtcactcacaaagaagccggggacggagagcagagagcttcagcgcaactgtgctcaatcgtttcttcgtctttagttggtgcttggtctccctccgtcctctgtttcccaaacagaggtgtctcagctgactcttttgcttgctagcaaaatagcacactctctctctagagctgagcaccaccttgctgaaggcagctagctagcgacgaccatggtctcctcggacaccatccgcacggccatcggcgtcatcggtgggtagtagtcaatacctgcttagcaatgggaccgccctggtgctcttcctctccccggtgcctacgttcatccgcatctggaagaaggggtcggtggagcagtactcgccgatcccgtacgtggcgacgctgctgaactgcatgatgtgggtgttgtacgggctgccgctggtgcacccgcacagcatgctggtgatcaccatcaacggcaccggcatgctcatccagctgacctacgtggcgctcttcctcgtctactccgcgggggcggcgcgccgcaaggtgtccctcctgctggccgccgaggtcgccttcgtcggcgccgtcgccgcgctggtgctcgccctggcgcacacccacgagcgcaggtccatggtggtcggcatcctctgcgtcctcttcggcaccggcatgtacgccgcgccgctctccgtcatgaaaatggtgatccagacgaagagcgtggagtacatgccgctgttcctgtcactggcttccctggtgaacggcatctgctggaccgcctacgcgctcatccgcttcgacctctacatcaccatccccaacgggctgggcgtgctgttcgcgctggcgcagctgctcctgtacgccatctactacaagaacacccagaagatcgtggaggcacgcaagcgcaaggcgggccaggtcgccatgacggaggtggtcgtcgacggcagcagggcctccaacaacaacaacaacggcggcagcggcacctactgatgatgatgagtacgacgtaatattgtgcatggtgaccacgccaacacaacaccaagcaacacggggggccaacgccaacgccgtgtgtatctagcactagcaagcgtccttcttcctgacgaagggatgatctatgcatcttaagcagccgtcgtcttcttcttcttcttctgttaatccctagcttttattttctccatgcttcctagtaacgaagctttgcccactgattattagtacttatatgttgaatcataatattacgacctcggcagcccaaacacttctcttaatccatctaatcaatagaccttagccaagtcaacttaatcaattgactgatagtactgcttgact

SEQ ID NO: 127640 - DNA, 1380 bp, Zea Mays
actcacaaagaagccggggacggagagcagagagcttcagcgcaactgtgctcaatcgtttcttcgtctttagttggtgcttggtctccctccgtcctctgtttcccaaacagaggtgtctcagctgactcttttgcttgctagcaaaatagcacactctctctctagagctgagcaccaccttgctgaaggcagctagctagcgacgaccatggtctcctcggacaccatccgcacggccatcggcgtcatcggcaatgggaccgccctggtgctcttcctctccccggtgtaagaacagccaattaatacagatactcatacaacatgtgtgtgtgtttgaaggaggatgtacgtactaaccgaaggacgtattatacaacgtacgtacgtacgtacgaacatgcaggcctacgttcatccgcatctggaagaaggggtcggtggagcagtactcgccgatcccgtacgtggcgacgctgctgaactgcatgatgtgggtgttgtacgggctgccgctggtgcacccgcacagcatgctggtgatcaccatcaacggcaccggcatgctcatccagctgacctacgtggcgctcttcctcgtctactccgcgggggcggcgcgccgcaaggtgtccctcctgctggccgccgaggtcgccttcgtcggcgccgtcgccgcgctggtgctcgccctggcgcacacccacgagcgcaggtccatggtggtcggcatcctctgcgtcctcttcggcaccggcatgtacgccgcgccgctctccgtcatgaaaatggtgatccagacgaagagcgtggagtacatgccgctgttcctgtcactggcttccctggtgaacggcatctgctggaccgcctacgcgctcatccgcttcgacctctacatcaccatccccaacgggctgggcgtgctgttcgcgctggcgcagctgctcctgtacgccatctactacaagaacacccagaagatcgtggaggcacgcaagcgcaaggcgggccaggtcgccatgacggaggtggtcgtcgacggcagcagggcctccaacaacaacaacaacggcggcagcggcacctactgatgatgatgagtacgacgtaatattgtgcatggtgaccacgccaacacaacaccaagcaacacggggggccaacgccaacgccgtgtgtatctagcactagcaagcgtccttcttcctgacgaagggatgatctatgcatcttaagcagccgtcgtcttcttcttcttcttctgttaatccctagcttttattttctccatgcttcctagtaacgaagctttgcccactgattattagtacttatatgttgaatcataatattacgacctcggcagcccaaaca

SEQ ID NO: 127641 - DNA, 600 bp, Zea Mays
gattttgcttatccaccccctctaggcgactttcaatttcttcatttatttcaggtcacatggcaaccatacaacgcacctgagttggatgggatgatctttaggacagtatgcaacatcgatgaggaaatctataggatgcaatgtcctatgatctgtttctggtgtgttgagtggcacctaccgcacagggttgagaggcagtttggtaggaaccagatatggccggttgaagatattccaacttctagggagctgcacaaatttgaccgacgaaagcaaaataagataacagactttcgtcatcatctagcatttattaaatagtgggatttggctgcgaagaatgtgcatgaaaacgatgagttgcacaacaacagtgactacaggcggtaccaagcttggtaccatggtgcgattcgttgtaagcttcgccagcagtggacaacagatgactacgccgacattgattcttccgatgatgaagacacggagtacaaccattccagtagactaggaacccaagtggaggcggcacccatcttggatcgagtgggtaacacattgagacgctcggtacgtgacattgatcgacaactt

SEQ ID NO: 127642 - DNA, 358 bp, Zea Mays
cccatttatcccaaaagcaaagtaaaactctgtttaaccttccaaccccatgtacccgcaattgttatcccaacttagataatggcatctaacaccacgactgatggtccctaaatcagacccaagaaggttaacctcgacaatgaaggatatgagtagaaatagatcttcaggtgaatcaagatccaccacccggaaataaaagtctcccttacctaactttcccttacccccaaatcttctctacactcacctaatagctaaaacttgatgtacccttgttttctatgccacacctgctaatggcatgaaaatttttaggtgtataaaaaatactaattggaagttccacttagat

SEQ ID NO: 127643 - DNA, 110 bp, Zea Mays
caccgaggaaaagcagtaggatgacctcagtgatggacacactctttggtacaatgactataaaaaagccttccaagcctgagccacaccagggtccctaaagaaaagag

SEQ ID NO: 127644 - DNA, 1752 bp, Zea Mays
atgttcgccacctttctcctgctgctgtggtcccatgccccggcgccggcgctctcgctgccgccgcgccctccggtacgctgcagcgatggcgggaccacgggctgcgtgctctccaacgcctacggcgcgtggtcgagcgaccgcgccgactgccccgtctcctccgtcgcgtacccggcgtccgagcaggaggtggtcgcggccgtggcgcgcgccagcgccagcggcgcccgcgtcaaggtcgtgagcggcttcgcgcacaccattccgaagctcgcctgccccggcggcggcaacggcactaccaccaccctgctcatcagcacggcgaggctggcaggcgtggaggtggacgtcgcggcgcggacggtgaccgcggacgccggcgcgccgctgcgggccgtcatcgacgcggcagaggcgagcgggctcagcctcacggcggcgccgtactgggagggcgtcagcgtcgcggggctcgtgagcacagggtcccacggcagctcgtggtggggccgcggcggtgccgtgcacgaccacgttgtggggctcaggctcgtcgttaccgccggggaggctgacggctgggccagggtcctgacgctgcgcagaggcgacgagctcttcccggctgcgcttgtctcgctcgggctgcttggggtcgtctccaagatcacgctgtcactggaaccgaggttcaagcgcagcatcaccttcgactacaggaacgattccaccttccaggacgacttcgccgctcacgcggcgagccacgagttcgccgacatcacctggtacccgtcccagcacacggccgtgtaccgcatcgacgaccgcgcgccggccaacgcgcctggggacggcgtcaacgacttcatcggcttccaggcgacgcccatcgctgtcaccgccgggctcagagtggtagaaacttcactggagcggtccaagaacatgaagggcaagtgtgcgatggcggcggcggagggcgtggcgaagcggctggtcggcaacgggctgaagaacaacggcctgctgttcacggggtaccccgtggtggggtaccaggggaagatgcagacgtcgggctcctgcgcgcgctcctcggcggcggacctgctcagcgcgtgcgggtgggatcccaggttccacggcctcttcttctacgagagcacggcgatcttctcgccggcccggttccgggacttcatcctcgacgtgaagcgcctgcgggacctcgccggctcggacagcctctgcggcgtcgacgtgtacaacggcctcctggtccggttcgtgaaggcgtccgcggcgcacctcggccagccggaggactccgtcgtggtggacttcaactattaccgcgcgtcggactcggcggcgccgcggctgagccaggacgtgtgggaggaggtggagcagctggcgttcgtcaagcacggcgccaggccacactgggccaagaaccgtttggtggcgttcgccggcgtgcggggcaagtacccgcggtggggccagtttgcggcggctaagcggcagctggacccccggggcttgttcgacagcccgtggtcggacgaggtcgtcggcggggtggagctggccaagggcgacgggtgcgcgctggacggccggtgcgtgtgctccgaggacaggcactgcagccccgagcaggggtactactgcaggccggggctcgtgtttacggacgccagggtctgcaggtactcggggtcgcagaaccagtga

SEQ ID NO: 127645 - DNA, 120 bp, Zea Mays
ttattctaaatgcaaataaaaatcaaacacttgaaagaaaaattcattactatatttaccaatgataatctaaatgcattatttttttacttgatggttttgtggtgttatagtccccga

SEQ ID NO: 127646 - DNA, 916 bp, Zea Mays
ccgcagccataccggattcccggattctccttgctcatgcgtacttctcctcagcgccgcccgcccagttctaggacccgcgcgccgcctggcctcgtcctcctcgttgcagactctcacgcccggtcccccacctcgtcgtggtcagccaccacgccggtgctcgcccgctcctggctgaccgtcgaccgagccgctcgccctgatcactgctcccagttcgtccatatctcacatcacgtccaacactacgctgctgctactcctatcccacacgcatagcactagcacctgacagatcgaagggatccacattctagctcttggagcatgctgccataggctacagctacggttattacattatagccggaagtgctccagctccaggactgattcaacagtttaaagaaggtactgctaccattgaagtcgatgctcttgatttgtgtatagtgatctggctgtgtttgttcgtgtgaatcacagtttgtggttggcaaagatggctagatggtgtaggaagtgaagttccagatcgacgctcgcctggtgctcggtgaattgcctgaactagagatcgtcgtcactttcacaatttccgagtcattttagtattggtgggttgatttgctgctccgacttgctggtttgatgaacgaatggaatgagatggatagtcttaggcatgtttgttttaacttatagattatataatctaaattataatctagattatataatctggattatttgctctggattaaataagctagatgttgctgtttgttagcttagattatttggactcgacttattattcatatgtatacaaatataacaatatccttggccgttttacttgtatggtttcatcagttggcactgcatcagtttatacataacagtttataca

SEQ ID NO: 127647 - DNA, 2837 bp, Zea Mays
gctcaacaactccgtactcgttctcttttactagcaaagacatattctttttttttcgagagaaaataataaacgatggaaggaatgccatgcatatactcatggtaaataaaatggaaaaaggcgataaataatttactcggcgccggcggccgacgtggcttcccttgcagcggcacactcacccgagacctgtagccggtggccgctatccgcgggggctccaccgccactcccgactcccgctcgccgcccgccttacaaaaccccacaaccccatccgcagccacccgccgcggcaccccctccaccaccggccaccatgcagacgcagaccctcatcctacgcgctggcccctccgcccgacgctccacgccgccgccggccagcaccgtgcacctcgccgcctccggaaggtgcctgctgcgtgctcccagctcgctccgacgccgaagaacccgctctctcagggcctctgcctctctcgagcaggtcaaggaagtcgccagctccccagctccctccgggaagagtagtcaagcaactagaagagatgtgaggaatatcgcaattgttgctcatgttgatcatgggaaaacaactttggtggattcaatgttaaggcaagccaaggttttccgagataatcaagttgtgcaggaaagaataatggactccaatgacctagaacgggaaagagggatcacgattctgagcaagaatacatcaataacctataagggcactaaaatcaatataattgatactcctggacattcagattttggtggggaggttgagcgtgttctgaacatggtggaaggagttcttctagtggttgattctgtagaggggcctatgccacagacaaggtttgttctgaagaaagctctagaatttggacatgctgttgttgtagttgtaaacaagatcgacagacctactgctcgtcctgagtttgtggtgaattcaacatttgaactatttattgaattaaatgcaactgatgaacagtgtgatttccaaacagtctatgcaagtggaattaaaggaaaggccagtctatctcctgacaatttagctgatgacctaggacccctttttgaggcaattcttagatgcataccagagccacgcgttgagaaagatggtgccctgcaaatgcttgtatctaatactgaatatgatgagcacaaaggaagaattgcaattggacggctgcatgcaggagaacttcagcgtggcatggaggtcaaggtttgtacaccagacgatgcttgcagggttggtaaagtgagtgagctttttgtttatcagaacttcagccgtgcccccgttgaatctgttagtgctggtgacatttgtgctgtatgtggaatcgatgatatcatgatcggggaaactatagctgataaagttacaggaacaccattgcccactatcaaagtggaggagccaacagtcagaatgtctttctccatcaatacatcaccttttgttggacgggaggggaaatatgttactagccgaaatctccgtgacaggttgtatcgcgagctcgaaaggaatttggctatgaaagtagaagacggggaaactgctgatacatttcttgttagtggcagaggcacactacatctcacaatattgatagaaaatatgcggagagaaggatatgaatttatgattggacctccaaaggtcataaacaagacagtcgatggaaaactactagagccttatgagatagctgctgttgaagtcccagaggagtccatgggatcagttgttgagcttttagggaaaaggcgtggacagatggttgacatggaagctaacgggacggagggaacaacattgctgaaatacaagattcctaccagaggccttattggacttcggaatgcaattcttacagcttctcgtggcagagctatattgaatacaatctttgacagctatggcccatgggctggagatcttagctcacgtgatcagggatccttggttgcttttgaagatggaagcactacttcttatgcacttcttaatgcacaagaaagaggtatgttgtttgtccaaccagggcaggatgtttacaaaggtcaaattgttggtatccatcagagacctggtgatttagcaattaatgtgtgcaagaaaaaggctgctacaaatgttcgttccaacaaagaaactacagtggttcttgatgaacctttaagctacagtttggatgactgcatagagtttatccaagaagatgagatagtggaggttactcctgcaagcatccgtatgtgcaagaacccaaaagtttcgaagaaaaagtaacataatcgcatccatttgtcgtcaatgcatcttctacacatagaagctgcatgctccgttgccaggtctcgtatgagtgacggctgcacggcgtcctcaagtcagtaatcaggatatttttggtggtctacagacaaagactaaaggtcgccagattaagatagaggattatatggcagttttgtgatgaataaatcagccgatacctggagtagtattatttggccacggataaggcgggcactgtttctcatctacttctccctgttctttttatttgtcgtgttttagttcaaaaatgaactagacgacaaatatttgagaacgaagttagtattacacatatattgtgtaggtcatacgtaggactataggcattgtacacgattctttcgacgctagtaaagactggaagaaagctttagcaaatggattagcacacaactgctgctacagactcttatttatttgtaattcaagccagtctataagttgcaacaaa

SEQ ID NO: 127648 - DNA, 2840 bp, Zea Mays
gctcaacaactccgtactcgttctcttttactagcaaagacatattctttttttttcgagagaaaataataaacgatggaaggaatgccatgcatatactcatggtaaataaaatggaaaaaggcgataaataatttactcggcgccggcggccgacgtggcttcccttgcagcggcacactcacccgagacctgtagccggtggccgctatccgcgggggctccaccgccactcccgactcccgctcgccgcccgccttacaaaaccccacaaccccatccgcagccacccgccgcggcaccccctccaccaccggccaccatgcagacgcagaccctcatcctacgcgctggcccctccgcccgacgctccacgccgccgccggccagcaccgtgcacctcgccgcctccggaaggtgcctgctgcgtgctcccagctcgctccgacgccgaagaacccgctctctcagggcctctgcctctctcgagcaggtcaaggaagtcgccagctccccagctccctccgcagggaagagtagtcaagcaactagaagagatgtgaggaatatcgcaattgttgctcatgttgatcatgggaaaacaactttggtggattcaatgttaaggcaagccaaggttttccgagataatcaagttgtgcaggaaagaataatggactccaatgacctagaacgggaaagagggatcacgattctgagcaagaatacatcaataacctataagggcactaaaatcaatataattgatactcctggacattcagattttggtggggaggttgagcgtgttctgaacatggtggaaggagttcttctagtggttgattctgtagaggggcctatgccacagacaaggtttgttctgaagaaagctctagaatttggacatgctgttgttgtagttgtaaacaagatcgacagacctactgctcgtcctgagtttgtggtgaattcaacatttgaactatttattgaattaaatgcaactgatgaacagtgtgatttccaaacagtctatgcaagtggaattaaaggaaaggccagtctatctcctgacaatttagctgatgacctaggacccctttttgaggcaattcttagatgcataccagagccacgcgttgagaaagatggtgccctgcaaatgcttgtatctaatactgaatatgatgagcacaaaggaagaattgcaattggacggctgcatgcaggagaacttcagcgtggcatggaggtcaaggtttgtacaccagacgatgcttgcagggttggtaaagtgagtgagctttttgtttatcagaacttcagccgtgcccccgttgaatctgttagtgctggtgacatttgtgctgtatgtggaatcgatgatatcatgatcggggaaactatagctgataaagttacaggaacaccattgcccactatcaaagtggaggagccaacagtcagaatgtctttctccatcaatacatcaccttttgttggacgggaggggaaatatgttactagccgaaatctccgtgacaggttgtatcgcgagctcgaaaggaatttggctatgaaagtagaagacggggaaactgctgatacatttcttgttagtggcagaggcacactacatctcacaatattgatagaaaatatgcggagagaaggatatgaatttatgattggacctccaaaggtcataaacaagacagtcgatggaaaactactagagccttatgagatagctgctgttgaagtcccagaggagtccatgggatcagttgttgagcttttagggaaaaggcgtggacagatggttgacatggaagctaacgggacggagggaacaacattgctgaaatacaagattcctaccagaggccttattggacttcggaatgcaattcttacagcttctcgtggcagagctatattgaatacaatctttgacagctatggcccatgggctggagatcttagctcacgtgatcagggatccttggttgcttttgaagatggaagcactacttcttatgcacttcttaatgcacaagaaagaggtatgttgtttgtccaaccagggcaggatgtttacaaaggtcaaattgttggtatccatcagagacctggtgatttagcaattaatgtgtgcaagaaaaaggctgctacaaatgttcgttccaacaaagaaactacagtggttcttgatgaacctttaagctacagtttggatgactgcatagagtttatccaagaagatgagatagtggaggttactcctgcaagcatccgtatgtgcaagaacccaaaagtttcgaagaaaaagtaacataatcgcatccatttgtcgtcaatgcatcttctacacatagaagctgcatgctccgttgccaggtctcgtatgagtgacggctgcacggcgtcctcaagtcagtaatcaggatatttttggtggtctacagacaaagactaaaggtcgccagattaagatagaggattatatggcagttttgtgatgaataaatcagccgatacctggagtagtattatttggccacggataaggcgggcactgtttctcatctacttctccctgttctttttatttgtcgtgttttagttcaaaaatgaactagacgacaaatatttgagaacgaagttagtattacacatatattgtgtaggtcatacgtaggactataggcattgtacacgattctttcgacgctagtaaagactggaagaaagctttagcaaatggattagcacacaactgctgctacagactcttatttatttgtaattcaagccagtctataagttgcaacaaa

SEQ ID NO: 127649 - DNA, 132 bp, Zea Mays
cttaaacatgccgggctcatttcgggcggcccgaaattataaaatccctaaattcacattagggcctgaaattcacatcagggcccgaaattcacatcagagcccgaaattcaaaacaaatttaataaaaca

SEQ ID NO: 127650 - DNA, 1363 bp, Zea Mays
gtccgattgtgcgctgtcgcagcctctgccctctcccagcccgctcctccatctccggtgagacgcgaattgaatcgcatcgaatccatgggcagctcctcgaataccaacacgagcggcggggccagcgacaaggaggagaagaagaaggaggacaagatcaaaggcaaggactcgtcggggccatccttcaaggagaacgaaagggtcctcgcctaccacggccccctcctctacgaggccaaggttcaaaggatcgaaaaccatgaagatgaatggcgctactttgtccattatctcggttggaataagaactgggatgaatgggttgcaaatgaccgcttgttggaattgacggaggaaaacgtgcgcaaacaacaagagcttgataagaatcaggtagttgacaaaacaatgaagtctggacggtcaacacagcataaaccaaaagtctccaatgcggatgcaaaagctgataaagatgacactaagagtctcatgaaggggaagaaacgtaaaagtcagcttgggactgagattcaggacaaggaaaaaagatcatcacatagtctactagtgttgcagtttcctttgccactgaagaagcaacttgtggatgattgggagtttgttacgcagatgggtaagcttgtgaagctaccacgatcacctactgttgatgatattctaaagaagtacttggaacaccgggcaaagaaggatggcaagataaatgactcctatgctgagattctgaaaggattacgctgctactttgataaagcattgcctgcaatgcttttatataagaaagagcgagatcagtatgctgaagaagttaaaggtgatgtctcaccatcaactgtatatggagctgagcatctattgcgcctttttgtaaaattgccagagctacttgcttctgtcaatatggaggaagatgcgttgaacaagctacagctgaaactgctggacgttctcaagtttcttcagaagaatcagatcaccttctttacctctgcgtacgatggttcttgtaaaggtgcagatgaggataaaaccaaatgattgcatgtgaacgttttatatcatgtaacatctttcgatggacttgtctggcactattgttgatatgaatgtcgcttaggacaacaatcggtttatgtaggatagatgctgcagattcctgaaagacggtacttgaactgcccggagcatgttgtattttcttaagatgctggaactaagacggcttagttgaattttcactatcaagtgagtctcggtcttgccccaaaaagaatgttttgtacctcctctgtcccaatttatacgacaatttataattcgtatgacttttttg

SEQ ID NO: 127651 - DNA, 1363 bp, Zea Mays
gtccgattgtgcgctgtcgcagcctctgccctctcccagcccgctcctccatctccggtgagacgcgaattgaatcgcatcgaatccatgggcagctcctcgaataccaacacgagcggcggggccagcgacaaggaggagaagaagaaggaggacaagatcaaaggcaaggactcgtcggggccatccttcaaggagaacgaaagggtcctcgcctaccacggccccctcctctacgaggccaaggttcaaaggatcgaaaaccatgaagatgaatggcgctactttgtccattatctcggttggaataagaactgggatgaatgggttgcaaatgaccgcttgttggaattgacggaggaaaacgtgcgcaaacaacaagagcttgataagaatcaggtagttgacaaaacaatgaagtctggacggtcaacacagcataaaccaaaagtctccaatgcggatgcaaaagctgataaagatgacactaagagtctcatttcagtgaaggggaagaaacgtaaaagtcagcttgggactgaggacaaggaaaaaagatcatcacatagtctactagtgttgcagtttcctttgccactgaagaagcaacttgtggatgattgggagtttgttacgcagatgggtaagcttgtgaagctaccacgatcacctactgttgatgatattctaaagaagtacttggaacaccgggcaaagaaggatggcaagataaatgactcctatgctgagattctgaaaggattacgctgctactttgataaagcattgcctgcaatgcttttatataagaaagagcgagatcagtatgctgaagaagttaaaggtgatgtctcaccatcaactgtatatggagctgagcatctattgcgcctttttgtaaaattgccagagctacttgcttctgtcaatatggaggaagatgcgttgaacaagctacagctgaaactgctggacgttctcaagtttcttcagaagaatcagatcaccttctttacctctgcgtacgatggttcttgtaaaggtgcagatgaggataaaaccaaatgattgcatgtgaacgttttatatcatgtaacatctttcgatggacttgtctggcactattgttgatatgaatgtcgcttaggacaacaatcggtttatgtaggatagatgctgcagattcctgaaagacggtacttgaactgcccggagcatgttgtattttcttaagatgctggaactaagacggcttagttgaattttcactatcaagtgagtctcggtcttgccccaaaaagaatgttttgtacctcctctgtcccaatttatacgacaatttataattcgtatgacttttttg

SEQ ID NO: 127652 - DNA, 1321 bp, Zea Mays
gtccgattgtgcgctgtcgcagcctctgccctctcccagcccgctcctccatctccggtgagacgcgaattgaatcgcatcgaatccatgggcagctcctcgaataccaacacgagcggcggggccagcgacaaggaggagaagaagaaggaggacaagatcaaaggcaaggactcgtcggggccatccttcaaggagaacgaaagggtcctcgcctaccacggccccctcctctacgaggccaaggttcaaaggatcgaaaaccatgaagatgaatggcgctactttgtccattatctcggttggaataagaactgggatgaatgggttgcaaatgaccgcttgttggaattgacggaggaaaacgtgcgcaaacaacaagagcttgataagaatcaggtagttgacaaaacaatgaagtctggacggtcaacacagcataaaccaaaagtctccaatgcggatgcaaaagctgataaagatgacactaagagtctcatttcagtgaaggggaagaaacgtaaaagtcagcttgggactgagtttcctttgccactgaagaagcaacttgtggatgattgggagtttgttacgcagatgggtaagcttgtgaagctaccacgatcacctactgttgatgatattctaaagaagtacttggaacaccgggcaaagaaggatggcaagataaatgactcctatgctgagattctgaaaggattacgctgctactttgataaagcattgcctgcaatgcttttatataagaaagagcgagatcagtatgctgaagaagttaaaggtgatgtctcaccatcaactgtatatggagctgagcatctattgcgcctttttgtaaaattgccagagctacttgcttctgtcaatatggaggaagatgcgttgaacaagctacagctgaaactgctggacgttctcaagtttcttcagaagaatcagatcaccttctttacctctgcgtacgatggttcttgtaaaggtgcagatgaggataaaaccaaatgattgcatgtgaacgttttatatcatgtaacatctttcgatggacttgtctggcactattgttgatatgaatgtcgcttaggacaacaatcggtttatgtaggatagatgctgcagattcctgaaagacggtacttgaactgcccggagcatgttgtattttcttaagatgctggaactaagacggcttagttgaattttcactatcaagtgagtctcggtcttgccccaaaaagaatgttttgtacctcctctgtcccaatttatacgacaatttataattcgtatgacttttttg

SEQ ID NO: 127653 - DNA, 1316 bp, Zea Mays
gtccgattgtgcgctgtcgcagcctctgccctctcccagcccgctcctccatctccggtgagacgcgaattgaatcgcatcgaatccatgggcagctcctcgaataccaacacgagcggcggggccagcgacaaggaggagaagaagaaggaggacaagatcaaaggcaaggactcgtcggggccatccttcaaggagaacgaaagggtcctcgcctaccacggccccctcctctacgaggccaaggttcaaaggatcgaaaaccatgaagatgaatggcgctactttgtccattatctcggttggaataagaactgggatgaatgggttgcaaatgaccgcttgttggaattgacggaggaaaacgtgcgcaaacaacaagagcttgataagaatcaggtagttgacaaaacaatgaagtctggacggtcaacacagcataaaccaaaagtctccaatgcggatgcaaaagctgataaagatgacactaagagtctcatttcagtgaaggggaagaaacgtaaaagtcagcttgggactgagtttcctttgccactgaagaagcaacttgtggatgattgggagtttgttacgcagatggcttgtgaagctaccacgatcacctactgttgatgatattctaaagaagtacttggaacaccgggcaaagaaggatggcaagataaatgactcctatgctgagattctgaaaggattacgctgctactttgataaagcattgcctgcaatgcttttatataagaaagagcgagatcagtatgctgaagaagttaaaggtgatgtctcaccatcaactgtatatggagctgagcatctattgcgcctttttgtaaaattgccagagctacttgcttctgtcaatatggaggaagatgcgttgaacaagctacagctgaaactgctggacgttctcaagtttcttcagaagaatcagatcaccttctttacctctgcgtacgatggttcttgtaaaggtgcagatgaggataaaaccaaatgattgcatgtgaacgttttatatcatgtaacatctttcgatggacttgtctggcactattgttgatatgaatgtcgcttaggacaacaatcggtttatgtaggatagatgctgcagattcctgaaagacggtacttgaactgcccggagcatgttgtattttcttaagatgctggaactaagacggcttagttgaattttcactatcaagtgagtctcggtcttgccccaaaaagaatgttttgtacctcctctgtcccaatttatacgacaatttataattcgtatgacttttttg

SEQ ID NO: 127654 - DNA, 1458 bp, Zea Mays
gactaactttaggcagccacaaaaagtgtggcgaggttccctgagcttgccatactttttttcgccgcatctggggcgctcgttttcgatgccccagcaccgctacgcgccgcacttcgcccccttctctccctctcatgccgctggttgatctctcgtcatctcctcctccaagcacggatcttctcgtcgtctcctccaagcacggaccaggagcactgaaattctatctcaaccggttctgccgactgggtaacttgaattctaaagatgggtgtgaaggagatgtatcttcaatattacaatagttacatccagtacctacgaagaagaagggtgcttatttacattaccatttgtgtggtttttctttggtacaaactgaatagattacataggaagagtgttaaatatggtcctttgttacaacgagatttggaacgagagaggcggctcaaccggttgtataatgggacagaagccaattgtattagtgagttgcgcatgcgcaaatttgttttccataggttatgtagccatttaaggtctcgtaggttgttagaggatactgtcaatgtctctgttgaagaacaagttgctatgttcttaaagtttgttggtcatagatggacaaataggtcagttgggtttgaattcctgcggtccggagaaacagttagcaggtacttcaaccttgttttagatgctctatgtgtcatgtcacgtgacctcattaccatgagaaccacagggacacatccaaagatatctagtagtccgagaagatttcacccgtactttgagagatgtgtaggagcactggatggcacacatgtaccagcatgggtccccatttatatgcaggataggtttagaggtagaaaacactacccaacacagaatgtgttagctgccgtggattttgatcttaggtttacatatgtgttggccggatgggaaggatcagctcatgactcatttgtgctccaagatgcattgtcacgtccctcaggcttaaaaattcccgaaggtcatttctttctagcagatgcgggttatgcagcacgacctggcatattacctccatataggggtgttcggtaccatcttaaggagtttcaaggtactagacgaccagagaatccaaaagaactgttcaaccttcgacactcttctcttaggacaacgatagaacgtgcatttggtacactcaaaaacagatttaagatactcacaagtcaaccgttcttccctctcaaaactcaagtaaagatagttttggcttgttgtgctttgcacaacttcataatagaggatggcactgatatttatgtttatgaagatgaggcatggtttggaagtcttccaagaagcagtcgtacccatgctgatatgaacagagataatcaactttgggccactatgcgtgatcagctagcgcaacaaatgtgggacgat

SEQ ID NO: 127655 - DNA, 177 bp, Zea Mays
gatagggcaaggaggctcctttctaagcctatcaagtttttcaatgagatgcaggagttgtttattgacagtagtgctgatggctctctagctatggatgctacaacctgcatgaatgaaactcatcctggagatgacagtgacttcaatgatgatgttgatccaagcaggaggtga

SEQ ID NO: 127656 - DNA, 245 bp, Zea Mays
gttattttgcatttcttctaggttgatgcatgacggttcatggagaaggctggtggttgtgatagctatcacacactcttttggttaataattagatactctttttgttgagcaatgtgaacctttaatggtgtttatgggtcttgtggagttgtgatggggctattatgaagatgctatggcctgttatggatgattggacatgttatgggctctatatattaatctgttattttggtttcctc

SEQ ID NO: 127657 - DNA, 976 bp, Zea Mays
aggatgacaaaaatttcccactccactcaaattaaaaccctagaggcaaaaccttcgctctgcgccgccgtcgcctgctcccgtcctgccaccacatctgcccaggagctcgccgtgggggaggctgctcgaggagccactctgtctctcccgcgccgcgaccttcgccctcgccgccgccatgatctacgcgatctccggtgaggtgccggacgagccagtggtgtcaaagatgtcggggcttctcttcgagcggcggctcatcgagcgctacattgaggaccatagcaagtgccccatcaccaaggaggagcttactatggatgatatcgtgccgatcaagaccaacaaggtcgtgaagcctaggcctttgcaggctacaagcattccaggactccttgggatttttcagaacgagtgggatgttctcatgctttctaattttgctttggagcggcagctacacacagcaagacaagaacttagtcatgcgctctaccaggctaggggattgaagaagcacttgaagaggctcaataaagcccaagcattggatgctcgacaagcttggtggagcttttatggttgccacatccaaggttctgttgtatgtaataatgttcagctgcaagaacgagcggttattgagagattgccagatgtggtatttgaagaagggagaccttgggactgggacagttcaaagtgcagcacagatcaacaagagaatgacacttttattgttcactatgatctaactgaccaaaacatggcaacagctggggatgatagtaacccaacactgtcagatcaaagtacaggaggagaaaattcagttggccaaagcagtggaacaggacaagctaatgaacctgcttctccatacactccaatatcaagtatgatgcaaaatcaagggatgggaactccatctgttcaacaatcagagagctcaaggatattcgagacagtttga

SEQ ID NO: 127658 - DNA, 1702 bp, Zea Mays
atggggcggaagtggaacgagctgtcgtcggctccatggaggatgggggaggcggcagaggacgaggacgcgacaaggatgagccgagaggggaaggtcagcatcaccagcaaccccgaggagatgcccaccatgagcgtgccccggagcagacgcccggacctcgacctcaccatcgatgacttcgaggaggacgagatcgaccccgagctgcgctactccttccagcggaacaacaggtttctgaagagagtttttagcgtggacgcacttgtcaagcctctccctcctgtaatggcatacagtgtatcccgcaatataaacttcttcttccggatcttcacacagttctgggtaaacaatggtctcaagccagtattccatgtatcccgcctctcatgggtgatcatggacttttatctggatttggcagaagacaacagaaaaattactccacgagattacctagagctagcattgaggcctgttcaaggtggaggaagggacatatctgcaaagaatgtgatacgggactccatccgtgcactttttccggacagggaatgttttacacttgtgcaacctttgaacaatgagaaagatctccaacgtcttgatcaacttcctgttagattaaaacttttcctaagttcatttacgcaaatagcaaagtatattatgattgcttatagcaatgtggcttctgtttttttggcttacagtgctttaaatgtttttgctgttggtgctgggtcagctcgttcaaaatttgaaaagcttcttcacagttctctcaaaaaggcctttgaggactacaaaaggaatgcttttctggaggctgacttgcaatgttctaataaagttcagaacatggaatcaaaggtgcgagcagcatgtaacagttcgaatgcaaaattagatgacatagtcaggctccttgatgacctactcacagagtatgagtcaacggcctatggtcctggaaaatggaaaaggctagccacattcttacagcagtgtttggctggccctgttctagaccttttcagaagacagttagagcatatagatgctgaaaggaacgccctgagattgaaatgcaattcaagagatgtggaactatctgagaagcctccccatatgatatcatgccacgtggacaagtttcataattttctgagtttgtttgtgttttataaaatttttaaacggctggatggcaagttcacggccatgttgagtgagcatggtgctcgaagtttccggtacgctcctgaaatcggtcgtaacttgtgctaaatagcatggatatgatttttgcatgcacgattttctaagtttcgagtgacttgcagttcaaatgtgattttttcgaagaaattcaaataaacgaactaaatctactagctatagaaaacacttttctaattgtcccaaaatggtacaagtaggtctatatagtgtaggaacacaccacaaaaagtttggttgggaaaataaaaaaataaaaatgtaatttgccgagtgtccagaaatgacacttggcaaagtagcctttgtcgagtgtcagctagttgacactcggcaaagaaaagtaaaataatctttgccgagtgtagcccaggggacactcggcaaagacgcctttgccgagtgccagatcgggggcactcggcaagtgtattttaaaattaaaaaaaaa

SEQ ID NO: 127659 - DNA, 716 bp, Zea Mays
gcgcgcacccctcctccagctcgcctcccttcaggcagggccagctgcagctctgcattccacctcccatggcgcccctgcgacttccatggccgcccgccctccctgcgagctcagctcctcctcattcatggcgccccctgctcttccctgcccggccaggaaacgccctggccaggaacgccttgagctcgcccctgctcctctctctctaccaagcgcccccctgcaaatcttccctttcctcccccctgctcctctccttgttgcagcgccgggaacgcagcaacagccctgcgcagcacccctgcgcgagcccccttcctcgctgttcgtcgtggtgcccaccggccgttcgtcaaaatgcgcagcaagccgcgcgctgccggctcgctgtttcgtgaagccctgtggacagcacgccgccgacgctcaccgtgggttgctgtttttgcgcagcccctttgtcgtcgtcgttcacccccggtgagaccacgacgatttatgttcgattccgcatcgggttatttttcctatgattaattgcgtatgtgctgtttggtttttgttttgtggaggagaggaaccttgcgttttgcgagaagaaggccaatcattcaacgctcgtcggatgtttggagcgatgcacaaatcggaatcaccgtcattcttgcaaacaccgcttgggtttgtttatggtgagccgatgcatgtcg

SEQ ID NO: 127660 - DNA, 171 bp, Zea Mays
atggcagaagggcacggaggagcccagatgacggcgaaaatggcgagcgactgtgcatcagcctcaggcagggagcagcgagcagagtgtgacgctgtgcaaatgaacaggggcgaggggctgccgagctcgggcaggggaaggaatgctccgttggcgtggcttttatag

SEQ ID NO: 127661 - DNA, 1678 bp, Zea Mays
cagaatcctgaagcgactattgtccctttcaattcccctcccctacctgaggccctgaagcctgggtagccgatccatccgaaattccgaaacccctgcggcatgggaatggaaatcgagaggccgccgcagccaccgcctgtcgctgctgccatggctgcggcggcagccatttccacggtgctcggcgacgacgaccttctgcgcgagatcctcgtacgcctcggcctccccaccagtctcctccgtgccgctctcgtctgccggcgctggctccgccacgcctccgatccggccttcctccgccgattccgtgacctcaacccgccccgtctcctcggcgtctacctctccacctcgtccggccccgccccgcgcctgcggttcctcccgattcgtccggtcccggagctcgccgccgccgcccgccgcgccggctccttcttcaacgccttcaagggatcctcggccgctgtctacgacagccgcggtggccgcctcctcgtcaccaccttcgatgaccgccacgactccacgcaccaggtctgccgcccgctgtctccgggcggggacaccaccgtggttccgccgcccccgccgccgccgccgatccagctcaacaacgacgaggagtgcctcatctaccactacggtgaattccttcgcgatgatggcgacggccgctcctacttctgcgtggtgatggggtttagtgagctgcagaccaccgtgtacttgtacgagttgcacaacatcaactgggttgtcaaagcctcggcggccgtgttgctcgctttattgccaccgaaaccaagggttatgctcttcgatagcgccaacttctacatgttgtccgcaaccaacaggattcttgtgtgtgattttccatcctcaagtatctcagtcatggagctccccaatggggtggagaacaagcccggtggttgcatcatgctttccaggggagatagttctggaatctttctgatctatgtcaaagagtttcagctacacatcttccaccataggatgggcatcaattatccaagcaactggtccctagtggattctgtttctttgcgtcaggtatgcgccaatcttgatatggcaaggtggccatctgtgaatggacctagtgctggtgttaaattgtgcgcagttggggacaatgcggagtttgtgctcttggagatatttggtactattgtattcttggatattacaagcaggcaagcagagaaggtgtatgagctgacaccagaggataaagagttggtcagtgtccgccccctgatgttgatatggcctcctgttttccctcagttgaaggatgcatattatgacaaaaaagagtgatgcaaaggctcaaaatacagcttcagaggaaccagttcaaagctcaacctgcaggtccaaagatgagaatgagaagcataacaatatcactgaagaggcttcatgatgagcacaccctgttccgaggtggcgaggtgtagtaaaaacgagagagaataaagggaggctagttcatgtaaataactttgaataaaaaatagttgttaaactacttgtttagatcagatcatttgatgtaaataatgatttatcgaaacccgacggcactttctaattattcgtatgccaggcttttctttataatctataataagattttctt

SEQ ID NO: 127662 - DNA, 211 bp, Zea Mays
tttgatttcatgtaacttattttataaacttgagctcacaaactttctcttatttggtctctgtatggtggaattatgtcattttataatatctgtttgttcagtcagtcgttgtgaactctcttctaattgctcacttcattggtcgtgttgtacaaagacatattgcatggagtaaacaataacacaagttagccaaatcaaaaaaata

SEQ ID NO: 127663 - DNA, 1666 bp, Zea Mays
cacacattcctccctcagtccctcttccccccgtttcatcccttcacacccacagcccacctggtctgtcatcccctttgctacgctccccttgccctgtcccctcgccgcccgcgcccgtggagttcttcgatcgagtcctcggagcccggagcacctggtgcaacaatccggacccgcgcgaggaagggcggagagagagccgaatctgagcctcggcacaagttgggcacccgtcaagattctcggcccgatctgctgcggaacatggagctggacagcatcgagtgcatgtcctactccgacagcatgggggacgacgacaccgacgccgtcacctcgtcccagctccctcgccccttcctcaaatcctcctccaccgccggtactgccgccgtcaacgtggtcgtcgtctccgaccgcgtcggtgccgccgggccggtagcgggagcgggttcgctggtgatttcgccagccacgggcgtgcacgagctgctcgagtgccccgtctgcaccaattccatgtacccgcctatccaccagtgccaaaatggtcatactctatgttccacctgcaaaactcgggtgcacaaccgctgcccaacttgtcgacaagagctaggtgacatcaggtgtctggcattagagaaggtggctgaatcacttgagctcccctgcaaatactactctcttggatgttcagaagtcttcccatactacagcaaactcaagcatgaatcacagtgtaattttaggccatacaactgcccttatgctggttctgaatgctcagttgttggggatatttcttttcttgtggcacatctgcgagatgatcataaagtggacatgcactctggatgtacatttaatcaccgctatgtcaagtccaatccaagagaggttgaaaatgcaacttggatgctaactgtttttcattgttttgggcagtacttttgcttgcactttgaggcatttcagcttggaatggcaccagtatacatggctttcctccggtttatgggcgatgaaaatgatgctaggaactacagctatagccttgaggttggtgcaaatggcaggaagatgatatgggagggaactccccgcagcatccgggacagccaccggaaggttagggacagccatgatggtctaataattcagcgcaacatggctctcttcttctcaggtggagaaaggaaagagctgaaactgcgagtcacaggccgtatctggaaggagcagcagaatcctgactcaggagcctgcattcccaatttgttcagctgagctcagtaacaagaggatggatccaggtgtatattgatacggccgatgtgtttgtgtgagcgtgtgcctgtgctttgcgttttgtcctgccaagctgccattgcagcccgccctaaattagtcagggcgtatttactgttggcaggataatgaaaatactggcttactccttttgtgggctgtgactaagctcccatgaatctcacgataagcatttttctcgatccaatggtgtatactgtatcgttttgggctgaaggctgcagcttttttgctgttatgtttgtctcggtgtatttgtgtgtctgcaaataaagtattgaacagtaactgggtaccttgcataaggtttggttggctgttcacttgccta

SEQ ID NO: 127664 - DNA, 3586 bp, Zea Mays
tcttcaatatggcagatgttataatactagaatcctaattatctgtcttggagtaataattttaagaagttggaatacctgagttttttttaaaaaaaactcgacagacggttgtaatgggaaacaaaaaaaaaatccaaagataatgtccctatctttagggccggtgctttctcacgggaaaagaaggaaaaaaaagcctcgtccagtcgtcccagtcccgaccccttccgcctccgggactcctgcctacgtcataccatcgggcagccgaaccctcgattggccgccgccgccgtaagagagaccgacgtcctccttccactgccgagcgacacctcgaatttctctctcatcgtcatcccttctcccctttattcgcgtcgcgcatctgggagatccagccagcgtgatttgtgttatcggtagctttggatttgtttgtgacccggcgctaacccaacccatccggtggtggattcagcttcttggataccttggtggcggatgttctgctcgtagcaacttgtctcccagaatttttttgggggctagacgctacccctgccatggaatcaggcgataccaaatttgatgcatcacagtatgctttctttggcaacaatgccgtggaggaggttgaactaggtggattggatgatgatgatgatgctgcatttattgagcacgaagatgaagaaaaccctctttatgggagggataatatgttggaggagggtgtaggttcatttgctgacattgatgatcttgctggaactttctcgaagctgaccagaatagtcaatggaccaaagcaaccagtagtagttagtcatagtggatcaatttctagacaaagttctaatgcagagtgggtgcaagagtctgaacttccatattggcctacacagcctgtattggacactgatcacgggctggataaaaagaattggtggtcccaaccaccccattcagtcaacttcattgactatagactgcagaggacatcgtcatccccacagcaagatgctcagcataatcctgttgaacctattcttgaagcaaagccatctcctttacatagaacatcaacgtacccacaacaagaacctcagtacagtaatactgaaccaattcctgtgcccaagtcatcattcatttcatgtcctccatctggtgcagcatctcattcttcacctagtcagccacatcatgtgaacatgccatctcctcccactgcattccagttgcatatgtcttctgcacaaaatgatctactccttccccagttccatcatggaggtacgcctccagggcctccatttggtagacagaatcatgttttaaataatggatcgatgcatggaaagggtcccaggtttatgccaggtttgatgcctcatcaattgcaatgtcccaatggactgatgccacctcagatgcagccacctcatcaacatggaatgctgccaatacaacagtccccaccacagttctcacaactacatgcacggatgattggtccccatcattccccaccacaaagcatgcagatgtttggtcctcaacatccttcttcacaagtgatgagtagatttgatgcaaactttgctatgcctgacttgagtgatccaagagcaagatcaatgttgcaacatgaaaggctgggacagcgttatcctcaccaaggttatgagctcaataatattaggatagataatggatggtcacggttcagatccaagtacatgtgtactgaagaaatcgagaacattgcaaggatgcagcaggctgccacacacatcaatgacccgtatattgatgattactaccatcaagcttgtttagcaaaaaaatcagcaggggctcaactaaagcaccacttttgtccaaccttgattagagatccatcttcacgtgcacgcagtaaggatgagccacatgcatatctacaggttgatgctcttgggaggcttccattttcttctatccgcaggcctcgtccgcttcttgatgttgaacaagcctctgcaccaagtgataatgctgaaaaatctgtgtcaaagcctcttgaccaagagcccatgcttgctgctaggatcacaattgaagacggactttgcctactgcttgatgttgatgatattgatcgtctgctgcaatttagccagcagcaagatggtggtttgcaactgagaaacagaagacaggggctcctcgagcagcttgcagaatcactgcaattagttgatctccttgcaccaaataagaattcacctgtgtctccgtatgatgatttggtgtttcttcgcatagtcactctatcaaagggccagaagctactttcccattaccttgagcttctgacatcaggcagtgagcttgcaaggatagcttgcatggcagtcttccggcatctaagatccatatttggaaatatgccctctgatatcagtgcagtggagacaatgaatagacttgcaaaagctgtatccgcacatattgttcagatggatttgagtgatctcagtgcttgccttgctgctgttgtgtgttcatcattgcaaccacctcttcgacctctgggatccccagcaggtgattgggcttctgtcatcataaagtatgtattggacagagcaacagttctactcactgatcaccatgtggcttctaactacagcatgcggaatcgatctctatggcaggcatcattcgacgccttttttgggctgcttacacagtactgcatgagtaagtttgatcgtgtggttcatactgcccaattgcaacctgctgctgcaaccgttataaccagggaaatgccagtagagcttctgcgtgccagcctccctcataccaatgaggctcaacgcaagcaattgctcagttttgctcaacgcactgtgcctgttggtacccacagttctcatgggtcttggtagtggaagcatcgagttcttattagaactgagtactcgctaaaaatggctctttaggggacctgttatgcttcccctgaaagaagagagggttaaacttgtcactagtactatgaatatcaaaaaacaagagtaaagatggttggagcatcaaaatggtaatactcaacatcaaattttgtgtcactcaaacatgtttgcatggattacttttgtagggtagtcagatgtctgcgtcaattttgtcaatacctgtgttggttattgcaaaatggttcctgtgggtctgttgctcttaagaggaatccgcaattggtctgtagcggttacttgaagacactgtttaattgctcttcaaggtggttcttttcaaggagtagttgccttggcctcaagatgtggaagttggcatagccacaacacgtcgttaagttcttcaggaacaatgcggttgctatggaagttgtaaaatggtagtattattgttttgcgacggccttttgccttttgagaactacaactgatgttgcccatttctctatgcttgatgtgcagaaagtggataaagcttgcatgcatccttactgaattgtgacatttatttggatagataggcgctcctttctttaaagcactgattttgt

SEQ ID NO: 127665 - DNA, 1451 bp, Zea Mays
aattagataccaaacctagactatagtgacgtaagtaggtagatgatgccgctaacagtaacacagagcaaaagactccaattttcccacggctactgaatcacggatgcttaaatctccccaatccgtatctctgtttccctcacagcgcggctgcctgtaaccactccaggtctccagcgaagcaggctcaggcgcaacgcaacaacacaaggcggcggttatggcctctgctgctgcgacggctacgatggggacggggaaggtggtttgcgtcaccggcgcatcagggtacatcgcgtcctggattgtcaggctcctactcgaccgcggctacaccgtccgcgccaccgtgcgagacaccgctgacccaaagaaaacattgcacctgactgcgttggatggtgctaaggataggctgcacttatttaaagctagcctgctagaagagggttctttcgatgctgcagttcatggatgcgacactgtatttcatactgcctctcccttttatcacaatgtcaaggatgctaaggcagagttacttgacccagcagttaagggaacactcaatgttctcggttcatgcaagaaagcttctattaaaaaggtggttgtaacatcatctatggctgctgtagcctacaacaggaggccaaggactcctgaggtcacagttgacgagacatggttttctgatccacaaatttgtgaaacaaatcagcaatggtatattttgtccaagacgctggcagaggaggctgcttggaagttctcaagggataatggacttgaaatcgttactataaacccagcgatggttattggtcccctgctgcagcctacactaaataccagtgctgaagcaatcctgaagttaatcaatgggtcatcgtctacatatcccaatttttgctttggatgggttaatgtcaaggatgttgccctggcccatatccttgcatacgaggttccctcatcaaatggaaggtactgcatggtggaaagagttgttcactactcagaactggtgaacattatccgcaacatgtatcctacccttcctcttccggacaagtgtgcagatgacaagccgtttgtcccaccctaccaagtatcaaaggagaagataaaaagcataggcatcgagttgattccactggagacgagcgtcaaggagaccatcgaaagcttgaaagagaaggggttcgctagtttttgactcgagcaagctgtgaaacataagtgttactgtactacgtgatgttgcattgtatacatgcatcggacttcgcagttcccaagctattttggtagctttggtctgtaagattacctaaaataaactgagccacgttgccacgctgtagcttttggacatgttatgctttgatcggattgagacacgtgatatatgatcgttgcttacaaatgtggtacgctctatctcc

SEQ ID NO: 127666 - DNA, 1632 bp, Zea Mays
cgacgtacgggccggcaagccaaacggcccagagcacactgcacaccactacgcactacccgagcgcgccaactcaccaccaccaccaagcgcgcgcgctggaaatggcggtggcgcccttgtttgccctcctagtcctgttcctctccggtccccgccgatgcgccgccgccgccgccgccgccgccgccgcggcctcgccgtcctcaccttccccgtccccgcgacccgcaccgctggtcccggcgcttttcgtaatcggcgactcaacggccgacgtaggcaccaacaactatctgggcacgctcgcccgcgccgaccgcgagccctatggccgggacttcgacacgcaccaccccacggggcgcttctccaacggccgcatccccgtcgactacatcgctgagcgactgggcctccccttcgtgcctccctaccttgaacagagcatgcgcacgggcgccggcggcgttggcctcacaaacattgatgggatgatacaaggcgtcaactacgcgtcggcggcagccggcatcatctccagcagtggctctgagcttggaatgcatgtatcgctgacccagcaggtgcagcaggtcgaggacacatatgagcagctatcactggctcttggggaggcggcagcgggcaacctattcaggaggtccgtgttctttgtgtccatcgggagcaatgacttcatccactactaccttcgcaatgtgtctggtgtccagatgcggtacctcccttgggagttcaaccagctccttgtaagcacaatgagacaagaaatcaagaatttgtatgacatcaacgttcgcaaggtcatactgatgggcctacctcctgttggttgtgcacctcatttcctcgaggagtatggcagtcaaactggggaatgcatcgattatatcaacaatgtagtgatcgagttcaactatgccctgagacacatgtctagggagttcatcagccagcatccagattccatgatcagttattgcgacactttcgaggggtctgtggacatactaaacaatcgtgagcattatggttttgtcaccacaactgatgcttgctgtgggctgggcaagtatggaggcctgatcatgtgcgttcttccacaaatggcgtgcagcgatgcatcaagccatgtctggtgggatgaattccacccaacagatgctgtcaaccgcatcctggcagataatgtgtggtccagtcagcataccaagatgtgctatcctttggacctgcagcagatggtaaaactgaagctgtagaaaccagtctggactgacttgtttaacacgcgtttcaaagaacctacaagaggtgacaagccgaatggaaatgtatagatctgtgaattacaaatacttataaggataggcttgtcagttttagatatctcaggttacatgaaaagcatgatgttgttccttggtatgtagatgcaatgtaggggatatatatggtcaaactggaacacatgctgtcaggtttatataggtgctaatgagtgatgaataatctcggtgacagaaagctcatttgagattgtacctgaaatgttttttttcgagtacatactgacaaaactgttgtccatactttcgaatcacggat

SEQ ID NO: 127667 - DNA, 2952 bp, Zea Mays
aacggcctagccctatcctaccaaaaataatctgaacaaacttccaaatcctccttggaacagtcaacagccaaacccccaagaacacaccgtctcatcccagagtcccggcttccgatctcttcccttccccccgccgccggaaagatcccggctttttgggttccgcggcgagggataggccccaagaaggaggagggggcctcacggcggcggccttgcggtcgatgcgatcggttgacgcggcgggggcggagagctcggatcaccacaacctcaagaagccgcgcctggaacccaggaccaagatgccgctcgcggatgccgttgcggccggtgacagcggcgggggtgtggatgccgcggcggcgggcgccgacttctttggcatgacggtcgaggagatcgtgcagcacccgctgccgggatacggggcgccggcggttctcagcttcagccccgacgaccgccgggtcgcctacctatacagccccgacggcacgcttcaccgtaaggtgttcaccttcgataccgcgcggcgttgccaggagttgctcttcgggccccccgacggtggcgggctcgaggaggggaacctctccgccgaggagcgtctgcggcgcgagcgcgcacgggagcgcggcctcggggtcacccgctacgagtggcgctctcgccattctggtgaatcctcacgcgccggcattgtcgtgccgctcccatccggggtttacttccaggatttatctggctctgaaccagtgctgaaactacgaagttctcccacatctccgataattgacccatttctatctccaaatgggagcatgattgcatacgttagggatgacgaactgcatacgatggggttttccaatggagaaactaggcaattaacttacggtgcaagagaaaataggaaggtccacgggcttgctgagtatattgcacaggaagagatggaaaggaaggtgggattttggtggtctcctgacagcaagcaccttgcatttactgaagtggattcaacagagattccactgtatagaattatgcatcagggcaaaagttctgttggtccagatgctcaagaagaccatgcgtacccttttgcaggagctgctaacgttaaagtgcggcttggtgttgttcattcccatggaggggaagtaacttggatggatctcctttgtggagatccaaatggtccccatagtgatgaagaatatttagctagagtcaactggatgcataatagtgctcttgctgttcaagttctcaacaggtcacatacgaaacttaaattacttaagtttgatattagtacaggtgaaagagaagtcttactagaagagcagcatgatgtatggatcacattgcatgattgcttcactccactagacaaaggagtgaataataaacatccaggtggctttatttgggccagtgaaaaaacaggattcaggcatttatatgttcatggcaatgatggagcatgcttaggacctctcacacaaggtgattggatggttgagcacattgctggtatcaatgagagtaatggacttatatatttcactggaacattggatggaccattggagacaaatctctaccacaccaatctctttccagattggagccttcccttgcaaacccctaaaaggctgactcgtggaactggccggcattcagtaattctcgaccatcagttgctgaagtttattgatgtgtatgacacagcaaaatctccacctgtgatcttgctgtgctctttgcttgatggaagtgtaattatacccctgtttgagcagccactgactattccgccacttaaaaagttccagcagttgtctccagagatagttgaaattacagcgaaggatgggaccaatttatatggcgctctctaccttcctgacgagagaaaatatgggccacctccctacaaaacactggttaatgtttatggtggccccagtgtccagcttgttagtgattcatggatgtgtacagttgacatgagagctcaatatctacggagcaagggtatattagtttggaagatggataatcgaggatcggcaaggcgagggctgcattttgagggacaactgaagtacaacattggtcgtgttgatgctgaagatcaattagaaggggctgagtggttaataaagaagggccttgcaaaacctggccatattggtatctatggctggagctacggaggatttctctcagcaatgtgcctcgcaaggtttccagacacattctgttgtgcggtgtctggtgctccggtaacagcatgggatggttacgacaccttttacacagagaagtacttgggtctgcccgcggagcatccggatgcttacgagtacgggtcaataatgtaccacgccaagaacctgaaagggaagctgctcctcatccatgggatgattgacgagaacgtgcatttcaggcacacggcaaggctcatcaactcgctaatggcagagggcaagccctatgaaatcctccttttccctgacgagaggcacatgccacgacgccttggtgatcggatctacatggaggagaggatctttggttttttcgagaggagcctttgagagggcgtttgtataaatttgttgcccacatctgggctgtgattgggatgtttttggcatatggattcaggttttctcattcacacctgtatttatcactagcgcagttatctttgattcttttgccagtcttggatggttatcagctgtttggctgcgtttacaggtttcagaataagcaaaaacttcatatcattgtggtacctctgatgaagtttattttctccggtaaagtagggaactctatgatatctgtgctctctttaatttatatttgatatcactagcgcagttatcttaatttatatcattgtggtacctacgatgacggtgg

SEQ ID NO: 127668 - DNA, 1780 bp, Zea Mays
acacccaacccaacccaacgcacactgactgaaccagagcgcgaggacagcagctcgctcgaccatggagaaccgacaccaagtggctgcacctgcacgaggcgaggtgtgggccgagatgaagaagcaggtgcgcctcgccgcgccgctcgccgcggggttcctcctgcagaaggtgatccagacgatctccatcatgttcgtggggcggctcggcgagctgcctctcgccagcgcgtccctggccacctcgttcgccagcgtcaccggcttcagcctgctgacaggcatggcgagcagcctggacacgctgtgcgggcaggcgttcggcgcggcgcggcaccagctgctgggcgtgcacaagcagcgggcgatgctggtggtcggcgcggcgagcgtccccgtggcgctcgtgtgggcctacaccggcgacatcctggtgtggttcaggcaggaccgggagatcgcggcgggcgccggcagctacatccggtgcctgatcccggcgctgttcctgttcgggcagctgcagtgccacgtccggttcctgcagccgcagaacgtggtggtgccggtgatgctcagctccggcgccaccgtcgcgctgcacgtggccgtctgctggctgctggtgcgcaggctgggcctgggcgccgacggcgccgcgctggccaacgccgtctccaacctcgccaacctgtccgccctggcgctctacatccggctctcgccgtcctgcaaggacacctgggcggggttctcgcgcgaggcgttccgcggcattctcgtcttcttgaagctcgccgtgccttcggctgccatggtctgcatggagtggtggtccttcgagctcctggttctgctttccggccttctccctaaccccaagcttgagaccgccgtcatgtcgatctgcttcaacacttacgtcttcgcattcatgttcccaatggggctcggtgctgcagcaagcatacgcgtctccaacgagcttggtgcaggacggccacgcgaggcccgcctggcgactcgggtggtcatgctcctggccttctccctgggcgtctcggaaggccttgtcatggtgctggcgcgcagcctgctcggctacgcctacgccaacgacaagcaagtcgccttgtacacctctaggttgatgccgatcctcgccgcctccaccctgtttgactgcctccagtgcgtcctatcaggtgttgtcaggggctgtggccgacaaaagatgggcgcctttatcaacgttgcggcattctacattgtcggcatccctgtagcgtccgttttcgccttcgttcgtcacctcggtggaatgggtctttggtttgggatcttgtgcggagtagcagtgcagatgatcctgcttctttgcatcaccttgtacactaactggaacaaagaagtatcgaaggcaaatgacaggcttttcagctgttctcttcctgtcaacgacaccataacatcgggtgttagcgagcagggaaatggatgtagttttgttgggaacaaggatggtgctaatggagacattgagctgacaagtggtctcaacaaaggttgatggctacaatgctacttttctactcatctatttagcttaattgtaggctggtaaatagcatccagtggaatgtacgtactcactgcttagccttcagttgaaagcagcaaaccatggtggtcgtatggacctcttttttttttcttcccagtaggttcaacatttttctgtagtcttgctaagccatgacgataagaaaaaaat

SEQ ID NO: 127669 - DNA, 1599 bp, Zea Mays
gtataaaatagttagatgagggacgtttctgcgccattcttgcctacccttctcgctcagtgaagcacgagcgaggtcagtaatggaggcggcgctcctcgcggccgcaggcaccggtaggaaggatggtggtagtgaggagagcggtgtggtgtgcgaggtgaagaagcagttgtacctcgccgggccgctcgtggtcgggttcctcctgcagaacacggtccagatggtgtccgtcatgttcgtcggccaccttggggagctcgcgctggccagcgcctccctggccacctccttcgccggcgtcaccggcttcagcttgctggcaggcatggcgtgcagcctggacacgctgtgcgggcaggccttcggtgcgcggcagcaccacctgctgggcgtccacaagcagcgggccatgctggtgcttgctctcgtgagcgtcccggtggcgctggtgtgggcctacaccggcgacatcctggcgtggtgcgggcaggacccggagatcgcggcgggggccggcagctacatccggtgcctgatcccggccatggtcgtgtacggggcgctgcagtgccacgtccggttcctgcagacgcagaacctggtggtgcctgtgatgctgagctccggcgccaccgcgctgtgccacccggccgtctgctggctgctggtgcgcgggctcgggctgggctgcaacggcgccgcgctggccaacgccgtctcctacctcgccaacctctccttcttggccgtctatgtcagggtggctccggcctgcaaggccacctggacgggcttctcggcggaggcgttccgcggcgtccccgatttcctcaggctcgccgtgccgtcggctgtcatggtgtgcatggagtggtggtccttcgagctcctggtgctactgtccggactgctccccaaccccaagctggagacggccgtgctgtccatctgcttgaacactagctcattggcgttcatggcccctcttggacttggtgctgccataagcacgcgtgtgtcgaacgagcttggagcagggcggcctcacgcagcccgactggcggcccgggtggtggtgcttctggcgctcatcgtgggcacgtcggaagctctggtcatagtgctggtacgcgacctgtgggggtacgcgtacagcagcgaggaggaagtggccaggtacaccgccaggatgatgccggtcctcgccgtgtccgtcatgctcgacggccagcagtgcgtgctctcaggtgtagtgaggggctgtggccgccagaaggccggcgctttcatcaaccttgccgcctactacctcgccggtatccctgccgcgctcgctttcgccttcgtgcgccgtctcgcgggaatgggcctctggttcgggatcttgtgcggcctggtggtgcagatgctctcgctgctctccgttaccttatgcaccgactggaacaaggaagcactgaaggcgaagaacagagtcttcagtgtggctcttcctgcagacatggaaacatgagattctgtctgggattgccagacacctgttcatgttgctgtgaatttctccagcaggctcaaccggattgatcattagtt

SEQ ID NO: 127670 - DNA, 1714 bp, Zea Mays
tgaatgattgcttgccatgtgtgggacaaccagatcctgtgctgcgcccagctcaacaatcccaaattccattactgcccacctgcatcgtcctctctgtaggctgcggtgtttgcatcgtccaaaactccaaatacatacatacaacatgctagcctagtcctcttctagtcgcctctacccagttacttgcatcgccccgtcaagcacgccgccggcacgcggccctcggtctccccgccgcgccctctgcctccgcccgaacaaagccgtctcgccgtcgcgttgccttccttaccgtccaccgcgggcagccgtcctagtactcggttggtcctcccctgctgcccttctacggtggaggagcggagatcctgccgttttccggctgatttcttctaattgttcctatggcaaagcctctcaatggcagtggccgtagcatgccaagatcgaatgagggaatgcggctcatattttcggcagttgtaggtgtcatgctgggttacctgtttgggatctccttccctacagtcaacataaccaagcttcacttcccttcgagtatcatctcttatatcgaagataggaactctggcatcacaacccagacattgttgaaccatgcttgggcatctgcaaacaatcataaaaagaatagttctgaatctaacactgatgaaattcccgagatttatgttcctacaaacccaaaaggtgctgagagacttccaccaggcattgtagtgtctgaaacagatctttatccccgaagactatggggtgatcctagtgaggaccttactagcgagccgaggtatcttgttacttttactgttggtattgggcaaaaggcaaatattgatgcagcggtcagaaagttttcagacaaattcaccattatgttgttccattatgatggtcggactacagagtgggatgaatttgagtggtctaaaagagcaatccatgtgagtgccaggaagcagacaaaatggtggtatgcaaaacgatttttgcatcccgatgttgttgccagatatgattacattttcatctgggatgaggatctaggtgtagagcatttcaacgcagagaagtacattgagcttgttagaaagcatgggttggaaatctctcagcctggtttgcaacctgatagaggactaacatggcaaatgactaaacggcgtggtgaccaggaagttcacaaagtaactgaggagagaccaggctggtgcactgatccacatctaccaccatgtgcagcgtagggccaaatgtttgttgtgtatttagttttcattgtctaattatcattttaaaagaagggcaggcctggtcaagtggtgagagctctcacttagtcaccatgtcccaggttcgaagcagcctctccgcatttgcgccgagaaggcttgcctcgatttatcccttctgtagaccccactcatgtttgacctccaacactaggtcttccttttttttaattatcattctaaaagttcgattttgatgtgcagatttgttgagattatggcaacagtgttctccagaaatgcatggcgctgtgtatggcatatgattcaggtgaggtaacatggcatgcaagtcattagtttgtctgaagtggagtatgcttatgcacttctatatgcagaatgacttggtccatggatggggtcttgactttgctcttagaaaatgtgtggag

SEQ ID NO: 127671 - DNA, 2091 bp, Zea Mays
tgaatgattgcttgccatgtgtgggacaaccagatcctgtgctgcgcccagctcaacaatcccaaattccattactgcccacctgcatcgtcctctctgtaggctgcggtgtttgcatcgtccaaaactccaaatacatacatacaacatgctagcctagtcctcttctagtcgcctctacccagttacttgcatcgccccgtcaagcacgccgccggcacgcggccctcggtctccccgccgcgccctctgcctccgcccgaacaaagccgtctcgccgtcgcgttgccttccttaccgtccaccgcgggcagccgtcctagtactcggttggtcctcccctgctgcccttctacggtggaggagcggagatcctgccgttttccggctgatttcttctaattgcggggcaagttccgtggatagtcaatactgcttgtgctgttgagctaatattaagttcctgctgggagaacttctgcagttcctatggcaaagcctctcaatggcagtggccgtagcatgccaagatcgaatgagggaatgcggctcatattttcggcagttgtaggtgtcatgctgggttacctgtttgggatctccttccctacagtcaacataaccaagcttcacttcccttcgagtatcatctcttatatcgaagataggaactctggcatcacaacccagacattgttgaaccatgcttgggcatctgcaaacaatcataaaaagaatagttctgaatctaacactgatgaaattcccgagatttatgttcctacaaacccaaaaggtgctgagagacttccaccaggcattgtagtgtctgaaacagatctttatccccgaagactatggggtgatcctagtgaggaccttactagcgagccgaggtatcttgttacttttactgttggtattgggcaaaaggcaaatattgatgcagcggtcagaaagttttcagacaaattcaccattatgttgttccattatgatggtcggactacagagtgggatgaatttgagtggtctaaaagagcaatccatgtgagtgccaggaagcagacaaaatggtggtatgcaaaacgatttttgcatcccgatgttgttgccagatatgattacattttcatctgggatgaggatctaggtgtagagcatttcaacgcagagaagtacattgagcttgttagaaagcatgggttggaaatctctcagcctggtttgcaacctgatagaggactaacatggcaaatgactaaacggcgtggtgaccaggaagttcacaaagtaactgaggagagaccaggctggtgcactgatccacatctaccaccatgtgcagcatttgttgagattatggcaacagtgttctccagaaatgcatggcgctgtgtatggcatatgattcagaatgacttggtccatggatggggtcttgactttgctcttagaaaatgtgtggagccggctcatgagaaaattggagttgttgatgctcaatggattgttcatcaatcagttccttcacttggcaaccagggcaagtcagataatggaagaccaccatgggaaggggtaagagcacgctgcagaaaagaatgggggatatttcagacaaggctggctgatgcggagaaggcttattacttggagcgaggcatcacacccccgaactcaacatcagtttagatgaacacatgctcctcagatgccacggcaaggtttctgttgggggaacctgctgcaaactggcatgttcatcgaagctgctgcagcccagggcaaatccatatatttgtacattagaggtcccacgaatcgccatgattaatctttagtgtcgctcacctggttttaatgtcatttcttttgttagtgatactagctgcgatgtaagtaggaggatacagcagagaccgtgatgatacccatttgtgtattaatgacctgatgcaatatggatgttgataatcctttcctcagtttcagcatgtaaattgtttgttctagaccagctgtatgcaactgggtcaaatactacattgatgtaaggcccaaaatttgtataagaaaaaaataataaaa

SEQ ID NO: 127672 - DNA, 2012 bp, Zea Mays
tgaatgattgcttgccatgtgtgggacaaccagatcctgtgctgcgcccagctcaacaatcccaaattccattactgcccacctgcatcgtcctctctgtaggctgcggtgtttgcatcgtccaaaactccaaatacatacatacaacatgctagcctagtcctcttctagtcgcctctacccagttacttgcatcgccccgtcaagcacgccgccggcacgcggccctcggtctccccgccgcgccctctgcctccgcccgaacaaagccgtctcgccgtcgcgttgccttccttaccgtccaccgcgggcagccgtcctagtactcggttggtcctcccctgctgcccttctacggtggaggagcggagatcctgccgttttccggctgatttcttctaattgttcctatggcaaagcctctcaatggcagtggccgtagcatgccaagatcgaatgagggaatgcggctcatattttcggcagttgtaggtgtcatgctgggttacctgtttgggatctccttccctacagtcaacataaccaagcttcacttcccttcgagtatcatctcttatatcgaagataggaactctggcatcacaacccagacattgttgaaccatgcttgggcatctgcaaacaatcataaaaagaatagttctgaatctaacactgatgaaattcccgagatttatgttcctacaaacccaaaaggtgctgagagacttccaccaggcattgtagtgtctgaaacagatctttatccccgaagactatggggtgatcctagtgaggaccttactagcgagccgaggtatcttgttacttttactgttggtattgggcaaaaggcaaatattgatgcagcggtcagaaagttttcagacaaattcaccattatgttgttccattatgatggtcggactacagagtgggatgaatttgagtggtctaaaagagcaatccatgtgagtgccaggaagcagacaaaatggtggtatgcaaaacgatttttgcatcccgatgttgttgccagatatgattacattttcatctgggatgaggatctaggtgtagagcatttcaacgcagagaagtacattgagcttgttagaaagcatgggttggaaatctctcagcctggtttgcaacctgatagaggactaacatggcaaatgactaaacggcgtggtgaccaggaagttcacaaagtaactgaggagagaccaggctggtgcactgatccacatctaccaccatgtgcagcatttgttgagattatggcaacagtgttctccagaaatgcatggcgctgtgtatggcatatgattcagaatgacttggtccatggatggggtcttgactttgctcttagaaaatgtgtggagccggctcatgagaaaattggagttgttgatgctcaatggattgttcatcaatcagttccttcacttggcaaccagggcaagtcagataatggaagaccaccatgggaaggggtaagagcacgctgcagaaaagaatgggggatatttcagacaaggctggctgatgcggagaaggcttattacttggagcgaggcatcacacccccgaactcaacatcagtttagatgaacacatgctcctcagatgccacggcaaggtttctgttgggggaacctgctgcaaactggcatgttcatcgaagctgctgcagcccagggcaaatccatatatttgtacattagaggtcccacgaatcgccatgattaatctttagtgtcgctcacctggttttaatgtcatttcttttgttagtgatactagctgcgatgtaagtaggaggatacagcagagaccgtgatgatacccatttgtgtattaatgacctgatgcaatatggatgttgataatcctttcctcagtttcagcatgtaaattgtttgttctagaccagctgtatgcaactgggtcaaatactacattgatgtaaggcccaaaatttgtataagaaaaaaataataaaa

SEQ ID NO: 127673 - DNA, 2255 bp, Zea Mays
tgaatgattgcttgccatgtgtgggacaaccagatcctgtgctgcgcccagctcaacaatcccaaattccattactgcccacctgcatcgtcctctctgtaggctgcggtgtttgcatcgtccaaaactccaaatacatacatacaacatgctagcctagtcctcttctagtcgcctctacccagttacttgcatcgccccgtcaagcacgccgccggcacgcggccctcggtctccccgccgcgccctctgcctccgcccgaacaaagccgtctcgccgtcgcgttgccttccttaccgtccaccgcgggcagccgtcctagtactcggttggtcctcccctgctgcccttctacggtggaggagcggagatcctgccgttttccggctgatttcttctaattgcggggcaagttccgtggatagtcaatactgcttgtgctgttgagctaatattaagttcctgctgggagaacttctgcagttcctatggcaaagcctctcaatggcagtggccgtagcatgccaagatcgaatgagggaatgcggctcatattttcggcagttgtaggtgtcatgctgggttacctgtttgggatctccttccctacagtcaacataaccaagcttcacttcccttcgagtatcatctcttatatcgaagataggaactctggcatcacaacccagacattgttgaaccatgcttgggcatctgcaaacaatcataaaaagaatagttctgaatctaacactgatgaaattcccgagatttatgttcctacaaacccaaaaggtgctgagagacttccaccaggcattgtagtgtctgaaacagatctttatccccgaagactatggggtgatcctagtgaggaccttactagcgagccgaggtatcttgttacttttactgttggtattgggcaaaaggcaaatattgatgcagcggtcagaaaggtaactgacagactggcaccttacctacttaagctcagtgtatcaaacttctgaactctgggactgatgtacagtagatccacatcgtgattaaacttgtagtcactttatttgaaatgagcatgtagtcctttcttccaatttcacgtaagtttcttttatagttttcagacaaattcaccattatgttgttccattatgatggtcggactacagagtgggatgaatttgagtggtctaaaagagcaatccatgtgagtgccaggaagcagacaaaatggtggtatgcaaaacgatttttgcatcccgatgttgttgccagatatgattacattttcatctgggatgaggatctaggtgtagagcatttcaacgcagagaagtacattgagcttgttagaaagcatgggttggaaatctctcagcctggtttgcaacctgatagaggactaacatggcaaatgactaaacggcgtggtgaccaggaagttcacaaagtaactgaggagagaccaggctggtgcactgatccacatctaccaccatgtgcagcatttgttgagattatggcaacagtgttctccagaaatgcatggcgctgtgtatggcatatgattcagaatgacttggtccatggatggggtcttgactttgctcttagaaaatgtgtggagccggctcatgagaaaattggagttgttgatgctcaatggattgttcatcaatcagttccttcacttggcaaccagggcaagtcagataatggaagaccaccatgggaaggggtaagagcacgctgcagaaaagaatgggggatatttcagacaaggctggctgatgcggagaaggcttattacttggagcgaggcatcacacccccgaactcaacatcagtttagatgaacacatgctcctcagatgccacggcaaggtttctgttgggggaacctgctgcaaactggcatgttcatcgaagctgctgcagcccagggcaaatccatatatttgtacattagaggtcccacgaatcgccatgattaatctttagtgtcgctcacctggttttaatgtcatttcttttgttagtgatactagctgcgatgtaagtaggaggatacagcagagaccgtgatgatacccatttgtgtattaatgacctgatgcaatatggatgttgataatcctttcctcagtttcagcatgtaaattgtttgttctagaccagctgtatgcaactgggtcaaatactacattgatgtaaggcccaaaatttgtataagaaaaaaataataaaa

SEQ ID NO: 127674 - DNA, 600 bp, Zea Mays
atttcaaaggcatgcatttgactgttacggcacccaccctgtgtccatatggattttgcttaactgtttaaacttggatgtctaccacaggtaagagcacgctgcagaaaagaatgggggatatttcagacaaggctggctgatgcggagaaggcttattacttggagcgaggcatcacacccccgaactcaacatcagtttagatgaacacatgctcctcagatgccacggcaaggtttctgttgggggaacctgctgcaaactggcatgttcatcgaagctgctgcagcccagggcaaatccatatatttgtacattagaggtcccacgaatcgccatgattaatctttagtgtcgctcacctggttttaatgtcatttcttttgttagtgatactagctgcgatgtaagtaggaggatacagcagagaccgtgatgatacccatttgtgtattaatgacctgatgcaatatggatgttgataatcctttcctcagtttcagcatgtaaattgtttgttctagaccagctgtatgcaactgggtcaaatactacattgatgtaaggcccaaaatttgtataagaaaaaaataataaaa

SEQ ID NO: 127675 - DNA, 582 bp, Zea Mays
gccgggccatcgcacgtcgcccgtcgcgcgcgcgggcaggcaggcatgggaaagaagcacgcggcaggtggcggctggttcgccgccgtcaggaaggtgttccggccgtcgggctccggcggctcatccgcgaccaccaccacctcctcctcctcgtccaaggacaaggataaggacgccgtgcagcacgggaaacaggccaccgccgccgccgccgccgaagagccagaggtgctgctgctggagcacttcccggcgtccgagacgtcggcggaggcgagcaacgagggcggcgacgcggaggcggagctggcggcggttgcggcgacgacgaagggtcgtcgtcgtcgagacgacgaggtcggcgacgaggatggggagatggaggaggagctggccgacgacatggagcgcgcgagggcgctggcggccgcggccgaggctgccgtggccgcggccgaggcggctgccagagtggtgcggcttgcggcgctccggcgcctgtcgcgcgaggagcgcgccgccgtgcgcatccaggcctactaccgcggatacctgtttcacattggaggtggaagctag

SEQ ID NO: 127676 - DNA, 229 bp, Zea Mays
caccacaattatatattcacaaaagcatcacaattataatatcattcacaactagatcatttacagatagctagctagatcattcacaaaagctccagagatgatcagtcacaaaagcaccacagcgacatcactccggcttaaagcagttcaaaagcccacaactacatcactaatgtttcatatcactccagctattgttcaaaagcgcacaactacatcactctag

SEQ ID NO: 127677 - DNA, 879 bp, Zea Mays
aagaggcgtctacttgtgacccgacccataaacaagtttggggctggcccaaccctcagcatacaggcacgaaacctcgcgccgccaccaaatctccagcgagcgaagaggcggctccggcgagtgcgcggcaacgacgaaggcgtcggggccagtggcgagaggaagagcatgctgaagttcctgtccaaggtggtggtggagtactgccctctggacccgcggaaggcggcggcagtggagctcctcgcgcagtgcaacggccgcaaggccaaggactccaacccggcttgctcggtcgagctccgccgcctcccctccccagctccgtccacggacctcaagtcgcagccgactctcccgcctccgagggtcctcgtgacctacttcaccggagctgaagaggccatcgtctttgctgagggagctacggcgcagggcatccgggaccagatcgtcgcacggggccggctcatcgatacggagaagatgttccgcgacggcggggagaagtggcccgtcgtcatccccgaggaggagcttggcatgtcgttccctggcatcaagccaaagaaagccgaggataagccccaggccgagtgaccaagcaggagttttctactttatatatcatggttaactatggacatttgtacactcacagatgctggaagaaaattttctcttgccgctaccacttagaatgtgtgttaccagtttgaaagccatgtctggtccaatttttgttttcccgcattgacatatgcttccagttggtgctcttaactcgtacaccattttggctattgtcagcgtaatattctgtggacaaatttgactcagaataagaaacttcacaatatcgcagtcttaaattaa

SEQ ID NO: 127678 - DNA, 1250 bp, Zea Mays
caaatacattgaggatagcacgagaaaggggcgccaagcaaaccgggtcggccagcagacactgccatgaggactctactaccggtggccgccggccgcgggaccgtcgcctgcgcggccacgcccgtcccccggaggtcgctgctcctctccaccgctgccgcaggtgcggcgctgcagccggagcaggtggctggaacgaggccgttgaggctgaccaggagcgaggccagcgccgtggcaaagcccaggacctcggccgacgaggccatctcctgggcgaagaaagacaaccgccgcctcctccacgtcgtctaccgggtcggcgacctcgacaagacgatcaagttctacaccgagtgcctggggatgaagctgctcaggaagagggacattccagaggagaagtacagcaacgcgttcctcgggtacgggcccgaggaatcgcatttcgtcgtcgagctcacttacaattacggggttgacaaatatgacataggcgaagggttcggccatttcggcatcgcagtcgaggacgtggccaagacagtagagctcataagagcaaaggctggaaaggtcatcagggaggccggtcctgtcaagggcggcgagaccgtcatcgccttcgtggaggaccccgacggctacaagtttgagatcatcgagaggcctggaactccggagcccttgtgccaggtgatgctccgcgtcggcgaccttgaccgtgccataagcttctatgagaaggcctgcggcatggaactgctccggaagcgagatagccctgagtacaagtacacagtggcaatgatgggttacggccctgaagacaaggacgcggtgctggagctgacctacaactatggtgtcaccgagtatgccaaggggaatgcatatgcccagatcgccattggcaccgacgatgtctacaggaccgcggaggcggcgaagctgtccggaggccaggtggtgcgggagccggggcccttgccagggatcaacaccaagatcacagccatcctggaccctgatggctggaaattggtcttcgtcgacaacatggacttcgccaaggaactggagtagccacgccaacgacctcggacgccctgcaacaggattaactcgcactgctgttggtccgtaattaaaatgaaagctatcctagtgaaatcccaaattttcatcatgcatagaatacaagggatgagtataaaatctgatggcataccaggaattttctcatg

SEQ ID NO: 127679 - DNA, 1125 bp, Zea Mays
caaatacattgaggatagcacgagaaaggggcgccaagcaaaccgggtcggccagcagacactgccatgaggactctactaccggtggccgccggccgcgggaccgtcgcctgcgcggccacgcccgtcccccggaggtcgctgctcctctccaccgctgccgcaggtgcggcgctgcagccggagcaggtggctgggacgaggccgttgaggctgaccaggagcgtggcgagcgccgtggcaaagcccaggacctcggccgacgaggccatctcgtgggcgaagaaggacaaccgccggctcctccacgtcgtctaccgggtcggcgacctcgacaagacgatcaagttctacaccgagtgcctggggatgaagctgctcaggaagagagacataccagaggagaagtacagcaacgcgttcctcgggtacgggcccgaggaatcgcatttcgtcgtcgagctcacttacaattacggggttgacaaatatgacataggcgaagggttcggccatttcggcatcgcagtcgaggacgtggccaagacggtagagctcataagagcaaaggctggaaaggtcatcagggaagccggtcctgtcaagggcggcgagaccgtcatcgccttcgtggaggaccccgacggctacaagtttgagatcatcgagaggcctggaactccggaacccttgtgccaggtgatgctccgcgtcggcgaccttgaccgtgccataagcttctatgagaaggcctgcggcatggaactgctccggaagcgagatagccctgagtacaagtacacagtggcaatgatgggttacggccctgaagacaaggacgcggtgctggagctgacctacaactatggtgtcaccgagtatgccaaggggaatgcatatgcccagatcgccattggcaccgacgatgtctacaggaccgcggaggcggcgaagctgtccggaggccaggtggtgcgggagccggggcccttgccagggatcaacaccaagatcacagccatcctggaccctgatggctggaaattggtcttcgtcgacaacatggacttcgccaaggaactggagtagccacgccaacgacctcggacgccctgcaacaggatt

SEQ ID NO: 127680 - DNA, 1418 bp, Zea Mays
caaatacattgaggatagcacgagaaaggggcgccaagcaaaccgggtcggccagcagacaccgccatgaggactctactacctgtggccgccggtcgcgggaccgtcgcctgcgcggccacgcccgtcccccggaggtcgctgctcctctccaccgctgccgcaggtgcggcgctgcagccggagcaggtggctgggacgaggccgttgaggctgaccaggagcgtggcgagcgccgtggcaaagcccaggacctcggccgacgaggccatctcgtgggcgaagaaggacaaccgccggctcctccacgtcgtctaccgggtcggcgacctcgacaagacgatcaagttctacaccgagtgcctggggatgaagctgctcaggaagagagacataccagaggagaagtacagcaacgcgttcctcgggtacgggcccgaggaatcgcatttcgtcgtcgagctcacttacaattacggggttgacaaatatgacataggcgaagggttcggccatttcggcatcgcagtcgaggacgtggccaagacggtagagctcataagagcaaaggctggaaaggtcatcagggaagccggtcctgtcaagggcggcgagaccgtcatcgccttcgtggaggaccccgacggctacaagtttgagatcatcgagaggcctggaactccggaacccttgtgccaggtgatgctccgcgtcggcgaccttgaccgtgccataagcttctatgagaaggcctgcggcatggaactgctccggaagcgagatagccctgagtacaagtacacagtggcaatgatgggttacggccctgaagacaaggacgcggtgctggagctgacctacaactatggtgtcaccgagtatgccaaggggaatgcatatgcccagatcgccattggcaccgacgatgtctacaggaccgcggaggcggcgaagctgtccggaggccaggtggtgcgggagccggggcccttgccagggatcaacaccaagatcacagccatcctggaccctgatggctggaaattggtcttcgtcgacaacatggacttcgccaaggaactggagtagccacgccaacgacctcggacgccctgcaacaggattaactcgcactgctgttggtccgtaattaaaatgaaagctatcctagtgaaatcccaaattttcatcatgcatagaatacaggaccaccattatatttgcgaaagaccctgaatcaacgatcccagacagatgacttatgggccaattccctgtataccactggaaaatatactcatcccttgtatgccactggccccacatgtcatagacactaaaaattatacctatatgccactcagtggcatacaagggatgagtataaaatctgatggcataccaggaattttctcatg

SEQ ID NO: 127681 - DNA, 692 bp, Zea Mays
agagcattggcaacggcgagaaattgttggttcaccggttgctaatcccgcttgatgaggccacgtacaccaaccacgtggtccagtgaagacccccagaacaagccggaccccgaacggcggcgtgctttggtttcacctacggcggcgacctcttttccctccctgcaagcttcagatctccctgattatctcttctcccctcaccaaatctgtgatggcagcgaccggctcgatagctgatgatgggagggtttggtccccttttatccactagcgtgagggaatcccggctggtggttgggacggccttgcgaccaccacgcagaaatcccagggttctgttcatgcggacgcgagggggagggatgattccgaccactgggccccacgaggcagtggccaaacacgcgtgcggaagtggagtcgggccgtggaggttgaggaagcaagtgggccgcgaattgagagaaccggcccaagtcaagatctgcgtgcgaccctggccctcggcagcgcggcccctgctcctccccccatggcggtacctgtgagagaggaaggtggcgagaggaagaagaagtagtttttgaaaaaataatcccagagaatactgtaattaaccctctgtttgttgagtcttgtaaaactcgcttgctagcccctaaagtcgatagataatcgcttgtaga

SEQ ID NO: 127682 - DNA, 1619 bp, Zea Mays
atggataggggagtcgtccacaaatcatcggcggctctagtgcgcgagatgggggaggcaggccatagccatggatggtggagcatgaataatttgctgaggcccccctttgagcagcagcaccacgcttctcttttcatgccgtccacaaccaccagcagcagcaccgccgccgccgcgccctcttcttcttcgtcgtcgtcgccgcctctccaatccttctcctctctgctgctctcgaaccactacccgctgcctaccaccaccagcacgtcgccgtggcagcacgacaccagcatcacaagtagccatggccagccggattcttggagccagctcatacacagcaaggaaagccagcagatggcgtttccaactacgatttgttcggaatccggaggcggcggcagcagctacgtcgtctacggtgccgcagcggctagccatgggagcagcacaagtgatgtcgagatccagttgccatggggaagcagcagcgtactccagcagcagcagaaagcgtcctctcctaggtcttcttccagaaccacagcgacgacgacctctcccggaagcaacatgctggagttctccaacaacagtagcagttcaccacgtgagtgcatcagtacagtatctggatcagctttcaagaaggctaggacccaagaaccctccccggctcaatctactgtgaaggtgaggaaggagaagctaggggatcgaataactgctctccaccagcttgtctccccgtttggaaagactgacacagcgtctgtactccttgaagccattgggtacatcagattcctccatagtcaaattgaggctctgagctccccgtacgtgggcggcagcaatggaggtgggggcggctccaagcagaatcagcagctccacgaggctagtgcgcagagagaaagcaggcacagcatatttccagaagaccctggccagctcctgcatgacagcagcgcaataaagaaacgggccggactgcagcctgctgatgaaagctgtgatgaagagaagaagaaggatctgagaagcaggggcctgtgcctcgtcccggtgagctgcacgctggacgtgggtgtggacgtggtcgctggccccgcagactactgggcggcagctgcgccggctttcggcatggggttcggtgcgtagatgatgctggccaggacgtacgatcgatgctgtgaggaacacttgtgtgtgtctgtgtgcgccatatgcatgtatgggctgcacctgcatgcatagcatcaggagcagccatcctggtggaagctggagaatgctcaagaaggctggctcctcttgatgctatatatgcgtatggtatatggtgcacacaccgacaatgcatgcatgggcatatattatatagctacagagacgctgagagtatatgacttgcgtttctgtgtttgtgtgtacgtgatgagatcttgtctagctagctagagcgagatcaaacaatttgggtgccatggagaggggcgctatagctgcagatatttaattgttaaggctaggagtactgcgcgcggatctgtaagcaatgcaactcttttaagtcttcgtcattgaggcgtcactgtgtgctatat

SEQ ID NO: 127683 - DNA, 1706 bp, Zea Mays
atggataggggagtcgtccacaaatcatcggcggctctagtgcgcgagatgggggaggcaggccatagccatggatggtggagcatgaataatttgctgaggcccccctttgagcagcagcaccacgcttctcttttcatgccgtccacaaccaccagcagcagcaccgccgccgccgcgccctcttcttcttcgtcgtcgtcgccgcctctccaatccttctcctctctgctgctctcgaaccactacccgctgcctaccaccaccagcacgtcgccgtggcagcacgacaccagcatcacaagtagccatggccagccggattcttggagccagctcatacacaaggaaagccagcagatggcgtttccaactacgatttgttcggaatccggaggcggcggcagcagctacgtcgtctacggtgccgcagcggctagccatgggagcagcacaagtgatgtcgagatccagttgccatggggaagcagcagcgtactccagcagcagcagaaagcgtcctctcctaggtcttcttccagaaccacagcgacgacgacctctcccggaagcaacatgctggagttctccaacaacagtagcagttcaccacgtgagtgcatcagtacagtatctggatcagctttcaagaaggctaggacccaagaaccctccccggctcaatctactgtgaaggtgaggaaggagaagctaggggatcgaataactgctctccaccagcttgtctccccgtttggaaagactgacacagcgtctgtactccttgaagccattgggtacatcagattcctccatagtcaaattgaggctctgagctccccgtacgtgggcggcagcaatggaggtgggggcggctccaagcagaatcagcagctccacgaggctagtgcgcagagagaaagcaggcacagcatatttccagaagaccctggccagctcctgcatgacagcagcgcaataaagaaacgggccggactgcagcctgctgatggtgagcaggatgaagaaagctgtgatgaagagaagaagaaggatctgagaagcaggggcctgtgcctcgtcccggtgagctgcacgctggacgtgggtgtggacgtggtcgctggccccgcagactactgggcggcagctgcgccggctttcggcatggggttcggtgcgtagatgatgctggccaggacgtacgatcgatgctgtgaggaacacttgtgtgtgtctgtgtgcgccatatgcatgtatgggctgcacctgcatgcatagcatcaggagcagccatcctggtggaagctggagaatgctcaagaaggctggctcctcttgatgctatatatgcgtatggtatatggtgcacacaccgacaatgcatgcatgggcatatattatatagctacagagacgctgagagtatatgacttgcgtttctgtgtttgtgtgtacgtgatgagatcttgtctagctagctagagcgagatcaaacaatttgggtgccatggagaggggcgctatagctgcagatatttaattgttaaggctaggagtactgcgcgcggatctgtaagcaatgcaactcttttaagtcttcgtcattgaggcgtcactgtgtgctatatatatatgcatggccgaaatgtgtaataagtttgtgcgtgcatgctattttccccaaagtttgatcaatttatcgc

SEQ ID NO: 127684 - DNA, 1677 bp, Zea Mays
cgaaaccaaacaaagaaaaacccgtgggccgtggtcactccgtccgcacggcgactggactatactgctaccatgaacctcgccgtcgcagccgcactgccgtccgtgacgccacgtaccggcgtcgtgctcccacggagcagtcgccgacactgcccccgcggggtcgtcccacgcgcggcctcgagctccgtttcctcctttacctccccctcagcagcggcggcgcccatctacacgcccacgccgcaggaccggtctctccggacgccgcatagcgggtaccactttgatggcacggctcgacctttctttgaaggatggtacttcaaggtgtcgattccagagtgcaggcagagtttctgctttatgtactctgttgagaaccctctcttccgtgatggtatgagtgatttggacaagttgttatatcgcccacgctttactggtgtgggagcacaaatccttggtgcggacgataagtacatatgccagttctctgagaaatcaaacaatttttggggaagtaggcatgaactaatgctgggaaacactttcatttccaataaagagtcaaccccaccgcaaggggaggtgccccctcaggatttctctaggcgtgttttggaagggttccaagtcaccccaatatggcatcaaggtttcatacgtgatgatggaaggtcaaactacgtgccaaatgtccaaacagctcgctgggagtacagcactcgtccagtttatgggtggggtgatgtcaaatctaagcagttgtccacagctggttggcttgcagcttttcctttctttgaacctcattggcaaatttgcatggctagtggcttgtccacaggatggatagaatgggatggagaacggtttgaatttgaaaatgctccatcttactcagaaaagaactggggcggaggttttccaagaaagtggtattggatccagtgcaatgtcttcccaggagcttctggtgaagtttctttaactgctgctggtggattgaggaaaattggacttggtgatacctatgaaagtccttcactgattggaatacattatgagggacagttttttgaatttgtaccttggactggaacagtaagctgggacattggactgtggggtctttggaaaatgtctggcgagaacaaaactcatctggtagaaatagaagcaaccactgcagaatcaggaactgctctgcgcgctcctactatcgaggctggactggtaccagcgtgcaaagacacctgctatggagatctaaggctacagttgtgggaaaagaaatacgatggtagcaagggagagatgatactcgacgccacaagcaacatggcagcactagaagttggcggaggcccctggttcaatgggtggaaagggacaactgttgtgaacgaggttgtaaataacattgtgggcacgccagtcgatgtagagagcctcctcccaatcccatttcttaagcccccaggcctataggatcaccaacgaatgtcacaatgaagaagtatcacggatatcaatgttgatcatacagtaaaactgtgcccagttcaataataattcatgatttttacttgttttttactacaatccacaaactatctgccgttgcatgtgcatcgacatcattgttagctcacagttttcccttctttt

SEQ ID NO: 127685 - DNA, 1608 bp, Zea Mays
cgaaaccaaacaaagaaaaacccgtgggccgtggtcactccgtccgcacggcgactggactatactgctaccatgaacctcgccgtcgcagccgcactgccgtccgtgacgccacgtaccggcgtcgtgctcccacggagcagtcgccgacactgcccccgcggggtcgtcccacgcgcggcctcgagctccgtttcctcctttacctccccctcagcagcggcggcgcccatctacacgcccacgccgcaggaccggtctctccggacgccgcatagcgggtaccactttgatggcacggctcgacctttctttgaaggatggtacttcaaggtgtcgattccagagtgcaggcagagtttctgctttatgtactctgttgagaaccctctcttccgtgatggtatgagtgatttggacaagttgttatatcgcccacgctttactggtgtgggagcacaaatccttggtgcggacgataagtacatatgccagttctctgagaaatcaaacaatttttggggaagtaggcatgaactaatgctgggaaacactttcatttccaataaagagtcaaccccaccgcaaggggaggtgccccctcaggatttctctaggcgtgttttggaagggttccaagtcaccccaatatggcatcaaggtttcatacgtgatgatggaaggtcaaactacgtgccaaatgtccaaacagctcgctgggagtacagcactcgtccagtttatgggtggggtgatgtcaaatctaagcagttgtccacagctggatggatagaatgggatggagaacggtttgaatttgaaaatgctccatcttactcagaaaagaactggggcggaggttttccaagaaagtggtattggatccagtgcaatgtcttcccaggagcttctggtgaagtttctttaactgctgctggtggattgaggaaaattggacttggtgatacctatgaaagtccttcactgattggaatacattatgagggacagttttttgaatttgtaccttggactggaacagtaagctgggacattggactgtggggtctttggaaaatgtctggcgagaacaaaactcatctggtagaaatagaagcaaccactgcagaatcaggaactgctctgcgcgctcctactatcgaggctggactggtaccagcgtgcaaagacacctgctatggagatctaaggctacagttgtgggaaaagaaatacgatggtagcaagggagagatgatactcgacgccacaagcaacatggcagcactagaagttggcggaggcccctggttcaatgggtggaaagggacaactgttgtgaacgaggttgtaaataacattgtgggcacgccagtcgatgtagagagcctcctcccaatcccatttcttaagcccccaggcctataggatcaccaacgaatgtcacaatgaagaagtatcacggatatcaatgttgatcatacagtaaaactgtgcccagttcaataataattcatgatttttacttgttttttactacaatccacaaactatctgccgttgcatgtgcatcgacatcattgttagctcacagttttcccttctttt

SEQ ID NO: 127686 - DNA, 1560 bp, Zea Mays
cgaaaccaaacaaagaaaaacccgtgggccgtggtcactccgtccgcacggcgactggactatactgctaccatgaacctcgccgtcgcagccgcactgccgtccgtgacgccacgtaccggcgtcgtgctcccacggagcagtcgccgacactgcccccgcggggtcgtcccacgcgcggcctcgagctccgtttcctcctttacctccccctcagcagcggcggcgcccatctacacgcccacgccgcaggaccggtctctccggacgccgcatagcgggtaccactttgatggcacggctcgacctttctttgaaggatggtacttcaaggtgtcgattccagagtgcaggcagagtttctgctttatgtactctgttgagaaccctctcttccgtgatggtatgagtgatttggacaagttgttatatcgcccacgctttactggtgtgggagcacaaatccttggtgcggacgataagtacatatgccagttctctgagaaatcaaacaatttttggggaagtaggcatgaactaatgctgggaaacactttcatttccaataaagagtcaaccccaccgcaaggggaggtgccccctcaggatttctctaggcgtgttttggaagggttccaagtcaccccaatatggcatcaaggtttcatacgtgatgatggaaggtcaaactacgtgccaaatgtccaaacagctcgctgggagtacagcactcgtccagtttatgggtggggtgatgtcaaatctaagcagttgtccacagctggttggcttgcagcttttcctttctttgaacctcattggcaaatttgcatggctagtggcttgtccacaggatggatagaatgggatggagaacggtttgaatttgaaaatgctccatcttactcagaaaagaactggggcggaggttttccaagaaagtggtattggatccagtgcaatgtcttcccaggagcttctggtgaagtttctttaactgctgctggtggattgaggaaaattggacttggtgatacctatgaaagtccttcactggtagaaatagaagcaaccactgcagaatcaggaactgctctgcgcgctcctactatcgaggctggactggtaccagcgtgcaaagacacctgctatggagatctaaggctacagttgtgggaaaagaaatacgatggtagcaagggagagatgatactcgacgccacaagcaacatggcagcactagaagttggcggaggcccctggttcaatgggtggaaagggacaactgttgtgaacgaggttgtaaataacattgtgggcacgccagtcgatgtagagagcctcctcccaatcccatttcttaagcccccaggcctataggatcaccaacgaatgtcacaatgaagaagtatcacggatatcaatgttgatcatacagtaaaactgtgcccagttcaataataattcatgatttttacttgttttttactacaatccacaaactatctgccgttgcatgtgcatcgacatcattgttagctcacagttttcccttctttt

SEQ ID NO: 127687 - DNA, 1741 bp, Zea Mays
cgaaaccaaacaaagaaaaacccgtgggccgtggtcactccgtccgcacggcgactggactatactgctaccatgaacctcgccgtcgcagccgcactgccgtccgtgacgccacgtaccggcgtcgtgctcccacggagcagtcgccgacactgcccccgcggggtcgtcccacgcgcggcctcgagctccgtttcctcctttacctccccctcagcagcggcggcgcccatctacacgcccacgccgcaggaccggtctctccggacgccgcatagcgggtaccactttgatggcacggctcgacctttctttgaaggatggtacttcaaggtgtcgattccagagtgcaggcagagtttctgctttatgtactctgttgagaaccctctcttccgtgatggtatgagtgatttggacaagttgttatatcgcccacgctttactggtgtgggagcacaaatccttggtgcggacgataagtacatatgccagttctctgagaaatcaaacaatttttggggaagtaggcatgaactaatgctgggaaacactttcatttccaataaagagtcaaccccaccgcaaggggaggtgccccctcaggatttctctaggcgtgttttggaagggttccaagtcaccccaatatggcatcaaggtttcatacgtgatgatggaaggtcaaactacgtgccaaatgtccaaacagctcgctgggagtacagcactcgtccagtttatgggtggggtgatgtcaaatctaagcagttgtccacagctggttggcttgcagcttttcctttctttgaacctcattggcaaatttgcatggctagtggcttgtccacaggatggatagaatgggatggagaacggtttgaatttgaaaatgctccatcttactcagaaaagaactggggcggaggttttccaagaaagtggtattggatccagtgcaatgtcttcccaggagcttctggtgaagtttctttaactgctgctggtggattgaggaaaattggacttggtgatacctatgaaagtccttcactggaaactgccatttagtcaatatattgagtggtagtattttctactccaagtacgaacgaaatagattggaatacattatgagggacagttttttgaatttgtaccttggactggaacagtaagctgggacattggactgtggggtctttggaaaatgtctggcgagaacaaaactcatctggtagaaatagaagcaaccactgcagaatcaggaactgctctgcgcgctcctactatcgaggctggactggtaccagcgtgcaaagacacctgctatggagatctaaggctacagttgtgggaaaagaaatacgatggtagcaagggagagatgatactcgacgccacaagcaacatggcagcactagaagttggcggaggcccctggttcaatgggtggaaagggacaactgttgtgaacgaggttgtaaataacattgtgggcacgccagtcgatgtagagagcctcctcccaatcccatttcttaagcccccaggcctataggatcaccaacgaatgtcacaatgaagaagtatcacggatatcaatgttgatcatacagtaaaactgtgcccagttcaataataattcatgatttttacttgttttttactacaatccacaaactatctgccgttgcatgtgcatcgacatcattgttagctcacagttttcccttctttt

SEQ ID NO: 127688 - DNA, 1673 bp, Zea Mays
cgaaaccaaacaaagaaaaacccgtgggccgtggtcactccgtccgcacggcgactggactatactgctaccatgaacctcgccgtcgcagccgcactgccgtccgtgacgccacgtaccggcgtcgtgctcccacggagcagtcgccgacactgcccccgcggggtcgtcccacgcgcggcctcgagctccgtttcctcctttacctccccctcagcagcggcggcgcccatctacacgcccacgccgcaggaccggtctctccggacgccgcatagcgggtaccactttgatggcacggctcgacctttctttgaaggatggtacttcaaggtgtcgattccagagtgcaggcagagtttctgctttatgtactctgttgagaaccctctcttccgtgatggtatgagtgatttggacaagttgttatatcgcccacgctttactggtgtgggagcacaaatccttggtgcggacgataagtacatatgccagttctctgagaaatcaaacaatttttggggaagcatgaactaatgctgggaaacactttcatttccaataaagagtcaaccccaccgcaaggggaggtgccccctcaggatttctctaggcgtgttttggaagggttccaagtcaccccaatatggcatcaaggtttcatacgtgatgatggaaggtcaaactacgtgccaaatgtccaaacagctcgctgggagtacagcactcgtccagtttatgggtggggtgatgtcaaatctaagcagttgtccacagctggttggcttgcagcttttcctttctttgaacctcattggcaaatttgcatggctagtggcttgtccacaggatggatagaatgggatggagaacggtttgaatttgaaaatgctccatcttactcagaaaagaactggggcggaggttttccaagaaagtggtattggatccagtgcaatgtcttcccaggagcttctggtgaagtttctttaactgctgctggtggattgaggaaaattggacttggtgatacctatgaaagtccttcactgattggaatacattatgagggacagttttttgaatttgtaccttggactggaacagtaagctgggacattggactgtggggtctttggaaaatgtctggcgagaacaaaactcatctggtagaaatagaagcaaccactgcagaatcaggaactgctctgcgcgctcctactatcgaggctggactggtaccagcgtgcaaagacacctgctatggagatctaaggctacagttgtgggaaaagaaatacgatggtagcaagggagagatgatactcgacgccacaagcaacatggcagcactagaagttggcggaggcccctggttcaatgggtggaaagggacaactgttgtgaacgaggttgtaaataacattgtgggcacgccagtcgatgtagagagcctcctcccaatcccatttcttaagcccccaggcctataggatcaccaacgaatgtcacaatgaagaagtatcacggatatcaatgttgatcatacagtaaaactgtgcccagttcaataataattcatgatttttacttgttttttactacaatccacaaactatctgccgttgcatgtgcatcgacatcattgttagctcacagttttcccttctttt

SEQ ID NO: 127689 - DNA, 1622 bp, Zea Mays
cgaaaccaaacaaagaaaaacccgtgggccgtggtcactccgtccgcacggcgactggactatactgctaccatgaacctcgccgtcgcagccgcactgccgtccgtgacgccacgtaccggcgtcgtgctcccacggagcagtcgccgacactgcccccgcggggtcgtcccacgcgcggcctcgagctccgtttcctcctttacctccccctcagcagcggcggcgcccatctacacgcccacgccgcaggaccggtctctccggacgccgcatagcgggtaccactttgatggcacggctcgacctttctttgaaggatggtacttcaaggtgtcgattccagagtgcaggcagagtttctgctttatgtactctgttgagaaccctctcttccgtgatggtatgagtgatttggacaagttgttatatcgcccacgctttactggtgtgggagcacaaatccttggtgcggacgataagtacatatgccagttctctgagaaatcaaacaatttttggggaagtaggcatgaactaatgctgggaaacactttcatttccaataaagagtcaaccccaccgcaaggggaggtgccccctcaggatttctctaggcgtgttttggaagggttccaagtcaccccaatatggcatcaaggtttcatacgtgatgatggaaggtcaaactacgtgccaaatgtccaaacagctcgctgggagtacagcactcgtccagtttatgggtggggtgatgtcaaatctaagcagttgtccacagctggttggcttgcagcttttcctttctttgaacctcattggcaaatttgcatggctagtggcttgtccacaggatggatagaatgggatggagaacggtttgaatttgaaaatgctccatcttactcagaaaagaactggggcggaggttttccaagaaagtggtattggatccagtgcaatgtcttcccaggagcttctggtgaagtttctttaactgctgctggtggattgaggaaaattggacttggtgatacctatgaaagtccttcactgtaagctgggacattggactgtggggtctttggaaaatgtctggcgagaacaaaactcatctggtagaaatagaagcaaccactgcagaatcaggaactgctctgcgcgctcctactatcgaggctggactggtaccagcgtgcaaagacacctgctatggagatctaaggctacagttgtgggaaaagaaatacgatggtagcaagggagagatgatactcgacgccacaagcaacatggcagcactagaagttggcggaggcccctggttcaatgggtggaaagggacaactgttgtgaacgaggttgtaaataacattgtgggcacgccagtcgatgtagagagcctcctcccaatcccatttcttaagcccccaggcctataggatcaccaacgaatgtcacaatgaagaagtatcacggatatcaatgttgatcatacagtaaaactgtgcccagttcaataataattcatgatttttacttgttttttactacaatccacaaactatctgccgttgcatgtgcatcgacatcattgttagctcacagttttcccttctttt

SEQ ID NO: 127690 - DNA, 960 bp, Zea Mays
ttcgcgttgcatcgaatccttatcgttttctgtttttgttttgcccattttttcgctggcgatttatgccatcacatctggcgctgctgtcgtgcctgctggtactgctcctctctttcgacaagttcctcttccactacctgaagcgccgctggttctccggcggcagcggcgccaccgtcccaaggccccccgccaaatcgaggcggaacatggcggccgccaagtggagcgagacggccatgctcgttatcgacatgcagaaggacttcgtggacccggcgatgcgcagcccgatgctggtggccggtggcgaggccgtcgtccctgccgttgccggggccgtcgccgtcgcaagggagcgcggcattttcgtcgtctgggttgtcagagagcatgacccttctggaagagatgttgaacttttccgtaggcaccattattctgggggaaagggtccaacagtgaaaggtctgaaaggagcggagctggctgatgggcttgttatcaaagaaggggagtacaagttggtgaagactagatttagtgctttcttcgcaacacatcttgattctgtcctgaaaactgcaggaataaagaacttggttattgttggtaagcattgatatacatttgatgatatggaagtgattgtcatttcgctaccatgataattgaattctgtatgatatccttgttacttaataatcttattccttttccttgtgtcttccttttcaatacttcatttgtgattttaattttcttggccacatgatggaagcacccattcatatataggtgtgtcaatgggaataaacgtacaaattcttcattttttctacagtatagcaacctgtgcaccccaaaagggaaacttatttgaaacagagatgttatcatatcttttcttcttgagagaggttgtcagcagacaacacgtgagccaacatgttgagg

SEQ ID NO: 127691 - DNA, 1140 bp, Zea Mays
ttcgcgttgcatcgaatccttatcgttttctgtttttgttttgcccattttttcgctggcgatttatgccatcacatctggcgctgctgtcgtgcctgctggtactgctcctctctttcgacaagttcctcttccactacctgaagcgccgctggttctccggcggcagcggcgccaccgtcccaaggccccccgccaaatcgaggcggaacatggcggccgccaagtggagcgagacggccatgctcgttatcgacatgcagaaggacttcgtggacccggcgatgcgcagcccgatgctggtggccggtggcgaggccgtcgtccctgccgttgccggggccgtcgccgtcgcaagggagcgcggcattttcgtcgtctgggttgtcagagagcatgacccttctggaagagatgttgaacttttccgtaggcaccattattctgggggaaagggtccaacagtgaaaggtctgaaaggagcggagctggctgatgggcttgttatcaaagaaggggagtacaagttggtgaagactagatttagtgctttcttcgcaacacatcttgattctgtcctgaaaactgcaggaataaagaacttggttattgttggagttcagacaccaaattgcattcggcagactgtgttcgatgctatagcactggactatgagaaagttacggttctaattgatgcaacagctgctgcaagaccagaaatccatttgtccaatatcagggatatgaagaacatcggagtggacacgccaaccctggaagaatggcgccgctagggttactctgtctcttggcagcaccagcaaacggagatgacctgttgtatgagatgcatgcagcacctccctgcatctacttctttgcttctaatctgcgtctgactgcgcgtacgttgttgtattgttatacccagtgcggtagaacaattgcagatggtggtatatggtatatgcaaacttgtaatccctcatatgtagagttcagttcaccataccatgtgatgtgcttgctttcacgtcgcagcagatggcagtatggcactcaatccactccacatgccttgttatcttctttcttcatgagtcggcaaatgatgcctaaactgttgaaaaaataaca

SEQ ID NO: 127692 - DNA, 1137 bp, Zea Mays
ttcgcgttgcatcgaatccttatcgttttctgtttttgttttgcccattttttcgctggcgatttatgccatcacatctggcgctgctgtcgtgcctgctggtactgctcctctctttcgacaagttcctcttccactacctgaagcgccgctggttctccggcggcagcggcgccaccgtcccaaggccccccgccaaatcgaggcggaacatggcggccgccaagtggagcgagacggccatgctcgttatcgacatgcaggacttcgtggacccggcgatgcgcagcccgatgctggtggccggtggcgaggccgtcgtccctgccgttgccggggccgtcgccgtcgcaagggagcgcggcattttcgtcgtctgggttgtcagagagcatgacccttctggaagagatgttgaacttttccgtaggcaccattattctgggggaaagggtccaacagtgaaaggtctgaaaggagcggagctggctgatgggcttgttatcaaagaaggggagtacaagttggtgaagactagatttagtgctttcttcgcaacacatcttgattctgtcctgaaaactgcaggaataaagaacttggttattgttggagttcagacaccaaattgcattcggcagactgtgttcgatgctatagcactggactatgagaaagttacggttctaattgatgcaacagctgctgcaagaccagaaatccatttgtccaatatcagggatatgaagaacatcggagtggacacgccaaccctggaagaatggcgccgctagggttactctgtctcttggcagcaccagcaaacggagatgacctgttgtatgagatgcatgcagcacctccctgcatctacttctttgcttctaatctgcgtctgactgcgcgtacgttgttgtattgttatacccagtgcggtagaacaattgcagatggtggtatatggtatatgcaaacttgtaatccctcatatgtagagttcagttcaccataccatgtgatgtgcttgctttcacgtcgcagcagatggcagtatggcactcaatccactccacatgccttgttatcttctttcttcatgagtcggcaaatgatgcctaaactgttgaaaaaataaca

SEQ ID NO: 127693 - DNA, 177 bp, Zea Mays
atgaattatagccaaatgaacaggcttttggttaaactgaaagtcacgatcaaagtatcatgcatccaaactgtaatttgcatcctaaccatttgtgagcatctaccaggtccagcacatgaattctacatcatttgcctggccaccaccatttccttggagccggtggaggtgtaa

SEQ ID NO: 127694 - DNA, 228 bp, Zea Mays
atggcgccgtcagcgcgcatagaaggcagggacgagaccggcgtccaggggcggcagcgagttgtgaggaagaaactttggcggggaaaagaggccgcgtcgggtcttcacggtggtggcggctcttattttctgcgtcgtcgcacacgcacaatcactcgtggaggtggtcgtggagatggaaaagaaaggaaaggaggccctccccattccccaatacctaaatag

SEQ ID NO: 127695 - DNA, 465 bp, Zea Mays
gctcccggccactagaggtcgggcaacattccccagtttggaaggacacgagtggatccaatcgactgcactccaccgccaccatctccaccagcatcgcccacaccgctgtcatccgctccgtcgctgtgccatcgtcgtccactgtgccgccatccgctccaccgtcgtgccatcgtcgtccactgagccgccattggaagagtgctaagtggaagcaacatatgaagctcacatggagaaggaaaatggaacgacagtccacatgaagcttgtaaaaaaggagttaaactcataatactttctagtgtcaaagttcaacatgatacatggttgtgggtttttatttgtgcatctagtgcatatttctacgtgtgaattgagatgatcttatgtgatgtgatgatgactagattaactttcttggatattagatgatatttaagttaaactttgttgtatatt

SEQ ID NO: 127696 - DNA, 1644 bp, Zea Mays
gctcccggccactagaggtcgggcaacattccccagtttggaaggacacgagtggatccaatcgactgcactccaccgccaccatctccaccagcatcgcccacaccgctgtcatccgctccgtcgctgtgccatcgtcgtccactgtgccgccatccgctccaccgtcgtgccatcgtcgtccactgagccgccattggaagataatgggttcttgggaggagcatgttaggcggtttttgttggaggaggaagaagacgatgacgaactattctttgttattctccttgctataatcccatacctctcggaagagaaaaggcccatccacacaacctccctcaccggtgctaaaaaggttaaagaaattaatgaagggcatgagagctggtgcaaatctgggttcagaatggagaaggaaatattcaaagccacatcaaattttcttagaagagagaatttactatgtgacacgcgaggagttagcattgaggagcagcttgggatgttcatgtatatgatctcccacaatgctagtaaccaaatgctacaaaaggcttttcaacacagtggagatactatccatcgaaaaatatccgaggtttttgagatagttcccatactaactcaacgatttgtgaagctttctagtcagttcaaactcatgctaggattgcaacaggttctaggttcatgcccttttttcagaattgccttggtgccattgacggcacatatgtacccatcactatcgcagaagacagggcccctccatataggcccctccatatagaaatagaaaaggaactctttcacacaatgttatggtagtctacgacttcgatcttaatttcacatgtctcatgtggatgggaagggtcggcatcagatgcaggggtgcttcgatctgctattagcaaatgatttattgtgccagaaggaaagttttatttggtagatggtggctatgcaaatacaacatcatacattgcaccatacaaaggagttcggtaccatctcagtcagcttaggaggcgtcgttcatcacaaagtggttatgcaaactacaaagagttcatcatcgccatgcaattcttcgtccatgttgtattattgttttttagttttcactcatgactttggaaactttgaagctcctgacataagtgtcaaaatcattagacaaccaatttacataactgcatccttgaatagtaaagtagtttgtaggatacttggaacataaccttatgatctttgtgcatacagtgtatatttgtgcatacagtgcatggctgtgggtttttatctgtgcatccaatgcatattttctagttgtaaaatgttgatacatggctgttacttggtacttgcagagtgctaagtggaagcaacatatgaagctcacatggagaaggaaaatggaacgacagtccacatgaagcttgtaaaaaaggagttaaactcataatactttctagtgtcaaagttcaacatgatacatggttgtgggtttttatttgtgcatctagtgcatatttctacgtgtgaattgagatgatcttatgtgatgtgatgatgactagattaactttcttggatattagatgatatttaagttaaactttgttgtatattagatg

SEQ ID NO: 127697 - DNA, 771 bp, Zea Mays
aatcgactgcactccaccgccaccatctccaccagcatcgcccacaccgctgtcatccgctccgtcgctgtgccatcgtcgtccactgtgccgccatccgctccaccgtcgtgccatcgtcgtccactgagccgccattggaagataatgggttcttgggaggagcatgttaggcggtttttgttggaggaggaagaagacgatgacgaactattctttgttattctccttgctataatcccatacctctcggaagagaaaaggcccatccacacaacctccctcaccggtgctaaaaaggttaaagaaattaatgaagggcatgagagctggtgcaaatctgggttcagaatggagaaggaaatattcaaagccacatcaaattttcttagaagagagaatttactatgtgacacgcgaggagttagcattgaggagcagcttgggatgttcatgtatatgatctcccacaatgctagtaaccaaatgctacaaaaggcttttcaacacagtggagatactatccatcgaaaaatatccgaggtttttgagatagttcccatactaactcaacgatttgtgaagctttctagtcagttcaaactcatgctaggattgcaacaggttctaggttcatgcccttttttcaggtgagctacaactgcaaacacacaattatcctatgctaattgccacatctcatcaacatatttctatatttgttccttcaatgcagaattgccttggtgccattgacggcacatatgtacc

SEQ ID NO: 127698 - DNA, 2247 bp, Zea Mays
atatttcagattcaaaaaaactgcgaagggcgaccaaacctccattgtcccatcctcagcgtcttctccccgagcccagcaccaccctcctcgatcccaaagaccagaaagattttgcctttcctcttatcttctcctcaaattcaattcctcgtaatctcccttattggcatcgattccttcgatcttctccgctaccccctcccgtttcccgctgcttattgagttttggactctgcatgagtctatcaactcgcccttgttaaaggattcattgtccaattgcggtagctcgcgcggcaagattcggtttttgagtcggtgcgcgacggtagtggtccagattgctgagcccggctcgacgttctggcctgagacctaattcggtggcattgtggtgtggtgatggagcaggggaggaatcaacagcacccgcagcagttgtcgagtccgcctgttttggccgccgcgagcgagataaaggcccctgcggtgccttcgcaacagcccaagccggcggcccccgtgatgtcggtgcctagacagtggccgatagctttcaaccccctgaagtcctccactgaagaaaaaagtgttactccaaagaaaaagaagcattgtaattgtagaaactcaaaatgtttgaagatgtactgtgaatgctttcaagaacttcaatactgtgatggctgcaactgttcaaattgtggaaacattgttgggaatgagaatgccagaaacgaagcaattgaggcaattcgtcagcgtaatccgtctgcttttcagcctaaaattggaaatgactcaaatacactcaacgttcgaaaggataattctggagcagtccctctcgtagcaaagcaccataaaggttgtcattgcaagaagtcaggatgcctaaagaagtactgtgaatgctaccaagcaaatgttttttgctccaaaaattgtagatgcatgcactgtaagaactctgaaggaaataaagatacagaaacttcaattcaaagggaccatgcatctgacagaaatcatattgaacaagcagctaatatagcattcaatggtagtgttggatcatcaggatatatttgttcccttagtagaaaaagatctcatgaagacacccaatgtgttaggataaactctgaaggaagcatgccagagacacaatatcaacagggtaaccatgcagatgtttcaatgcttccaccctgttccacaggatttgatgggcacaatgctgccaatactaaaccgtataacccaaactacaggtctccactggcaaacaccatccacctcagtgaggtcaatgatctagtcaagcagttggtgatggtttgcagaatggctgcagcgacaatagctgatgatgaaacagatttgattgctgaagagaagggatcccagtcaaataatgggttaagcaatggtaactgcaaacagcaggacttcaaagaagcctcctccatggtcatccttagcgaaggatgtagtgaccaacccaacatcgatgaaacgggctcccatcggtctaaaacattggatttttctaggcctgcatctccaacaacacaagcactaatgtgtgatgaacaggatgccacatttggaaatgagcctgcatctccaacaacacaagcactgatgtgtgaagaacagaataccacatttggaaatgattatagaagttcatttcctttggtttcgtgtgatcaagatatttctgagataaatgctgcacaagaaaacctagtattgactgggttgcgagagtatctccgggtgattatcacacgtggaaaaataaatgaacacaaatcctcattagaggcagcaatggaattggatgcccaacagcatcatggagcaccacctgccctttctgcaacagaagatgaagaaaaatctcctccttcaagcactattgaaaccccaagaactaatcaacagcctacaccaaatggtggatcgaaagatagtattggaagctaaataaaactcggtacagaattcagcctcttcatttcaagacgcctgcactgcaaatgatttcggtacatagatcggcattgggcgagatagatactatagtttttgttgccatttctggcaacaggccttgtaggaaatgaactaccattcatgcattagacgtttagtagcaggaaacaaaagttgcctgctacatcgtgttgtaatttaataaatgataattttcattgttcgatgctcgagttgact

SEQ ID NO: 127699 - DNA, 2511 bp, Zea Mays
acggtccccaaggatctacgagaggaccacactattcatctgccaccaggatgggatagtgagggatgcagcgttggtgaggacatggtcatctatagggcgtagcgctggacaatgtggctgggtatggagtggctttggcagtaaaagatatctacgctgatgcctttggagaaagaaatttgggctctaaccttgtgggcctgatggtaaaggatggacgacaaggaaaggtgaatgccaaaggttactacatttatgagaagggtgcgaagccaaagccagaccctagtgttaagcatgtgatcgaggagtaccgaaagcaggcaaacacaatgcctggtggaaagcctgttactttaatggatcaagatattttggagatgattttcttcccagttgtgaatgaggcatgcagggttatggatgaaaatgttgtaattcgagcttccgatcttgatattgcttctgttcttggaatgggctttcccaaatacaggggtggtcttgtcttctgggctgacactgttggagcgccttacatacattcgaagctaagcaagtgggccgaaatgtatggtcccttcttcaaaccttcatcgtatttggaacaacgagctaaaagtggtgtaccattgagcgcaccaggaacatcacagcaaggttcggcgaggtcgcgcatgtgaggtgctgtccagcattgggaagaagaattcagaatacttgcggccgggatgagccatagacggctgcttcgcagatcaaaaacacctccttgaatacaaataggaggcacagaaatgatgaaaaataaatggttttgcatagctgtaacagttttggtgccttgaactgtaactatggcagagtttctgtgaacagagtggcatgcattaattatacttgaccactctatatgtcgctgtttgtataattttcaatacgtacaagaactaaaatatattattggatagtattttttataataaactcatctgttgctatactttatttaaatctacaaagaaaatttgactcgtacggatatcatgtcgatacctaccagggaacttaggacggcgtcgtcgtctcgaattaatcgcttgcactaagctggacggccgcccgctgtgatccagcgaacaaccaggacggccggtcatggcggcagggacgatgatgcgggtgacaatggaggtgggcacagacggggtggcgctcatcaccatgtgcaacccgccagtgaacgccctgcaccccgccatcttcgctggactctgggagaactacggcgaggccatggcccgtgacgacgtcaaggccatcgtgctcaaaggtgctcgagggaaattctgtggaggtttcgacatcaatacgttctcacaaattcatcggaccggagacatgtcgcttctgccagactctgttaagtttgcgtcttatatgatggaagagggcaaaaagccttccgttgcagccattcaaggccttgctctgggtggtggactagagttgacgatggcttgtcatgctcgaatatctacccctgaagctcaacttggattaccagagttaactcttggcataattcctggatctgggggaacccagcgtctaccgaggcttgtaggtctgcccaaagcaatacaaatgatgctgcaatcaaagttcattatgggggacgaaggaaaagaacaaggtcttattgatgccctttgctcccctgatgaattgataaagatgtcacgccattgtgccctggaaattgctaatggtggtagaccgtgggtaaaaccactcagcagaacagataagcttggctcaccatctgaagctcatgctgcattaagtatggcaagacagcaggtgaagaagattgcaagaaacatgccgcagtatcaagcctgccttgatgtaattgaagaaggtgtgctatttggaggccattcaggtgttttaaaggaatataaggttttcaaggagttagtgccatcaccaacagcaagggcacttgttcatatcttcttggcacagcgtttgagcacaaaggtgccaggtgtcactgatgttcacctaaaacctaggcaaattagaaaagttggcattattggtggtggtttgatgggctctggaattgcaactgcacttcttgttagcaacatatctgttgtgctcaaggaagtaaaccctcaggttctgcaaaggggacaaaaaacgatagcagctaatcttgaggacctggtcaaaaggggctcacttgcaaaggacaggataaataaggtcatgtcacttctgaaaggcactcttgattattcggattttaaggatgtcgatatggctattgaggccgttatagaggacattcctttgaagcaatcaacattttctgacattgagaagttctgcccaccacattgcatacttgcaacaaacacatctaccatcagtttgaatgttattggcaagaggacaaattctcaagatagaattgtaggggcacattttttcagg

SEQ ID NO: 127700 - DNA, 623 bp, Zea Mays
atgtaaagccaattactgaaaatgaaaagccaattactgaaagcggagatgaaatctcttatgaaggagcaaaggcaaaaagtccaatatctttattatcgggactacgaaggagatcaattgactgcatctaaactgtgagatgtgtgcaagattgggtttgttgtatttggagttcctcatagaaaaatcatacatatgctctagagttcctcatagatttggtgcacgtgatctgccatggatttgtttaagatttagggagatcggtcgtgttcgcgctgcgagattcgattttttatgcctgttttattcacgagattgcaagaacaggactgctaggcaagatgagtaaacctgaaatttaggtctagaaattcactgctatcagtctcaggaataggctaggttgaacttatacatgagatatcaacatgtccaggtgcattgtctgaatttgattagaagtgtgtaatgttagttcttataaaaaagcaactcaaaaagggccaaagtttggatgtaccttctgggttattgatgcagatatctttatcactatatgtgcttggtttgctcagtggcacatttaatctagagaatttcagtctccctctgtaaaa

SEQ ID NO: 127701 - DNA, 717 bp, Zea Mays
atgccggaatcaaagctaaatctttttagatctgctgggcttaagcacaccacaaccagcttagatgcggtgattagtcctccacgcgaggatcagtcaggtcggccatcgctcccgtcttcagcgccgttactgctcgggacgcctgaatgtggcggaggtcaggtccgcgctcgacactcgacgggctcacggcgcgctcgagtccggcaagctgtacgaaatggtgtacgccgggcgagcagcgggggtgcctcgtccgtgtccgacggctactcggcgtcgatgtgcctggacggcttgctggacccagccgcggtgcgcggcaagatcgtggtgtgcgaccgcggcgtgaactcgcgtgccgccaagggcgacgtgatccgccggatcggtgaggctcgcacaggcattagctgccgttgcaaatgtgtaattgttaggcatgaccccgtgctgcctgcgagaaacgcgttagacgctggagccgaagccaagccgcaccgagagcgcatagagctgccgcgcatgcccggtgcccacgggtgccagcgagatcgcgccgagcgcgctcgccagcgcgaactcgttgggcgggcacccgacgaggtgcatccggcggagcagcgagagcgcatcgcggggccggtccactgtgtgagccccgcgatggcggcggaccacgagacgacattgcggcggggcaacctcaactaa

SEQ ID NO: 127702 - DNA, 1067 bp, Zea Mays
aaaaatattatcactcgaatgctgtcccggttcatccctcggaatcagactgacaataccgtcctcaggacaaggcacctcagaagcccttctcgtccgcgccgcctccttgaccccgctggccggcgagctgctcagcgcggcttttttttgcatccacaatgccgcagcttggcacatgttcattgcctggagctgcaatctatggcacttcaactaggagatttggaggtttggagtttcagcaacataaagttaatcacatctcatttggtcggaaagcgtctgttaaagcaacattgaaaactgtgagatgcaatgccactcaaacacaaagcgtccaaaagaaatcttcaagtgcaactattcagcgtgataagaaaggaaatgtacaagggccaaaactggatgacggaagcggtgggttccctccattccgctttggcaaaggtgggggtggtggtggaggcgggggaggtggcagcaactactttggcggattccttctcttctcatgtgtgttgctcttggactacctgaaggaattcgagaagtacctgcttgctcagaggcaccgagctggagatgatggcggcaacgggctgttgcaggcatgattgctttccgctggtctcactggcactagcagctactagtttctgatctgaagtgcttccttttgaacataacatgtgtctctgggttaaaatccaactgcaattgattgttctgggaacttgctctgccattgatccgtgtggtgtcaagtactgtggaaatcgtctgctgcgtccactcgaactttctcacctcgtcttcagcaaggttcataggaagttaggaacacagtggttaaaactccaagctcttcggaggaacttttttttggtcataataaggaaaacatctcctaggatgatgggaagttcatagtcagccgcggtcctgacattttaggggcctaagacaaaatttaaaatggaggaccttattatataaatattatcaatataaacactcaaaatacatcttaaaatgtatatatcaaataacaagtaaataaaaag

SEQ ID NO: 127703 - DNA, 871 bp, Zea Mays
gtttaggactaggtgatacatccatgcatgcatgtgtttggagtttcagcaacataaagttaatcacatctcatttggtcggaaagcgtctgttaaagcaacattgaaaactgtgagatgcaatgccactcaaacacaaagcgtccaaaagaaatcttcaagtgcaactattcagcgtgataagaaaggaaatgtacaagggccaaaactggatgacggaagcggtgggttccctccattccgctttggcaaaggtgggggtggtggtggaggcgggggaggtggcagcaactactttggcggattccttctcttctcatgtgtgttgctcttggactacctgaaggaattcgagaagtacctgcttgctcagaggcaccgagctggagatgatggcggcaacgggctgttgcaggcatgattgctttccgctggtctcactggcactagcagctactagtttctgatctgaagtgcttccttttgaacataacatgtgtctctgggttaaaatccaactgcaattgattgttctgggaacttgctctgccattgatccgtgtggtgtcaagtactgtggaaatcgtctgctgcgtccactcgaactttctcacctcgtcttcagcaaggttcataggaagttaggaacacagtggttaaaactccaagctcttcggaggaacttttttttggtcataataaggaaaacatctcctaggatgatgggaagttcatagtcagccgcggtcctgacattttaggggcctaagacaaaatttaaaatggaggaccttattatataaatattatcaatataaacactcaaaatacatcttaaaatgtatatatcaaataacaagtaaataaaaag

SEQ ID NO: 127704 - DNA, 1487 bp, Zea Mays
gacaccgcccgtcaggcgtggctcgctctcaaggaccagttcctcgggaactgggatgcacgggcgctccacctcgacactcggttccacctgttctcttagggggacctctccgtgggagagtactaccaccagatgaagggcatggcggacctctccacgacctcggtgagcctgtcgccgaccgaatcctggtgttgaaccttctgtcgaccggggcccccaccagacccgcacctgccgtccctgcggcccctcgtcaggcgtctgccgccgacggaggtcgtcgctctcgcaagggtggtcgtgggggtggcggctcctctcgcgttggtccctccggccggggtggcagccaggcgtggccgtcattttacaacccctggactgagaccatcgccatgtggccaggtcaggccccgagtgcctcccgtcccccggcgcgacactcctgactgcatcaccctatgatgtgcttcccacgcttcccttcggtgtgcctgcaccgcatccggctccgccccagctcctgcacctggggacccccatgacaactttgtccccgctggctggaggctgggacaacgcctccctcaccaccgctttgagcaccatggcgatgacccctccttcctccgattgggtgatcgactctggtgcctactaccacaccactcccacttcaggaatgctctcttgctcccatccccctcattcttctcatccaacctcgatcgtcgttgaaaacggttccactctgccaatcacctcagtaggtgcctcggttctccctggaccgttctacctcaacgacgttctcgtagcccccacatcactcataatctcctttctgttcgtcagttcactactgacaactcctgttccattgagtttgacccctcaggtttctctgtgaaggatctggccaccaggactcccctcacccgttgtgacagctcggggcccctctacacgcttcggccttccaccttcggagcgtctccgcctcctgtcctagtctccaccacctcctccaccacttggcatcgtcgtctcggacatcccggacctgacgtcatgaccaagattaccagtagcctagatcttttacgtagtaggggacattttgagggcctctgtcatgcttgtcagttagaccagcatactcatctcccatttactacttctcgggctaagcaggcttttgacctagttcattgtgatctctagacctcccctgtactcagtctttctggttataaatactatttggtgattttggatgctttttcccattttatttggacttttcctcttcggttgaagtctgacacgttcaccacccttacacacttcttcgcctgagtctccacctagtttcaccgcccggtccgtgccctgcattgtgacaacggccgcgagttcgacaaccacacctacctgcaccacgcgtggccctgtcgatcctgcctgcgccacgtgcggcc

SEQ ID NO: 127705 - DNA, 417 bp, Zea Mays
atggcgagcagagcgtgccgcacagggagcaaaggcgagcgctatggctgccagtggccgagagcaaaaggaaagaaaaaaatggagcagggaggggcgctgcttggggctcggctgggggagttcggctgtgggatttttttttttgggcgccatggctgccagtggccgagagcagggagctcgccggaagaaacacagcaggggcgctgcgcagagaagggcgcaaggatttgtggccatggacagggaggtcgctcggctgcttctcatccaagcaaggcgagcaacagcagggaacagggaagtccgcgaccaccatggcggggcgctgggataaaagaagggagtaggggtcctcccgccatgggaaaaaagggtacaggggcttggaccccatggattccgggagggtag

SEQ ID NO: 127706 - DNA, 2416 bp, Zea Mays
ctccaccaccgctacctcttcttttctgcatcctccccacctcccgtcgtcactacacgacgccttgttcctacactggcatgccatggccgcgatctgctcgacgtaatgccctacagagacagcaggccctcaggaacggagggaagcagagcaggcccaggcggagcaccgcgtgtcacaaacagctcaactgtgcgaggaaacgccacagcacaggaggcacatatgccgatgtggcgggaaaggacccctggcacgccaaggacgtggaagaaaggggacagggttatgctacaagaacatgcggagggggagtcacaagaaaagagctggaggcgagggctgacacggagtttggagtcaaaagggcccatggtgaggaagagctggactagagacggaaatggaatgcgggcaaaagaatctggaaaggttggaaattcaagagatgagggtacaggaagaagaaacgcatgtaagaaaatgaagaaacccccggatggtgagtatgctggcaagctgagagttgagctggacatgtgctccaagagaggagatgtgatgggggcgatcactctgtatgattccgcagtcgaggaggggatcaagttggggcagcatcactacaatgtgctcctttatctgtgttcttcagcttctcttggttttgtgcaaccagcaaaaagtggtaatatgggtagtggtatcgccagtattggtcctgcacagaaacttgatccatcacccagcagaagcttgggaggttcagagggagacaatgcatatgcatctgaaagtcatgttcaagatcagggaaaaaacaaggccgatttgattccaggtggtttgaaggcacaaacagttagcataccagtagaagatgagcttggagactatgcacgtgcacgaggatttgagatatttgataaaatgtgctcagagaaagagagagttcaaatgagtgaggctgctctgaccgcaaaggcacgtatggcgttgtccatgggtgacagtgatatggcctttgagattgtgaaacagatgaaaggcctgggtttaaagccaaagttgcgctcatatggtcctgctttaacagcattttgcaacagtggtaatgttgaaaaagcatttgaagtagaagcccatatgttggaatctgggatcacacccgaagaagctgagttggagacacttctcagggctagtgtggttggccgacgcggagacaaggtatattatttgctgcataaatttaggactgctgtcagacaggtatcccattccacagctgaattgtttgaggcttggtttcggagcccaacagcatctaaagttggaaagagaaagtgggatgcaggtgctatagcgaaggctattgagaataatggagggggttggcatgggtttggttggttggggagagggaaatggacagtggcacactcaaatatcaacgagaatggtgtctgccttgcttgtggagaaaagctggctattatagatcttgacccaaaagaaacagaagattttgccacatttgtggcaaaattagctattaagagagagaggaaatcgaactttgagaacttccagaaatggcttgaaaagcatgggccttttgaggcagtcgtggatgctgccaatgttggcctgtttagccacaaacacctttctttgagtaaggttaattctgttgccgatgcaataaggctaaggtttacgtcaaaaaaatggcctttgatagttttacataacaagcatctcattggagagcgcatgaaaaaacttaatgatcacaagttggtacaaaagtggaagcaagaaaattcaatatatgcaacccctactggttcaaatgatgattggtactggctgtacgctgctatcagatgcaaatgcttgatcattaccaatgatgaaatgagagaccacacatttcagattttggaaaggaatttcttccccaagtggaaggaaaggcatcaggtacacttcactttggaagaccgctgcgtcacatttcaaatgccacctccatactcagttgttatacaggaatccgataaaggtcactggcatatccctgtctcggaggaaggcttgctagagaaggaccgaacctggctatgcgttacacggcagaattcacaggcacagtgactaacgaagctggagttgttcgatggcaaacattaacggtgtttttttttctgaacactcaagtcagtatcgcatccgccctctcttcgtcagtctgagaaacttcctctattaagtactcattatgatttctacatggtcttattcagttttgttactgaactgctgcatatgttgtaattctgtcttattcagttttgagctggtctacattttgtttagtaaactgatataggtaatacgattccctgct

SEQ ID NO: 127707 - DNA, 684 bp, Zea Mays
atggaaatgatgaatgattggttgtcgcggtacttcagacccagaaaagtggcaggccttttggtttatgccggtaaaatcataaagaccctcgtctggaagatgaatattaccctgctggtaaccggtacggtgcaagaagaagaatgcgacggtctgttctggcagtacattattgaacaatccggcattcgcccggaatttgtggtcagtaccgaaccaaccgactgccaggtataccgtggtcagcgcggtcgtatggaaattcgtattgatgttcagggtgttagctgccacggttctgcaccagaacgcggtgataacgccattttcaaaatgggtccgattcttggcgaattacaagaactctcccaacgtctgggttatgacgaattcctcggcaaaggcaccctcaccgtttctgaaatcttcttcacatccccaagccgttgcgctgtagcagacagctgcgcagtttcaatcgaccgtcgtctgacctggggcgaaacctgggaaggcgcgctggacgaaatccgcgccctgcctgcagtacagaaagctaacgcggttgtttctatgtacaactacgaccgtccgtcctggactggcctggtttaccccaaagaaaggctacttcccgacctggaaagtggaagaagtttttcttccataaagcactggtga

SEQ ID NO: 127708 - DNA, 1137 bp, Zea Mays
atgggccttccatatagatggacacgcagtcttgacccagcaataaagaaacaggattggtcagaacaggaggatctaaaattgattcgagctcatcaaatatatggaagtcagtggcttaaaatggtcaaacatttccctgggaggacaaatcatgcactcaaagaacactggagaaatcgtatcaaaggaaaactgaatttttatttagcctcaggattgctagaacaagttccggacctggaagaaggtggtatatcagttccagagagcagtcagtcagaaattccgaaggacagtcagggttcagctgacaggagtggaccgccaccagttttacgagcacagcccaaatctaaaccggaactcccagaaaacgctggtacatcaggagaaggaacttctgattccattcgtcttaaagggcccaacgcccatccaaccgaagtttctgaaaaggtattggctaaatcaaagcagcgtgccagagccagaaggagattggattttctgtcaaccccagtggagctcaaattgtgcactgctgcggcaagttgtcaaaggcctccccagaaaatggatcaaccgggtccagtggccgagaacatctctccgtcagatgcatgtcaagacatttcacagaatgttccaccagagcgtgcggatgccatcacaccgctggctgctagtaaccaccattcaccagcgacaccagttgatccattctctctcgaaatgcatgaggcgaacgcatcagatcttctggacatgtcctactgtgatggcttgataatcgattctcctcgtgatccacatgacggtagcctcatgtagaagaaaaagttaccaacgcaaaatgacacttttaatagcaagagacgatggactgtcttcctgaaatccagcaactccctgtataaaaatcgtgttgcatgttggatggaacttgtatcttgtcttggcaaaaataattgcattgctgttctgttaatgcccctaactggtttggagagcatttttcttttgcaggtttgaagagcattttgaggggtgttgtaggtcaaattgaacaccatactcgaatgactcgtgttgttggtaactgaatcaataaaatatatgcatgtaaaaattcat

SEQ ID NO: 127709 - DNA, 104 bp, Zea Mays
cgattttttatgtctcggttccttcttgtactggcgcatatgtgctcttccattcctttctgatcttcctagaagataacagatctaattggggatgctttcac

SEQ ID NO: 127710 - DNA, 737 bp, Zea Mays
aggccctttgaaatgccgaaagagagccgttccctgttgccgaaagcccgaaactagtcttccctcctgctggcggcgtgcggagggccggaggccgggtcgacaagaggagatgacgttggcggcggggctgggttacgccctgatcgcgctgggccccgccttctccctcttctccggcgtcgtcgtcaggaagcccttcctcgtcctcaccctcctctctaggtctaccccttgcgtcgcccgtttcgtgcttctttagccacgttttgatcagatcgtccgttgccctctaataaaagcgaacattcagttaatcgattggcgtaagaggcaggtggcgtttgtttgaggcgttccagggtgtggtttcgtgaggcaaacgcggattattggtttactcgcagttgtgctagggttcagtagtttcttccggatcgatacggatgctgctagttggattcagttcacatggcgtattggcttgttctgtgtagtttttgagttgtcaatttatctcatctgtttgcaaaatctgtaatctggtttagaatgaatgtgtggatctcagagactcagacctgtagaacttgcactgatatgctactgatactctccttaggtagttggtaaaccgaagcttgctgacaatttactctatgtctattgtcttggcaacttactctatgtagctgtgcaccaatgtattgaagttgacttttaattcagtcccacaa

SEQ ID NO: 127711 - DNA, 1127 bp, Zea Mays
aggccctttgaaatgccgaaagagagccgttccctgttgccgaaagcccgaaactagtcttccctcctgctggcggcgtgcggagggccggaggccgggtcgacaagaggagatgacgttggcggcggggctgggttacgccctgatcgcgctgggccccgccttctccctcttctccggcgtcgtcgtcaggaagcccttcctcgtcctcaccctcctctctagcaccttattttggcttataagtttgatagtcctctcgggaatatggagaggatttcttcctataaagtcaggagcttggtgggcatatgtgattctgatccttacatctgtcgcattgcaagaaggcactcgtcttgtgttttggatgctttacaagaaaatggaagagatgctagatgcttttgctgatagaatatctaagccacgtcttagattgactgacaagatgctgatttctttagctggtggtttaggccatggagtggctcatgcagtctttttctgtctcagtcttttgactccagcgtttggtcgagccacattttatactgaaaggtgctcaaagctgccatttttccttacgtcagcccttattgcacttggattcttggtcatccatacattctcaatgattattgcttttaatgcatatgacgagggaaagaaaagtgatcaagtctttgttccagtaattcatttggctgctgctgcgatgacacttgttaacctcgccccaggaggctgtctcattggtaccccgctgttgttggtcatggctgcgctgaccttgcagcactgctggcgagtggcatgccggagattaactgagcaccggcatcagcagcataacagcagctagttgtaggcttgccatcatgtaattttcccatgtatgtttgactgaatcttctgatgtactatgacagtaaaaatcaggttctgagtcgtgtcgtgtagttagacgaggggttattatagtttgactcgatgttttgcatatgcagtatgtcctccctttcctggagcacttttatatctatctatctatataaccatgattgttaaaaggtccaacttttggtctggttatagccaattttaaactattcaaccagcaagct

SEQ ID NO: 127712 - DNA, 1106 bp, Zea Mays
caagttaggcagtgaaccaaacaagcccctagtcttccctcctgctggcggcgtgcggagggccggaggccgggtcgacaagaggagatgacgttggcggcggggctgggttacgccctgatcgcgctgggccccgccttctccctcttctccggcgtcgtcgtcaggaagcccttcctcgtcctcaccctcctctctagcaccttattttggcttataagtttgatagtcctctcgggaatatggagaggatttcttcctataaagtcaggagcttggtgggcatatgtgattctgatccttacatctgtcgcattgcaagaaggcactcgtcttgtgttttggatgctttacaagtaggaaaatggaagagatgctagatgcttttgctgatagaatatctaagccacgtcttagattgactgacaagatgctgatttctttagctggtggtttaggccatggagtggctcatgcagtctttttctgtctcagtcttttgactccagcgtttggtcgagccacattttatactgaaaggtgctcaaagctgccatttttccttacgtcagcccttattgcacttggattcttggtcatccatacattctcaatgattattgcttttaatgcatatgacgagggaaagaaaagtgatcaagtctttgttccagtaattcatttggctgctgctgcgatgacacttgttaacctcgccccaggaggctgtctcattggtaccccgctgttgttggtcatggctgcgctgaccttgcagcactgctggcgagtggcatgccggagattaactgagcaccggcatcagcagcataacagcagctagttgtaggcttgccatcatgtaattttcccatgtatgtttgactgaatcttctgatgtactatgacagtaaaaatcaggttctgagtcgtgtcgtgtagttagacgaggggttattatagtttgactcgatgttttgcatatgcagtatgtcctccctttcctggagcacttttatatctatctatctatataaccatgattgttaaaaggtccaacttttggtctggttatagccaattttaaactattcaaccagcaagct

SEQ ID NO: 127713 - DNA, 1017 bp, Zea Mays
gaacagacaggggcgatcagaaaagacaagcagcgtcgtcacaacacaattcagaaatcgtcaagtcctatcgtgctcgccgaaagaccgccgcctcgaacggctcgacacgacgaccttcgctctctccgccaccgaatccaccacaaaaaccaccatatccacttgttggccggccggtcaagaagaccaaggacaagggagaaacgaggggtttagttgggcgcgcgggcgatctcttcagtaaggcgttgtgtggtggtggtgtttggacggagcggagatgtcgtcggcgatggtggagcgggcaaccagcgatatgctcatcggcccggactgggcgatgaacttggagatctgtgacatcctcaaccgcgaacccggacaagcaaaagatgtggtaaagtccctcaagaaacgcattgcacacaagaacccaaaagtccaacttcttgctctcacgttgctggagacgatgataaaaaattgtggggacgttgtgcatatggttgttgctgagagagacatacttcatgagatggtcaagatagtaaagaaaaggcatgattatcatgttaaagagaagattctcacgctgatagatacttggcaagaagtttttggtggtgcacgtgcaagatatccacaatattatgcagcatatgaggagctcttgcgtgctggagtggtatttcctcaaagattgaatggttctgtgccaatcatcactcctccacagactcagcctctccaaaactatccctcatctttacacatttcacagcaggaggaacttgaattaccagtttcagatttccctgcattaagccttacagaaattcagaacgcacgtggcatcatggatgttctttcagagatgctggatgctttagatccaggtaacagagaggtactttcctgatgcacctgtggctattgtgccatcataaaattaattatgccttataataaggaagaattgctggtaaccatcttcatcatttcatgaaattttgt

SEQ ID NO: 127714 - DNA, 2587 bp, Zea Mays
gaacagacaggggcgatcagaaaagacaagcagcgtcgtcacaacacaattcagaaatcgtcaagtcctatcgtgctcgccgaaagaccgccgcctcgaacggctcgacacgacgaccttcgctctctccgccaccgaatccaccacaaaaaccaccatatccacttgttggccggccggtcaagaagaccaaggacaagggagaaacgaggggtttagttgggcgcgcgggcgatctcttcagtaaggcgttgtgtggtggtggtgtttggacggagcggagatgtcgtcggcgatggtggagcgggcaaccagcgatatgctcatcggcccggactgggcgatgaacttggagatctgtgacatcctcaaccgcgaacccggacaagcaaaagatgtggtaaagtccctcaagaaacgcattgcacacaagaacccaaaagtccaacttcttgctctcacgttgctggagacgatgataaaaaattgtggggacgttgtgcatatggttgttgctgagagagacatacttcatgagatggtcaagatagtaaagaaaaggcatgattatcatgttaaagagaagattctcacgctgatagatacttggcaagaagtttttggtggtgcacgtgcaagatatccacaatattatgcagcatatgaggagctcttgcgtgctggagtggtatttcctcaaagattgaatggttctgtgccaatcatcactcctccacagactcagcctctccaaaactatccctcatctttacacatttcacagcaggaggaacttgaattaccagtttcagatttccctgcattaagccttacagaaattcagaacgcacgtggcatcatggatgttctttcagagatgctggatgctttagatccaggtaacagagaggggcttagacaggatgtcattgcagaccttgtggatcaatgccgttcttacaagcaaagagtagtgcagcttgtcaacagtacctcgaacgaggagttgctcaaccagggtctttctttgaatgatgatatgcagcgtgttctggcaaaacatgatgctattgatgcaggtctagcagttcgagtggagaagccgaaatctctgcagtcccaaattggaagttcttcaacaagaaagccagataccatggaagaaacaattcagaggccttcagcaagtacaactgccaccagtcagtctccctttgggattttagcacttcctgcacctccatccagtagttcaaaagcacctgcaatacctgcttctagtatcgacctacttagtggagatgattatgtcaaacccgaacctgcaaactccctagcacttgttcctgtcactgaatattcagctgcagacaagaatgtcttagcttttgctgatatgtttgaacaaaatacagccaacaatagcaaccataaccttccatattcttttctatcttcgacttcaaattctactatctctacatcacaaacatatcatgcaccggtgcgacctgtattgcctcagcattcagctgcttatccaaatggggccagatccaatgccattgtaccttatgatcagcaggcccaatcgaactctacaggttcgcggaatgggcaaacagcctatggaggaaatcaccaaaagcaagcactaaattatggcacaggtgatcaaaatggagacattccaccagcaccatggggaactaagagatccactaacccatttgacgacgatcagcttggtggaatggcagtgcaaccaaaaggcatgcaaccccaaccagtgcaacccagtcagcatgggaacaaattcatgtcagcaccaccaatgccgaggggacagccaggaagaatgcagttgcaacaggtgcctggtgctcagcttggcgctctacaaccaacacaggctacactgaacatgcagtacaggggcatgcatccatcgatgcaaatgaatcatggaatgggcatgtattcccaaccaacgttcggaggatattatggaatgaaccaaacacagctttacggcgttcatatgtctggttatggatatggtcagcaatctgggggctactatattccgaatgctgcatatgcctatactagtgcaaacgaacttgcccagaggatgaatgacctttcagttcaaaacggtgatccaaatggagccgcagcaaataagcagagcagacctgaggatgcactctttggtgatctcttgagcatcgccaagatgaagcaaaacaaacctgcagctggcaaggttggcggctaagtttgagtaaagaaggtacataattttatcttaattgccagcagcagaaacctttcctgacagcgcatataattattttgccacgttctatgcaatgccagatggcttctcgatgtaagctcatttggtagaaattcatattgggaactggagattaggatgcttgtggggagcctcatagcaaatatgtctataactctactatatatgaaattcttgagttctcagtagcaatatgtattgtcataatttccctctgcaaatattaaggcagaatcagagattcctgttctccctagccatata

SEQ ID NO: 127715 - DNA, 2166 bp, Zea Mays
gcagagcgcaaagcaaacaccatgcttagcccaaaagaaacacatcttgccgtcccggttcatcgtcatctcgtcctcttcctcttgttaggcctcgcaattgcgtctttggccaccggagacgaccagtttgtcgtcaccggcttcacccaatccagcttcaacctcgagggcgccgtcacggtcacaaatggtggcctccttgatctgtctactggcacaagctacctcaaaggccacgccctgtacccgacccctcttcattttcgcaagacgcccaacggcaaagtgcagtccttctcagcctgcttcgttttcagcatcgtcaacacgtaccctctgctcagcgacgacgggatggccttcttcatcgcgcccgccaacactagtttcgctggcgctacgccggggatgtacttcggcctcgtgaacagcaaggacgacggcaagccgagcaaccgcatcttcgccgtcgagctcgacacctaccagaacagcgagctgcacgacatgaacgacaaccatgtgggcatcgacatcaacggtgccacctccctgtcctccgcggccgccgggttctacgacgacgagagcggcggcgctttcaggaacctgacactgaacgaccacagcgagatgcagctgtgggtggactacgacgagaggagcacgcggatcaacgtgacgctggctgagctcagagcggccgccaaaccttccaggccgctgctgtctacgacctatgacctgtcggcggtgctgggagacccggcgtacgtcggcttctccgccacagctgggcccatcaacgtgcgggactacgtgctcggctggagcttcggaatcaacactccggctccacccattgatgtgtccaagctgccgaggctgccgcgtgttggccccaagcctcggtccaagctcctggagatcatcctgccggtttccactgccgtgctcattctggcagtaggcgctgcgaccgccatggttgcgttgacgagatggaggtacgctgaggtgcgagaggactgggaggccgagttcggcccgcaccgcttctcctacagggagctgtggcgcgctacaggcggattcaaaaggaagcacctgctcggagaaggagggttcgggaaggtgtacaaaggagtgctcccggtgccaggatccaacggcggtaccatcgacatcgcagtgaagagcatgtctcacgagtcgaggcaagggatgaaggagttcatctccgaggtcgtcagcatcggcaagctccggcatcgcaacctcgtgcagctgcttggctactgccggaggaaaggcgagctgttcctagtctatgactacatggcgaatggcagccttgacaagtacatccattgctgcagtggggacgacgggcaccgtagtgacccaactctgaactggtcccagaggttccaggtgatcaaaggaattgcctcagctctgctctacctccacgagaagtgggacaaggtcgtgatccaccgggacgtcaaggcaagcaacgttctcctcgaccatgagatgaacgggcggcttggtgatttcggccttgcgaggctgtatgaccatggcacggacccgcagacgacacacatggttggcaccatggggtacctggctcctgaactggtgcgcacgggcaaggcctccactgacacggacgtgttcgccttcggcatgttccttctcgaggtcacctgcggcaaaagaccactgatgatgatgatgatgcagagcaccgccgaggggcggcgagaccgtcagttttttttggtcgattgggttctcgagcactggaagaatgggtcgctcacagaagcagtggataggagggtccaatatcttgacgacggctacgatgctgacgaggcatgcaccgtgctgaagattggacttctgtgcctgcatccgtttcctagctcaagaccaagcatgcggaaaataatggagtacttcgacggtgacatgccacttcctgagctgacgcctaccaagctgaacgctaacgtgctgagagtgttgcagagcaatgctttcagcccaacggtcatgtcgtatccacagctcacgtcaagcttcggtacagtgtcggacctctctggaggacgatgaaatccatggttttagcttcttaataattatgta

SEQ ID NO: 127716 - DNA, 255 bp, Zea Mays
atggcaatctccggttgttacgcgtcggagaagaagcagtcgaacccgatgcgggagatgaaggtacagaagctcatgctcaacatctccatcggcgagagcggtgatcgcctcacccgcaccgccaagcaaccatgttgtgacattgcagcaaggtacactgtgaggtcgtttgggatccggcgcaatgagaagatcacatgctatgtgacggtgcggggtgagaaggcaatgcagttgctggagagtggctag

SEQ ID NO: 127717 - DNA, 176 bp, Zea Mays
tgcgttcttaataagttgtagagatatacttagttaggctcaatgttagcacaattagttgatgagcaagtttaaatttagagtacacttatgtatgagttatttgacaatgcttatttatgagatattgaatgttatttatctatattatattaattatagtgttattaaatata

SEQ ID NO: 127718 - DNA, 688 bp, Zea Mays
ggtgatgtgcttgtgatcgtaattgtggcgtagacatatcgtgtaaagctcgggtttaaaatatggtttagacagaggaggattaaattggtgtttcatatccgatgtatggtcgaattattattacagagaataagtcttgtgtttctaacgactagccgataggtgctgttagtattgcgtatgactgatttcatttgttggtatgaagtcgatgacctgttgcgatagccgttatattctgtgtttgttgatcggtaaatgttatagtcagatattgattagtgagattagtagtcgtgactaaatgtttatttttatttttatcttcgttagggttacccaaaataattagaaaagtagtttcgcaaaactttacgttgtatgataatgttctacttgttagtttagtgggtcttatgcataatagctgagaataataattctagaagctaatgaaatggtttctatttttagtctgagtttagacgttgtgctctagtcaagagagatagggtgcttataaatggttcgctatggtctgttgttagaattagatctgattaaataagaagcgcgaatattatagttagtcttatatcgacagctggcgttttctgtaattggttctaatgacttgttagtagtgtgtaattctcaaccgtgtaacattgtctaatattgtgct

SEQ ID NO: 127719 - DNA, 249 bp, Zea Mays
atggcgctggaggacggcttcacggcgatgtgcttggctaccggtggccgggcggacaggggcttggctaccagtgttcgggcgacgtgtcgtgcctgggatctggacctagacgccggagtgctggacctggacgccggtcgctgggcggctggcagtagcagcctgggatatgcccgggcctggtggatggctcctaccttggagtgcagtgacgcaagggcaaggagccaggtgctaaggacgtag

SEQ ID NO: 127720 - DNA, 95 bp, Zea Mays
ggatatatcgtcttcagactcatcaaacgaggacaataaattcatcacttcctagttcaaataattcaaagtgcatcacttgcatataagaatac

SEQ ID NO: 127721 - DNA, 615 bp, Zea Mays
atggccgcctccgccccggccgtgaggcctctcgcccgggccgcaatccctatcccgctctctgcgcggccgcggaccgccagggtctccttgctccccctggctcctcttgctccggcccagcgcctcgctctcgggcggaccgggcaagcgcggctgccagcgcgcagccggtcggtgcggtgcctggcggcgctgagcccagagatgcgggagacgctggacaaggtcgtggggtccagcaaggtgttgctattcatgaagggcaccaaggactttccgcagtgcggcttctcccacaccgtcgtgcagatcctgcgctcgctcgacgtgcccttcgagacgctcgacgtgctcgctaacgaggcgctccggcaggggctcaaggagtactccagctggcccaccttcccgcagctctacatcgacggcgagttcttcggcggatgtgacatcaccgtcggtaaactcctatatgttttgtcacttcattcacagatgctcgagcctgtacgctttactgagctcacgatctcgtggtattgggactggcccatttgttttgtctgtctgcatctaatcactaacacgaccacgtttggagtccctcactaa

SEQ ID NO: 127722 - DNA, 1628 bp, Zea Mays
ctagcattcttgcgttgctagtaaatcaagagctcaaggctcaccaggaaagccatgggaagcgctcccgtgaacgtctgcgtgtctcgacgcgggcagcaagcggaagggcctgccgcagtgctggccattggcacggccaatccgccgcactgcgtgcatcaggacgagttcccagactactacttccgcatgtccaggagcgagcatctcaccgacctcaaggtcaagctcaagagaatatgtgagaaatcaggaatagagaaacgcttcttccacatcaacgaggaaatactggccgcccatccggacttcaacgaccgagagaagccgtcgctccaagcccgaatcgagatgacggtaacggaagtccccaagctcgccgcgcgcgccgccgccaaggccatcgcggagtggggccgcccagccacggacatcacgcacgtcgtgttcagcacatactccggcgcgaggtccccgagcgcggacctccgcctggcgtcgcttctgggcctgcggccctccgtgtgccgtaccacgctgagcctccacggctgctcggggggcgtccgggcgctccacctggccaaagacatcgccgagaacaaccacggcgcgcgggtcctcgtggtctgcgccgaggtttccctcatctcctacagcggccccacggacggctgcgtggactctgtcctcggcctggcactgttcggcgacggcgccggcgccgtcatcctgggcgccggccccgtctccggctcggagcggccgctgttcgagaccgtgtgcgccgcgcagacgaccgtgccgatgaccgaggccgcgatcaccacgcagttcgcgccaggcggcatggagtaccgcatcggcaagcaggttccggggatcgtggagcagactatcaggcagtgcctgctcgacgtcactgggccgctcggcatcgacgtggtgacatggaacgacctcttctgggcggtgcactgtggaggccgcgccatcttggacagcgttgaggcagctctcggactgggatctcagaagctagcagccagtcgccatgtgctgagagagtacggcaatatgagttccgcagccgtcgtctttgtgctcgaggaggttcaccgccgactgacgtccaagaacgctgacggggagactgccgagtggggggtcatggtagcgttcggaccgggggtcacagttgagataatggtcctgcgtgccacgacaaacctcgaggagaagtagtgtttgatacacgtagtagtttatctgccacactattgccgctgtataaaatactcatactagtgtttaatacacatggtgtatattgtctagacgattattaaaataggacacatgtactgttgtcttattattcagacttggcatgctaataagaagctcatttcttttatgatctacgcatatagatctattgcatctagggctgggaaaaaagctcgggctcggcgagccggatcgagctcgtcgcggctcggtcaggctcgagccggctcgcgagctgccggcgagccgagccgagccagtttagcgagctcgacaaaatcccgagccgagccgagccagctcgcacaagctcgcgagccggctcgcgagccaag

SEQ ID NO: 127723 - DNA, 868 bp, Zea Mays
attccggaatgggaggaggaggagcaataatagcagcgggcccacacccatcaccctctcgcctcgtctcctccctcccgcagattcccgttgttcccttccggccctgtccttctatcgggaaccttttctcccctccatttatattccttccgccgtctgcccccacggaatcaagaaacaaacgaagccagccagccagccgggtcctcccgcgtagctagcgtaggcgtaggcgtagccgtagcagcgtgtgcgagaggggaagaaatgctggaggggagggcgcgggtggaggacacggacatgccggcgcggatgcaggacgcggcgacctccgcggcctcgcgcgcgctcgacctcttcgacgtcgccgactgccgcgccatcgccggccacatcaagacggagttcgacaagcggtacggcgtcgggtggcagtgcgtggtgggcgccaacttcgggtgcttcttcacccacagcagcggcaccttcatctacttctccatggagcgcctctccttcctcctcttcaaggccgccgtcgtcgcagccgccgccgccgctgccgtcgcctcctaatcaaccaagtctccgtccatcacaccgtgcactttgtactgctagctagtatctatatatatctatatatgccatttgtaatgtccagaagctcagaccctgtacggccagcagcccgtgtagtagtgtaaatacatcgcgccatgcttcgctcgttcctcgtcgaaccatctctgcctccgttcgttcttcgcatcgaccgactctaccagcgctcagtcgtgcaagtgccgccgacgtgccgtgcctgatttgatatctagaaatatcttgggatattgtagct

SEQ ID NO: 127724 - DNA, 1266 bp, Zea Mays
atggagagtccagaggccacaatcaccggccgacgcacgggcactgcacctccgcaatcaccacggcgacgccattgttttcttccagaggccgcatccagccccgcccgcggccgcatccagcccgcaaatctagctcgcgcaaggtactcgcgtcatcccaggcacgtccctcaggatgtggtgtgtggatccaatcctatcttccccggatctggtgtcctctcgcccgggagagggcaagtgcggtgggtgctgcgctgcccaccggcacacgacacatggagccccacagacgcagacctagtggagcagctcctggagggattcgtcgagaggacgagcggcagggagccgaccggagttggcctcgccaacgtcctccgggtccacggggacaccaacatcgctggggcaaggtggtgcgcgggtcccagctcagagtccagggtcgtcgagctggtctccttcccgatcgagttcggcaccaagaacagggacataatgcaacaatttgaagagtatggatttcagtttagtgctcctgccgaggccaccggcgtagggaaagccctgcaggcccaggggctgactcgtggtgcggatgaccttcttccgatgcagcagcatggtcgtttcaggtcagacaatttgagtgatcactacagccagatcatcctacaaatcgtggcactaacaaaatcgggatctgggttattggctattacactcggtgctgggagcagttcacttgaaataatggaggagtcacatccccaactttgtaggtatgagaatgtggccaaggcacttagcaagcatgacccaccgattgttctcgctaaggttgatgctaacgaggagaagaacatgccacttgctaccaagtacgaggtccaagggttcccaaccatcaagatcttcagggaccaggggaagaacattcaggaatataatggccctagggaggctgatggcattgtggattacttgaagaagcaggttggccctgcgtccaaggagatcaagtcaccggaagatgcggcggcccttatcgatgacaagaagatctacattgttggtatcttcgctgaattcagcggcaccgaatttacaaacttcatggaggtcgcagagaagctgaggtctgactacgacttgcttgtgtctttgaagcctgaactttttgaaggattgaggtttgacttcacaaaagggttgaatcaaaagttttctcttagccacagaaatgggcaatttcaataa

SEQ ID NO: 127725 - DNA, 1502 bp, Zea Mays
tggccatttattctggcttcacctctaacgatggcgccgacgaaagatgaggtcggcgccaccccaagcacggacgctgatcacgccagcagcagcgaggtaggagacgtggcccgtggaccagctgtggagcttcctctccaccttaccgagaagatcctttgctgcatcaacccgctcgcggcggctcgcctcgccaccgtctgcaagtcctgggcggccaccgtctccgagcagctggcacggcccgttccccacctgttcgtgtacctgccggctgacaacaagtcagatcgtcgcggccgcgtcgttcccgtcccgataggctgcggggacgacgtcggcggagcgcgcctggcgccggcggcgatcccgaaccgcgtgctcttggcagacacgaatggcctggcgtgcatcggcgccatgcccagtggtcatctggccttcgcgaattggtggagcaagcacttggtccttatcaacccgatcacgggcgcgcggcagagcgtccaagtggaggagccacgtcggagtctagttctggcagcagccgccggcggtgactccttcatctccgtgggcaccgatgagctcacactctggcggcgggctggcgacgacggcggcgaggagtggtccaggtggacggtaccggcggcggccacgcacgggatcgtcaacatcgcatgggcggccgtctgttgcggctgcttctacatgctggacgacgacgggcacgtgttcgtgatcgacgtcggtgcaccaccgccgcttcgcgtggagaagctcccggtggcgagcctgttcgacggtgaccacgccatggcggtcctcagccccgccacgaagggccacctgctcgagtccgacggggaggtcctcttcgttcggccagtgcttgcgtccaaggacgaagtcggacgtgccggcggcgcgacaacgttctgcaatcacgacgctgctgtgttccccgccatccttggcttcgaggtgtaccggctagacttgaaggacagacggtgggcaagggtgaagaagttgccaggcgaccggcgggcgctgttcgtgagccacggatcgtcgttcgccgtgcgctcctcggagacggcgggatgcaggagcaactgcatctacttcgtcggcaacaaatggtactgctccctgtgcaacagggacgccggcaagacctggggtgtgtactccatggaagaccgggaggtattgtttgagcacgctgtaaccgagccgggaccatgctcggcggcgacgtggttcttacctagtgtagtctaggagcatgtataatttcgtcagcaccccggagaatgcggaggccagcaaaggtgttgtttcttgcatagggtggagtgacgcctaaaaatatttgggccccacggccactgagaagattttgctttgctcttcaaataccgcagcgtgtccgcagtattgaatgtcggaaaaaacctaacccaagcaggggtggagagatgtatatttat

SEQ ID NO: 127726 - DNA, 1169 bp, Zea Mays
cacaagtcgccaacaagaaaggaggcagcggcaggccgctccagctgagagcctcgtcgagagcgagggaggatatctggatggcaatgggtgacgcgaagccgttggtgctaatcccgatgcccagctgcgaccgcgacctgctcgtgccgaccgccgccgtcgccacgtatgcgtccccgtccgcccgcagcgtcgctgattccgacgacgacgagagcaagccctcctctgcctccgctgccgcgcagaccggccgcgaggcgttccataaggttgtgcatagctgggcgtccaagaagttcatgaccggatgtgtcatcctcttcccaattgcagttacattctatgtgacatggtggttctttcgctttgtggatggttttttctccccaatatatgctcacttgggaatcaaaatatttgggcttggttttgtaacatcaatatctttcatttttgtggttggtgtattcatgtcatcttggttgggggcatctgtccttggtctcggggagtggttcataaaacgaatgccatttgttcgccatatttatgatgcatctaagcaaatcagtgccgccatttcacctgatcaaaacaagcatgcattcaaggaactagttatcattaggcacccaagaattggcgaatatgcatttggatttatcacttcggaagttctacttcagggttattctggtgaagaacagatgtactgtgtttatgttccgaccaaccatctatatatcggcgacatatttctggtcagctcaagcgacgtgattaggccgaacatgtccgttcgcgaaggcatcgaaattgttgtctctgtgggcacgtcgatgcctggagtattatccattctggaaacggagccaaaccagttggacaggatgagatccacccgaagctgagatggcttcacattttgtgatttcgtgttccagagcccttgtttatatggagtaagtacaagagtaggtttgtacagttttcctgggtggaacgcggaatctgtttgtggacacatctcacccgaacgctgattgcttgtatggcagtcatcagcttcttcagaaatgtaacttagcagttgaagtggagttgacccatgttacgagctgtcaagttttgccgtgcgtggaagaattttcttaacccgttgg

SEQ ID NO: 127727 - DNA, 100 bp, Zea Mays
gaatttaggaaacatgtatgctattatattttatatgttcatcacacaaatcgtgttccaaacaaatatatgttggaatccaaagtcaaagattgatatc

SEQ ID NO: 127728 - DNA, 197 bp, Zea Mays
tttattagcagttactaaatgtaagtatataccaaaccagagtaataatagatcaaatttaataataaaaccacaatacgatgcaaatgaaaattgagtttaattccataaattaatcatgcgagagtcctgagctgctcatgaccgcgagcatggctagtataccagttttacactccgtagaggttgtaccctat

SEQ ID NO: 127729 - DNA, 1245 bp, Zea Mays
cctacatcgcttgcttttctcaagtcacagggccggcccagcccaaaatccttttcaccgctacgacctccgtgctccggcgatgcagcggatttcgctacgacttctgcgctcctcctacaccgccgcctccgcctccctctccaccacctcctcctccctccgcggcctggcagtatcccatggcggttggaccacccgaccgtcgctgcagcctccggtgcgaaccgcggcgccggtcgacctcaccaggtggccgccgcggaggggttactcccagttcgcgagcgggttcaccccgctgaagccgaagccgctgggatccatcctcgacatcgaacgcgccaagggcctctcccccgaccacctcgtcgccgcatgggatgactatcatttaggaaggggtcatataggtgcatctatgaaagcaaaactttaccatctcttggaacaaagatcagcttcatgccgtcactttgttattccgttgtggaagggaagtggatacactactatgttcatgcaagtccagatgccatacatggtattcacaggacttgaagactataaagcacgaggcactcaagcaagtccttactacacagtcactcattacacagagtttgctgagaccaaggacactgtgcttattcgaggagatgttgtttttaccagcaaactaaccgattcagaggcaaagactcttctagagactgctcactcgttctacctgaatgatgtgagatacagactcgtggagcgcttcaacaaagagactcatgattttgagttcggggacgtccttaaagtgcttgacatgccaaccatgtgacccagtttaattcccaaccaatagcaaatattcctagagaacattgattttctgtcacctcaaatcctcaatttagcacgggagattgctttcttgcatcatcagaggcagtaagatggagccactggatatcgtcctgccttcgctcattgagcattccgtgtggattttgttgcactgattacaccatagacaattttgctgtttttttaagcagttgatgattttcagggatgtgagacataagttatattttttgctatatcattgtacccattaggtccataatgacattttgtaccatcttgatgtatttcccctgaatatttttgtggaaaccataaaccaatttgtttgtagacttgtggctaaccgatggcagatcaaacaaaaggtcatcgtgggctagtgct

SEQ ID NO: 127730 - DNA, 2363 bp, Zea Mays
acatcgcttgcttttctcaagtcacagggccggcccagcccaaaatccttttcaccgctacgacctccgtgctccggcgatgcagcggatttcgctacgacttctgcgctcctcctacaccgccgcctccgcctccctctccaccacctcctcctccctccgcggcctggcagtatcccatggcggttggaccacccgaccgtcgctgcagcctccggtgcgaaccgcggcgccggtcgacctcaccaggtggccgccgcggaggggttactcccagttcgcgagcgggttcaccccgctgaagccgaagccgctgggatccatcctcgacatcgaacgcgccaagggcctctcccccgaccacctcgtcgccgcatgggatgacgtcagtccccgccccctcattagtcatttcattcggtttttttgtggtttgtgtgttataagaattgaggagatcccctctgacggccgtcgtaggtaagcatcaaaatgtgatattctgtcgtgcgtgtttgatacttattttaagcaccgtgcctgtaacgaattttctgtgtgcgcgactgcgggtatctgaatgatctgttgaagggaagagatgaaaggatataaacgtccattctaatcgcagaccttttcaattgcaaatgaaggtgtttgataaagtggaagtttagacttcaattattacattgctaatggaagaacatgccggcgaagcatgcaagtagatttattcccttaccacgtttgaagaggaaaaaaaagaaatagtggtgatattttgaagctgtggtaaaattggccgtttcgaaaagttatgttgaacttaacttataattaggataaagtgtgctatagaatctcaacggttgtgatgtgatctccacagcatcattctagctacgtatttggttttcagttccaacttccaaggatatctgtatttgacagcattgtgcaactgtcatgtcactctagtgacatctctgattttgcttgtttggactaagtaatgaagggatttggaaagtggctagtattcattggaaagttaaacagcattagcacaatacttttagaaacattgcattttgttatggcttcaattatacattgcattagagaaactttatttgttgaagattgaactggcattgtagttatactcagcaaaattctcacaggtgattcttagtaaccatctttttgtgctgttagatgcatacatgattttcatgtgtccgtacttgtgtgtgcgtgttgggggatattctctgatctttttgaacttctatattcataaggatgacattttagtttccattccaactctattatttgtcctgtctaaccccaaaagaaagatcaagaacaataattttcagtttaatatgaaattgataatgtttattattatttttcgttcttctgcatcagtcatgcaaatttttatacttgtcctgatgttttatgttcgtgacttttttttttgaatattagtatcatttaggaaggggtcatataggtgcatctatgaaagcaaaactttaccatctcttggaacaaagatcagcttcatgccgtcactttgttattccgttgtggaagggaagtggatacactactatgttcatgcaagtccagatgccatacatggtattcacaggacttgaagactataaagcacgaggcactcaagcaagtccttactacacagtcactcattacacagagtttgctgagaccaaggacactgtgcttattcgaggagatgttgtttttaccagcaaactaaccgattcagaggcaaagactcttctagagactgctcactcgttctacctgaatgatgtgagatacagactcgtggagcgcttcaacaaagagactcatgattttgagttcggggacgtccttaaagtgcttgacatgccaaccatgtgacccagtttaattcccaaccaatagcaaatattcctagagaacattgattttctgtcacctcaaatcctcaatttagcacgggagattgctttcttgcatcatcagaggcagtaagatggagccactggatatcgtcctgccttcgctcattgagcattccgtgtggattttgttgcactgattacaccatagacaattttgctgtttttttaagcagttgatgattttcagggatgtgagacataagttatattttttgctatatcattgtacccattaggtccataatgacattttgtaccatcttgatgtatttcccctgaatatttttgtggaaaccataaaccaatttgtttgtagacttgtggctaaccgatggcagatcaaacaaaaggtcatcgtgggctagtgct

SEQ ID NO: 127731 - DNA, 1237 bp, Zea Mays
acatcgcttgcttttctcaagtcacagggccggcccagcccaaaatccttttcaccgctacgacctccgtgctccggcgatgcagcggatttcgctacgacttctgcgctcctcctacaccgccgcctccgcctccctctccaccacctcctcctccctccgcggcctggcagtatcccatggcggttggaccacccgaccgtcgctgcagcctccggtgcgaaccgcggcgccggtcgacctcaccaggtggccgccgcggaggggttactcccagttcgcgagcgggttcaccccgctgaagccgaagccgctgggatccatcctcgacatcgaacgcgccaagggcctctcccccgaccacctcgtcgccgcatgggatgactatcatttaggaaggggtcatataggtgcatctatgaaagcaaaactttaccatctcttggaacaaagatcagcttcatgccgtcactttgttattccgttgtggaagggaagtggatacactactatgttcatgcaagatgccatacatggtattcacaggacttgaagactataaagcacgaggcactcaagcaagtccttactacacagtcactcattacacagagtttgctgagaccaaggacactgtgcttattcgaggagatgttgtttttaccagcaaactaaccgattcagaggcaaagactcttctagagactgctcactcgttctacctgaatgatgtgagatacagactcgtggagcgcttcaacaaagagactcatgattttgagttcggggacgtccttaaagtgcttgacatgccaaccatgtgacccagtttaattcccaaccaatagcaaatattcctagagaacattgattttctgtcacctcaaatcctcaatttagcacgggagattgctttcttgcatcatcagaggcagtaagatggagccactggatatcgtcctgccttcgctcattgagcattccgtgtggattttgttgcactgattacaccatagacaattttgctgtttttttaagcagttgatgattttcagggatgtgagacataagttatattttttgctatatcattgtacccattaggtccataatgacattttgtaccatcttgatgtatttcccctgaatatttttgtggaaaccataaaccaatttgtttgtagacttgtggctaaccgatggcagatcaaacaaaaggtcatcgtgggctagtgct

SEQ ID NO: 127732 - DNA, 156 bp, Zea Mays
tacacaacattctcatcacaagtcatacataattccagcacactagttcttccacaacagaggttcaaacatacaaaggttccaccacaaaggtttgaagcattcaaacagattgcacgtagttctgacaaagttctaaccacagatatgttctag

SEQ ID NO: 127733 - DNA, 1719 bp, Zea Mays
gtgccagggccaagggcgaacgcggcggaatgcgcagcgcgcagcctccagaggctataaaaacctgcctcgtcctagctagctagtcacacgtctcattcaagcgctctgccggccagcctagtgctctcggctttctttcatctccctccttttgccacttgctgtagctttaatttgcctggcactttgcacgttgtggccggccggggcctgtgcttccattggtcggcagcaagcaagcaaggctagctagcgtccgtggatcagtcatgggcagccagaggcagaggcaccgagcggtcactggcctcccggcggcgggcgcgcggatgctggccctgctgtgcgcgtcgtcgtgggtgctggtgctcacgacggcgcagaactacagcgccatcttcaacttcggcgactcgatcaccgacaccggcaacctgtgcaccagcggcaggccgtcgcagatcaccttcacgcagcccccctacggcgagacctacttcggcacgccgacgtgccgctgctccgacggccgcgtcgtcgtcgacttcctgagcacccagttcgggctgccgttcctgccgccgtccaagtcgagcagcgcggacttcaggcagggcgccaacatggcgatcacgggcgccacggccatggacgcccccttcttccgctcgctcgggctctccgacaagatctggaacaacgggcccatcagctttcagctgcagtggttccagcagatcgccacctccgtctgcggacagagctgcaagagctacctgggcaactccctgttcgtgttcggcgagttcggcggcaacgactacaacgccatgatcttcggcggctactccatcgagcaggccaggaaatacgtccccaagatcgtcaacaccatctcgaggggcatcgataaactgatcgccatgggcgcgaccgacatcgtcgtccccggggtgcttcccatcgggtgcttccccatctatctgaccatctaccagagctccaacggcagcgactacgacagtctcggctgcctcaacagcttcaacgacctgtccacgtaccacaactccctgctccagaagagggtggacatcatccagagccggcacaggaagacggcgcgcatcatgtacgccgacttctactccgccgtctacgacatggtccgcaacccacagagctacgggttcagctcggtgttcgagacgtgctgcggatcaggcggcggcaagtacaactaccagaacagcgcgcggtgcggcatggcgggcgccgccgcgtgctctagcccggcgtcgcacctcagctgggacggcatccacctcacggaggccgcgtacaagcacatcaccgacgcctggctcagggggccgtactgccgcccgcccatcctgcacaactaatccacagtgcatatggacatgctggaccggcggccggcagcgcgttgtcttttttataaataatttatttattattcgtacaagctttggttggatccatcggggcgccgggggttattaattatagcattggttggtcctttcgttatatttgaccatatattttttttgtttggggtaaggtgtttattatattttgcgttgctaaagaaaaagagctgacgatggcaaagtgtacgtggaatacgatgataatgccatgattatttatagtccttagcaatgatctaaatgacgagttatgatattt

SEQ ID NO: 127734 - DNA, 756 bp, Zea Mays
acccaagtttgacggcgagcaggaagacatatcaaaacctcggacgtgatggcgattaaggctgagcgatccgagagggcgcgctggcgagcaggaactgagcgcgcaggggaaaaacgacggcgagcagagagcttcacgcgcgcaggaagctgggagcttgggcaggaccgagcagagggcacatctacacgcgcaagcagggagagaggcaccgcggcaagcgtaggggagcagcgcgatcggccgagctggagctcgcggccagtcatggaagcaggggcaggggcgcgcgtggcaacagagcggagcgtgcgtgggagctggagcaataggagatggacgcgcagggcgagctcggctgcgtgcggcatgggcgagcgtgccagagacagagagctccgaccggcgagcacgcgcaggaagcaagcgcgcaggggcgagctcggagaggaggagcgccgcgcaggaggaacagaggtcgagctcggcgcgcagagcaccatggctggggaggacggagctcaagcacagggaggaagtggaacggcgttagggaggaggccgtgctggaggagcaagccgcggtccgaacgccggcgagcatgaaaccgcgcccatggatcgagctcagggcagaagggccaggggcgcggcgcaggaagaagcgccagggagcagcgcgccatggcaggggaactcgggggaagggaagccgcgagggagagagagagacagggcgccaggcagagaagc

SEQ ID NO: 127735 - DNA, 797 bp, Zea Mays
acccaagtttgacggcgagcaggaagacatatcaaaacctcggacgtgatggcgattaaggctgagcgatccgagagggcgcgctggcgagcaggaactgagcgcgcaggggaaaaacgacggcgagcagagagcttcacgcgcgcaggaagctgggagcttgggcaggaccgagcagagggcacatctacacgcgcaagcagggagagaggcaccgcggcaagcgtaggggagcagcgcgatcggccgagctggagctcgcggccagtcatggaagcaggggcaggggcgcgcgtggcaacagagcggagcgtgcgtgggagctggagcaataggagatggacgcgcagggcgagctcggctgcgtgcggcatgggcgagcgtgccagagacagagagctccgaccggcgagcacgcgcaggaagcaagcgcgcaggggcgagctcggagaggaggagcgccgcgcaggaggaacagaggtcgagctcggcgcgcagagcaccatggctggggaggacggagctcaagcacagggaggaagtggaacggcgttagggaggaggccgtgctggaggagcaagccgcggtccgaacgccggcgagcatgaaaccgcgcccatggatcgagctcagggcagaagggccaggggcgcggcgcaggaagaagcgccagggagcagcgcgccatggcaggggaactcgggggaagggaagccgcgagggagagagagagacagggcgccaggcagagaagcagaggtgcggctgagcgcgggagatgggacgcgcgctggag

SEQ ID NO: 127736 - DNA, 107 bp, Zea Mays
agggatccgggattatgggccacaacacgccaccactggttatactagcaccaggaggagcttatgcaggggagggagctactccaggagataatccaaatccgtta

SEQ ID NO: 127737 - DNA, 102 bp, Zea Mays
gtttcaaatatacactcattcagaaaggtcagtttatcaaaatgtttgataacatggattcaagtgaagttccgatattttatctccaaaccatgtggcctt

SEQ ID NO: 127738 - DNA, 2467 bp, Zea Mays
cggagccgttcaggcggccacccgcaggccgcaacgcagcacaacggctttctctccctgcttccctctccctgcttccctcctgctacaaataaaaattcgtggggcggccaaaccctaaaacgccccacagcgcaagcgagcagatcctcctccctttctgcttcctggcatcctctctgcctccccgcgccgatctcgagcacctggggagaccgcgagacgtgcgcctgatttttctcatcgcagcagccctcaagttccccacctcttttttcttgcagctttcaattaatctggttatttagctacatctttattttactttcattttacctttaatctgtttagttccattgcatcttctgcggttgcggttagtattgctgtttcttgctccttgtttcttgttcttttgcttctaaccatggacgcaggaacctactccatctcatcagagaagagccacacggcggcagcggcgcggccccctcttcaggaggccggcactcggccctacatgccgtcgctgagcacaggatcgcgcaacccgtcggccaagtgctacggcgataggttcatcccggacaggtcggcgatggatatggacatggcgcactacctgctcacggagcccaggagggacaaggagaacgcggtggcagcgtccccatccaaggaggcgtaccggaggctgctcgccgagaagttgctcaacaaccggacacgcatccttgccttcaggaacaagccgcctgtgtctgagaacgtctcggcagccatcacagcttcctctcaccatgccaagctggtcaagcagcgtcgacatattccccagtctgcagagaggactctggacgcaccagagcttgttgacgactactacctcaacctgcttgactgggggagcaacaacgtgctatccattgctctgggcgacacggtatacctgtgggatgcctccagtggatccacgtctgagcttgtgaccattcacgaggacagtggtcccatcaccagcgtcaactgggctccagatggccaccatatcgctattgggctcaactcatccgatatccagctctgggacaccagctccaaccgactgttgagaactctcagaggtgtgcatgaggaaagagttggctcactggcatggaacaacaacatcctcaccactggcagtatggatggcaagatcgtgaacaacgacgtgagaattaggaaccatgttgtacagacatacgaggggcacagccaggaggtgtgtgggctcaagtggtctggatcagggcagcagctggctagtgggggtaatgacaaccttctgcacatttgggatgtgtcgatggcatcccccatgtcaaccgctggccgcaaccagtggctgcacaggctcgaggaccacatgtccgctgtgaaggcactcgcgtggtgtcctttccagagcaacttgctggcaactggtggtggcggcagtgatagatgcatcaagttctggaacacacacactggagcatgtctgaactctgttaacactggatcacaggtctgtgcccttctatggaacaaaaatgagagagagctgctgagctcacacggattcacacagaaccaactaaccttgtggaagtacccatcaatggtaaagatggctgaactcagtggccatacctctcgtgtccttttcatggctcagagccctgatggttgcacagtagcatcagccgctgcggatgagacccttcggttctggaacgtatttggagaccctgaagtggccaagcctgcagccaaggcttcccacactgggatgttcaacagcttcaaccatattcgataggaacaagtcatgagaacgatcccttctgttggaaatggccgtgcatcatatgtgaggtcgattcctattggtatgttttagaaacatacacttggtgtttcctagcgtgatcaatgttgaggatcaaattatcttgggttgttcttactatacctgttgactattatttcagatgagatctatccacattgagtaagcacacaacatcagcgagcattgccatcatatgcatcattcagcgatgctaatcagaaatccaggatcagggccgtaaaagggttggactatatgtatctgcaacatcgcaagcaacagggaggctgtctcttcagaaattttcaagaggacgtgtcagaaacatactcaggaggccgtctcttcattcaaagagtatcttttacacgacttcttgagtataaaaaactcatttgtacaatcctacctgtctattgaattgtctttagaaaaaaaaaagagactttattgtatgtactttttttatcttttatgtctgaagaactgttttccccttttcttttagaagtaggagccggtaaagctactctttcaatttgtcacaagcattatttatttttataatttgtcctctgtttccttgatttc

SEQ ID NO: 127739 - DNA, 2352 bp, Zea Mays
cggagccgttcaggcggccacccgcaggccgcaacgcagcacaacggctttctctccctgcttccctctccctgcttccctcctgctacaaataaaaattcgtggggcggccaaaccctaaaacgccccacagcgcaagcgagcagatcctcctccctttctgcttcctggcatcctctctgcctccccgcgccgatctcgagcacctggggagaccgcgagacgtgcgcctgatttttctcatcgcagcagccctcaagttccccacctcttttttcttgcagctttcaattaatctggttatttagctacatctttattttactttcattttacctttaatctgtttagttccattgcatcttctgcggttgcggttagtattgctgtttcttgctccttgtttcttgttcttttgcttctaaccatggacgcaggaacctactccatctcatcagagaagagccacacggcggcagcggcgcggccccctcttcaggaggccggcactcggccctacatgccgtcgctgagcacaggatcgcgcaacccgtcggccaagtgctacggcgataggttcatcccggacaggtcggcgatggatatggacatggcgcactacctgctcacggagcccaggagggacaaggagaacgcggtggcagcgtccccatccaaggaggcgtaccggaggctgctcgccgagaagttgctcaacaaccggacacgcatccttgccttcaggaacaagccgcctgtgtctgagaacgtctcggcagccatcacagcttcctctcaccatgccaagctggtcaagcagcgtcgacatattccccagtctgcagagaggactctggacgcaccagagcttgttgacgactactacctcaacctgcttgactgggggagcaacaacgtgctatccattgctctgggcgacacggtatacctgtgggatgcctccagtggatccacgtctgagcttgtgaccattcacgaggacagtggtcccatcaccagcgtcaactgggctccagatggccaccatatcgctattgggctcaactcatccgatatccagctctgggacaccagctccaaccgactgttgagaactctcagaggtgtgcatgaggaaagagttggctcactggcatggaacaacaacatcctcaccactggcagtatggatggcaagatcgtgaacaacgacgtgagaattaggaaccatgttgtacagacatacgaggggcacagccaggaggtgtgtgggctcaagtggtctggatcagggcagcagctggctagtgggggtaatgacaaccttctgcacatttgggatgtgtcgatggcatcccccatgtcaaccgctggccgcaaccagtggctgcacaggctcgaggaccacatgtccgctgtgaaggcactcgcgtggtgtcctttccagagcaacttgctggcaactggtggtggcggcagtgatagatgcatcaagttctggaacacacacactggagcatgtctgaactctgttaacactggatcacaggtctgtgcccttctatggaacaaaaatgagagagagctgctgagctcacacggattcacacagaaccaactaaccttgtggaagtacccatcaatggtaaagatggctgaactcagtggccatacctctcgtgtccttttcatggctcagagccctgatggttgcacagtagcatcagccgctgcggatgagacccttcggttctggaacgtatttggagaccctgaagtggccaagcctgcagccaaggcttcccacactgggatgttcaacagcttcaaccatattcgataggaacaagtcatgagaacgatcccttctgttggaaatggccgtgcatcatatgtgaggtcgattcctattgatgagatctatccacattgagtaagcacacaacatcagcgagcattgccatcatatgcatcattcagaaatccaggatcagggccgtaaaagggttggactatatgtatctgcaacatcgcaagcaacagggaggctgtctcttcagaaattttcaagaggacgtgtcagaaacatactcaggaggccgtctcttcattcaaagagtatcttttacacgacttcttgagtataaaaaactcatttgtacaatcctacctgtctattgaattgtctttagaaaaaaaaaagagactttattgtatgtactttttttatcttttatgtctgaagaactgttttccccttttcttttagaagtaggagccggtaaagctactctttcaatttgtcacaagcattatttatttttataatttgtcctctgtttccttgatttc

SEQ ID NO: 127740 - DNA, 2403 bp, Zea Mays
ccgcaggccgcaacgcagcacaacggctttctctccctgcttccctctccctgcttccctcctgctacaaataaaaattcgtggggcggccaaaccctaaaacgccccacagcgcaagcgagcagatcctcctccctttctgcttcctggcatcctctctgcctccccgcgccgatctcgagcacctggggagaccgcgagacgtgcgcctgatttttctcatcgcagcagccctcaagttccccacctcttttttcttgcagctttcaattaatctggttatttagctacatctttattttactttcattttacctttaatctgtttagttccattgcatcttctgcggttgcggttagtattgctgtttcttgctccttgtttcttgttcttttgcttctaaccatggacgcaggaacctactccatctcatcagagaagagccacacggcggcagcggcgcggccccctcttcaggaggccggcactcggccctacatgccgtcgctgagcacaggatcgcgcaacccgtcggccaagtgctacggcgataggttcatcccggacaggtcggcgatggatatggacatggcgcactacctgctcacggagcccaggagggacaaggagaacgcggtggcagcgtccccatccaaggaggcgtaccggaggctgctcgccgagaagttgctcaacaaccggacacgcatccttgccttcaggaacaagccgcctgtgtctgagaacgtctcggcagccatcacagcttcctctcaccatgccaagctggtcaagcagcgtcgacatattccccagtctgcagagaggactctggacgcaccagagcttgttgacgactactacctcaacctgcttgactgggggagcaacaacgtgctatccattgctctgggcgacacggtatacctgtgggatgcctccagtggatccacgtctgagcttgtgaccattcacgaggacagtggtcccatcaccagcgtcaactgggctccagatggccaccatatcgctattgggctcaactcatccgatatccagctctgggacaccagctccaaccgactgttgagaactctcagaggtgtgcatgaggaaagagttggctcactggcatggaacaacaacatcctcaccactggcagtatggatggcaagatcgtgaacaacgacgtgagaattaggaaccatgttgtacagacatacgaggggcacagccaggaggtgtgtgggctcaagtggtctggatcagggcagcagctggctagtgggggtaatgacaaccttctgcacatttgggatgtgtcgatggcatcccccatgtcaaccgctggccgcaaccagtggctgcacaggctcgaggaccacatgtccgctgtgaaggcactcgcgtggtgtcctttccagagcaacttgctggcaactggtggtggcggcagtgatagatgcatcaagttctggaacacacacactggagcatgtctgaactctgttaacactggatcacaggtctgtgcccttctatggaacaaaaatgagagagagctgctgagctcacacggattcacacagaaccaactaaccttgtggaagtacccatcaatggtaaagatggctgaactcagtggccatacctctcgtgtccttttcatggctcagagccctgatggttgcacagtagcatcagccgctgcggatgagacccttcggttctggaacgtatttggagaccctgaagtggccaagcctgcagccaaggcttcccacactgggatgttcaacagcttcaaccatattcgataggaacaagtcatgagaacgatcccttctgttggaaatggccgtgcatcatatgtgaggtcgattcctattgatgagatctatccacattgagtaagcacacaacatcagcgagcattgccatcatatgcatcattcagcgatgctaatcagaaatccaggatcagggccgtaaaagggttggactatatgtatctgcaacatcgcaagcaacagggaggctgtctcttcagaaattttcaagaggacgtgtcagaaacatactcaggaggccgtctcttcattcaaagagtatcttttacacgacttcttgagtataaaaaactcatttgtacaatcctacctgtctattgaattgtctttagaaaaaaaaaagagactttattgtatgtactttttttatcttttatgtctgaagaactgttttccccttttcttttagaagtaggagccggtaaagctactctttcaatttgtcacaagcattatttatttttataatttgtcctctgtttccttgatttcacatcctcttatgacatgtttggctgaagagcagaggaaaatggagcagaatcattact

SEQ ID NO: 127741 - DNA, 110 bp, Zea Mays
tgagcttgaagaagagattggggcaggaactcaaactgaaaatacaatcgtggaaggtgtagaggtaagggttgatgggaatgtgagcatccaaggtagtgaaaaagggc

SEQ ID NO: 127742 - DNA, 1778 bp, Zea Mays
gcggcggcctcatacccgcaggcagttttcaccgcgcggcggcctcatccctgccggcgagcctccactcccctccgccggtaagcctccaccgccccatcgatcgctcctcacccgccggtggcctccccctcgacggacatttcttggtgcatttggcccccctccaccaccagcgaaatttacccaccccgaatcgccccccaaaatcggtcctacaccgcaccagatcacatctcatgattccaatgagaattcgaaaaggaggaagaaatgacggaggtggcgctcctccggggcccgaccaacctcgcttccaccaagcggtagccccgagcgcactgcgggatctgctaggagccgacgactccttgaacagcgcgggcaagaggccgtggaagaggaagaggagtggtggtcgttcttggcgctgctcttcgagctgttgtagaagtcgctgctcgggtgcaggacggtgggcggcggtggtgaaggcgaacatggcggcggcgggatggagattaggctgcccacggacgtgcaacatgtcgcgcacatcacgttcgacaggttccatggattcctggggctgcccgttgaattcaagcccgaagtgcccctccgtgctcccagcgtacagtatgtctcttagtgtccatcgtcaattcagattaattttaagttcacgcttccagaaatctgactttatttttgcagaatttacttatgcaataacatgaacttttttagctccaatttgaactttaacttgagggtgtttgcagtttttcttcttttaattccaagtatgtctggtgctttggtaattgatatgaacagttgataacaataagtattagattatgttcttttagaaagctgtaaaatctagatgatgtttgcttgacacaggttcgttaatagttcatcactctttagcattttgatggcatgctcatttccgcaatatagttttgatccttgaaaagtggtcccttttgtttgtgttacagcctccatgctcccttgatctgaaatatcattgaaaaagcaaaattttaagtggaatttgagtttcgtttgaattgtgttatgaagtatgaagttggttttcgtgttggcggccttagcaggatctgaactacggttgatgaaatgggcatgtcttctgatagttgatatgctttggaccgcaactgttcatagaaataatttctgtgtttttcccatgttccatcaaacaattggtcaatcatttcgctgatgcaatcttgtagcatccatgattttactgtacttgcttacctcatctaagaattattccgattgtactaggtacataaagttgattgttacatcatctgtcatcagtaagattggaaagttgctagggatttcaaaaaatgttgtcaaatcatgtctggcaatttggaagttgcaaagttagttaaaaaactgtgtgaaagatatgtttatggacatgaatgaactcagttacaagaaaattcatcaataaatttgcaaaattgtaataactgtcctaatgatcagctactacttctaaaagtttactactattgtttaccagcaagacaaaggtgataaaacttgatggggtactaattaaaccgtttgaggagaaatatcagaaggatgcttatacataccaagcaagacatgtaagaagcaagctctccatccttttgacgaagtgctgactcaaaagcacttggagtcatggtcctcagataatatgacattactttctgaagacattc

SEQ ID NO: 127743 - DNA, 678 bp, Zea Mays
cacatatatattttagatcccaagcccaaaatcttttagatcccagttcataccaatttaatgttaagtttgcccccacaactgatctcgatttctattctcagcattatattggtgatatctcagagttggatgcattggaaggctttgctaaaggttttcctggtttttatcatagatctgtgcataagatttgtcttgattttttgtttgtttcagagaaagcagtattctaacatggcatgttcctaccttgttttcttatttgtctgtgttgtctcctgcatgttctacacaaaatctttgtacccacaatctttgtattctaacatcgataagtgcccaaaatctttgtatgcttctaaacagacctttggtattgttgtacacattggattcaataccagttctgttgtcccgaaggacaaaaccaaaggcgagatctacgtggccttcaacaccagtcacctgccggtggtcgtcgggcttctagagcgctctgggttccgatgggagccggtggtggacaccggcaaggaggcaccatatgacttcctcaccgatggcctgccagatcgtgctgtcaccgtctaccagttctctcatttcctcaactccaatctctatcctatgctcagctactcctccatcatccttgtattgcgccctgatgtctga

SEQ ID NO: 127744 - DNA, 1630 bp, Zea Mays
tgtaatagaagatatgatctcacgcgcacgcgctcaaccaaagcaagacccgtggagcgcaagcgcctgtgtacagcgggctaaagtccagtacagcgacccggaacaacggggcagcactcacccggcccggctatgagcccaatacgggcccactttgtacagcgaagcgagcaaaccccttcttctcgcctttctgtcgcgcttcttctcgatcttgttcgcggagaggggtgacgtgattgacgattttgactcgaatcatggtgtgcatctctaccagatagagagctgacctgaggtggagacgcggatcgtggctcctggggtggaggtacaagcgtacagctcaataggagatcaagagtaaagagtgtggggaggggaaggacgcgatatcgggggaggatggtgcttgtgcttgcgctgggggatctgcacatcccgcaccgggtgcccgacctgcccgccaaattcaagtccatgctcgtgcccggcaagatccaacacatcatctgcgctggcaacctctgcatcaaggaagttcatgactacctgaaaagcctttgccctgatctccacattactggaggtgaatatgatgagtatgctcgatacccagagactaagacacttacaattggtcagtttaagcttgggctgtgccatggtcatcaggttgttccatggggcgacctggactccctggcgatgctccagcggcagctggacgtggacatcctggtgaccgggcacagccatcagttcaaggcatataagcacgagggaggcgtggtgatcaaccctggctctgccacgggcgcctacagcagcatcacttacgacgtgaacccaagctttgtgctgatggacatcgaaggactccgtgtggtggtgtacgtctacgagctgattgacggcgaggtgaaggtggacaagatcgacttcaagaaagcagcgacgatgcaagcctagcactactatccttccacggtgtgattggtttcaagacacgtctaggttctgtttttttttctcttcttgattcagagctccctcaacactctctttctaccacttgtgctaacctgttcatgtgcaaataactagtttaatacacattagctgatcatattacgacggcgtgatgttaaatgtcaagtaacttaaggcctgtttggcatggctctagagcaaaactccaaggaggagctgcatgtcaaacatccagactccaaagttgtaaattctatggagtttttggagctgcggagtagctcttttgctgatctgaaaactctaaaaaagcaatcatggagttttgagttatttacccgccattgttactggttacgagaaacaatctcaattaatcttaactctagagaagagctgctccacgcagagttttggagtagagctgctctaggtagaacatagtcatgtcaaacacgcccttagtatttggtcttgctttaaataagaaggggcgctctttaatttttgtttattttaagtaacaaatcgtagatggagtaattgcaagatagatttgcttgccgttagtttaattctgtctctgtaatctgttccgaaagtctgagtgctatagaaaaagaagatcgaaaaa

SEQ ID NO: 127745 - DNA, 1162 bp, Zea Mays
tgtaatagaagatatgatctcacgcgcacgcgctcaaccaaagcaagacccgtggagcgcaagcgcctgtgtacagcgggctaaagtccagtacagcgacccggaacaacggggcagcactcacccggcccggctatgagcccaatacgggcccactttgtacagcgaagcgagcaaaccccttcttctcgcctttctgtcgcgcttcttctcgatcttgttcgcggagaggggtgacgtgattgacgattttgactcgaatcatggtgtgcatctctaccagatagagagctgacctgaggtggagacgcggatcgtggctcctggggtggaggtacaagcgtacagctcaataggagatcaagagtaaagagtgtggggaggggaaggacgcgatatcgggggaggatggtgcttgtgcttgcgctgggggatctgcacatcccgcaccgggtgcccgacctgcccgccaaattcaagtccatgctcgtgcccggcaagatccaacacatcatctgcgctggcaacctctgcatcaaggaagttcatgactacctgaaaagcctttgccctgatctccacattactggaggtgaatatgatgagtatgctcgatacccagagactaagacacttacaattggtcagtttaagcttgggctgtgccatggtcatcaggttgttccatggggcgacctggactccctggcgatgctccagcggcagctggacgtggacatcctggtgaccgggcacagccatcagttcaaggcatataagcacgagggaggcgtggtgatcaaccctggctctgccacgggcgcctacagcagcatcacttacgacgtgaacccaagctttgtgctgatggacatcgaaggactccgtgtggtggtgtacgtctacgagctgattgacggcgaggtgaaggtggacaagatcgacttcaagaaagcagcgacgatgcaagcctagcactactatccttccacggtgtgattggtttcaagacacgtctaggttctgtttttttttctcttcttgattcagagctccctcaacactctctttctaccacttgtgctaacctgttcatgtgcaaataactagtcaggtttggaagtttactatttttacagttttgaaataatactatagtatt

SEQ ID NO: 127746 - DNA, 216 bp, Zea Mays
atgttggcttccgccaccaccacaagcgcgatgaggaggaggctgactgccaatgtcgagggtgaggacctcgacgacgaaggtgggctacaggttgacgatgtcctcggtgcggaggctagagctaggtgtcgtgtcgtagttgtgcagcgcctccacaagctccgccggcttcaacagcaggaagggagaaggagcttgctatcccctccgtag

SEQ ID NO: 127747 - DNA, 2457 bp, Zea Mays
tcagcaggagcaaatcagggactgagcacaaagataatggaatccgatacaattacaaaccaatcagaacaccaacggcttggagccttggatacataccaagatcaaatgattgcaatcatcatcattctaaacctcccaacctcacctaaacatctcgcgcacctaaaattcctatagcacccataaccgcatgaccaaacgaaaaggagcagagattaaaagagcttgtagggggaggacgcgtccagcgggtggatcaggtaggtgagcaccagggccaccagcataaggatgtacgcgatccccaggtcgattgatgtgcctgcggggaatcaatcacaagagaacgccatcaagagaaagattcctgtgctgtacgagaggtaaacaactgcatgcattatttactgtcatatgtggtatgttatgtacatgcattttggtgcatatccaagtatctcttataaagataaagatagcgatacagttacgacgagtaccttatccttattcaagttttgaaatggctgcttgagagggaaaccgctatacagtatacactgttcaacaaggtgtgtggtaatttaaaactgtccaaccctgatgaccacaaatcagttgcgcccatatttatgcacacaagtgacaagttattgagagctgactgacgatttttcatgcttgaaactggtaaaagaatttatcacgactgacagagatggctcctttaacgtactctgtacaaatggcacaaccaccagtcgctcttcccatttctaattacctcatgaaaactaatactctaatagtacacggcagttggcacattaaataatttgggaagactagccaaaggaaggtgtgaataccaggggtgttcttctacccgctcttatttctagtaacatcatgaaaaccaatagtatatgacagttcccacatagaccaaccaatttgtcgtgtctgagcaatcagaggtggttttcagaaatagctacaagtgtcacattcttgaaatcactcatacgcacagcaaagcattggaaattttgcagtcattttcaggcaaagaaaaccccccatcatcctaggcaaggcatgcctgccaagggaaggtaccaatatggatggaaaactactgcgcaactaattgacactataaacaatggtagggaaatggacgctggctgaacgtgcgcaagaaaatgacctgtatgaatctatctaggaccgcaaaaggattaacagaggaccatctctcctttataacggcaccaaagaggactatctctttgtctatcaaggacaagtggacaacaactacaacatacagcctagatcaatagaggactacatttttcatctcacatcagatatactccgtccattccaaactacaagacggtttggcttttctagatctgtagtttttggccaaagtgtcttatattttggaatcacaacctgttccttgtgacaatgtgatagtttgtttgtgcaacagacaaaacataaagaggcattccatgaaaaaggagagcagtgctagttgacatagtcctattatattagaacataaatgcaaggagacggtcatagccacaatctaacatttctacagactgcaaaccaccaaattcattactgccagacgcgacagactatgtgcatacctgagagcagttggtccagatgtgaacaatcttcacaagagatgttctccaaaaattgtagaaatattagtatcgatttttcatataataaaaaatcgcattggagttatgtgttcaaacagaaagaatttaattgaatgacggcatgtggagttgtggacgactccagcccctttgtgctttttagaaagcgtgtcagttcctccggggcctaaactgttcgcgttaattttatattttcgctaaaattaacgcaccatgaccagtactgccgcaggagattcgcactgttgtgactgtgattaacgtccagagtccagacatggggatctaaattctacggcaatgcaggaggcagacaccgggggtttttgttacaatgggggaatgaacataacacgattgcgggcggcccacggtccagatcgcaatgtgattgcacaaaaaaggaagggcgaggagagagaaagagagagaggcagcgtaccgtcgctggtgggcgcgggcgccggtgcctgcgccgctgcggcggccggcatgaagatggcgacgacgagagcggccaccgccaccgcgccgagcggagccctcaccacggccattcctcccagggagtccctcccgctgtcgccggcgccgggaagaggagagggggtggacggacggtcggcacggccaccacgccacgcaccggcacggacgacgaaggcacgcctatctctctctcccgtcctccctccgcgcttaccgcttcctcaaaaaaagcctagagctgcacgag

SEQ ID NO: 127748 - DNA, 988 bp, Zea Mays
gaaacaaaaaacattcggggacgcgcctgcttgcttctttccccaaaccccaaaccgcaggtaggaagcaaaccgcacgccccgctccagaacggatcctcatctctcacgttgtcaccacagtctgaatccagaatccaactagtagctccataaaagcggcaatgatccagctgctgttcgtcgtgctggtggcggaggcgtccctgacggcggcgctgctcttcaagacgccgctgcggaagctcgccgtgctagtgatcgaccggctcaagcgcggccgccacgcgcccgtcgtcgtcaagacggtcgcgggcgtcatccttgccctgctcgcttcaacgctctacagcatgacacagatcgccggcagcacgagcgactccgactctggcggcgggcccacccccaccgaccaggtgctcttctcgcgtcacctcctggaggcgtgcctcatgggtaggtcctggtaacgcgcatcagcccactcgatcacgttcattacgccttgtccatgcgggctcctctatccccttttttattggtctcgattccctgtttattgcttgcttgggtaggggtgtggtgagatctgggtgtgatgaatagtctgtgacaatctaggttggtggggtgtactgctatcttgcttattcaggtggctgttcaagcggttgtgttgatgtaagctggtaacccgggcagtaactagtttttaagctttcaaatattattaaacagatcaaggtctttttggtctaaaaaagaaaagagcatccattctttgaccctgcgtaggggattaaaacttataacattcttatgcatctgtttgtgagtaaatgtaaaattgtaaggtccagctagtaattttatcctgaggaactatttcgatccaagctatacagcttccccatctcactccacagtgcaaaaaaagtgcgcacagagtttgttgatgggaggtgaagtacttgttgcatcagca

SEQ ID NO: 127749 - DNA, 1176 bp, Zea Mays
gaaacaaaaaacattcggggacgcgcctgcttgcttctttccccaaaccccaaaccgcaggtaggaagcaaaccgcacgccccgctccagaacggatcctcatctctcacgttgtcaccacagtctgaatccagaatccaactagtagctccataaaagcggcaatgatccagctgctgttcgtcgtgctggtggcggaggcgtccctgacggcggcgctgctcttcaagacgccgctgcggaagctcgccgtgctagtgatcgaccggctcaagcgcggccgccacgcgcccgtcgtcgtcaagacggtcgcgggcgtcatccttgccctgctcgcttcaacgctctacagcatgacacagatcgccggcagcacgagcgactccgactctggcggcgggcccacccccaccgaccaggtgctcttctcgcgtcacctcctggaggcgtgcctcatggggtactccttatttcttgctctagtgattgaccggctccaccaatacatcagagatttgcgccggtttaaaaaggacttagaggctgtacgtaagcataataaaatgttggaggaggcaaaacatggaaactcggaggaggcaaagaaataccaggaagagattgccactctgaacaaggagatgaagaaactgaagctacaagtccaagaaaagacagaagaggtccatgtttcagaggacaaggcacttgctatccaaaaacaatccgaaggcttgctgactgaatatgaccgcctgctggaggataatcagcatcttcggacacagctgctgtcaattgaccgcaggctttccaactcttcttgaacgaagagtctatttaggggatgctgaagaatttctgtggaagatcatgttaccacccaaagtgtatggcagctacctgcttcctcacttgttagtcttagcatcttcaattaactagctattgcattatattgttggcaaaactagtgcaagcattatatggtctagaactttggagtttctcttgtgtgtttcttgtaatgcctactttttatgtgtgcttatagtgattactgttttgaacagaattttatgattattgcagacgggcattcacatgttgaaatcatgaactctgctccatgaggttcccagactattttaaaagttgttattgagtaaaaaaaga

SEQ ID NO: 127750 - DNA, 1524 bp, Zea Mays
atttagctgattacctttaaattaggaaaccaggtaaaacttgtagcaactgaagcacttgcaggcgcgctttcctcaccactcttccgtcttccctgcatgcaacgaagaacgaaccaacaaaaggaagctccccacccccgcctcggtggtgccgccatcagtccatcacacatccccgtcccctcccgtttccctttcgctccgctccccctcgctcggtcactcctcactcctcagtcctcactaacaatccgcaccaggactcatcagggccgcgcgcgcgcgccggcagcgatgcggtgggacgcagccgaggccgaggcggccctcgagcggatctgggacctccacgaccgcctcagcgatgccatcctcgccgtctcccgcgcgcacctcctcctgcccgctcccccgccccctcccgtgccgtccgcgccctccgccaaaggggcccaccgcatcggcgtcggtaggaacgggtgcgtcttcgtcaaggacggcgccgccggcggcggaggtgaggcgctggccgccgccgcggaggccctggccgaggccaggagcctgcacgccattcgctccgcgctcgaggacgtcgaggaccacctcgagtttttacacactgttcaatcacaacagcgggctgagcgagatgctgcaattgctagactggagcaaagccgtctagtccttgctatgaggttagcagaacatcgaggaaagaagtataaagtaatcgatgaggccttggcatttgttggtgaagtgagtgacaagagtcaatttatctcacctgaggatgttcgtgctacccatagccgatcagaggataacgcagatgacaacaggggcagtggttcaaggataatgtcaaacgtgttatcttgcagtttatcattagccaagaattcatttcgactggacaagatcgggggcactctcggtaacgctgcagtgtttgcagtaagtatgcttgctttcttgcagctgcatcaaattacatttggaagtaaaactccagccatggaatgtaggaagagaatcgagtacaatcttcaatcagggagctcacaaccgaatgggaaaggaaaacttctggaggtttacctagccagaggctgaagaattattaagctcacgctgttggctgtacagaaagttttgaccaaagctcagttttgttggttttgttagggcactgatcattctttacaacggactggaccctgttccaggcaaaaggcaaccatggaactgtctgtccggttctttttggatggatttgaaggataccacttattctatctcaaattgtaaatggttttgtgcttagagatgcattgtttgcaaaccgcgttcaagctaacttgaactgccgttttcgtactgcctactttcttgccgtgctcttgaggaggtgtggtaaggttcatcgcttgtgtggcaagtttcgggattgttggggctacagtatgatcacatgacatgctttgagttgtgagtactgacgttatttgcttt

SEQ ID NO: 127751 - DNA, 100 bp, Zea Mays
gaattcttgccacgctagccctagattaggttgcaaaccgcattgcattgcagccctccctgtttcatcatctggcgcttacctatttcttatactaggg

SEQ ID NO: 127752 - DNA, 823 bp, Zea Mays
cgcccagcagcagagcacaccatcctctccactcggatccccaagccctcacctccagctcttaccatggcattcgtcccctgctcggacctccacccggccgcgtcctcgtcggtggccagcgccgctgcatcgcccttcctagcgtcgacctcggcaccgcttccccgagcgccccagtcgagctcgcccatcctctgctctagccctttctccaagccgtcgctgagctcgcccctcccctcagccatggacacgacgacctgcaacccttcttggtggccaagcccatcttcctgctcgcgccccctctttttccacctctacgcgtatcagctcgtccaacccccatggtgtttcctccctcttggctcccttgctccctccccatggcgttccccctagatgctggtgatctgttccccacggtgcaagcaaatgttctttccctccctgcagcagcaccttggtggttgtcgagcagcacgtcgcgcttgcgcagcctcggtcacgacgttgtccaccccggtatgctaatgatcgagatgcgaaggccagggtctaggttgaccccaagtggtgcaaaggatggcctacttcgagaggcgatgtcggcggaccaatctagaagattgatgatctctacataaaaacaggattacattgattcaactctgatctggtgtttggcatttgttttccctctacattagtttctcattattatatttgtatagattcatattcttgagactaacctaatcaacattcattacataataatattataaggaggattaatttcatatacaatactatatat

SEQ ID NO: 127753 - DNA, 678 bp, Zea Mays
ttgataattggcagcctatcaagagttttatgagtgtagaacaatttttttgctgttaacatagtgtataacatttgatatcgtaatttgttttggaagaaaatttaagttcaacatagaattttttaccgacaagtttatggtcttttaatatctacaggttgtggaaactgagatcattgtaacttaaatgagagcgtggcacttagcatatagatgccactagaaccaatctggaattactatgaggaaaaatggatatagagtgataaaaggaattaattgaattgtgtatgcaactactgtggcatatcagtgaccttccgagaagatacaatggcgttcttagtagtaacgctgcttgatttctatagtttgagtcatcacacagctaacatttgcacttgaactgtttggtgaaatgcttgggagaaagaggccagcaagaatggagtcatggaacatcggcaggagtgcagcagtggtaaccgatgtatcccttgaacaatctggttttgacaagatgcaaatcaatctagtgtacactgtattccacacttgcaaagattgtttggctaattacaagattatctcagtgttttggtttggattaagagtacacttttgtatgaaatattgattggtactcatttatattatttttattatattattatt

SEQ ID NO: 127754 - DNA, 75 bp, Zea Mays
gcgagcaagagatggggaaccctagcgaagggagctcgtctggtgaggaacagaggagaaaaggataccgaggag

SEQ ID NO: 127755 - DNA, 1116 bp, Zea Mays
cctccataccttactgatctgaaccgttggctttcaatcggatcgcccgctatcccctcctatccacaatatgatccctggcctctcatcctccgaaaactccactccttcgtcatccatgcgtcccctccccgccgcggccatggccaccgcgacgctgcccctccgcctcctcccctccaaaacgctgactctctccactctcccctccctgcgccgctccctctccgtcgccgctttggagccccggcgctggcgcctccgagccgccgccgaggaggcgcctgaggccgtggaggttgagttcgtggagcccgagacggaggctgaggagaaacccgcggtaccggagcccatcgaggctcagctggccgccgcgggggccgggaaggacgcggacatcttcgctgttgtcatgattggttcaagacagtacatagtgatgccgggcaggtatatatacacacagagactgaaaggtgccaatgtcaatgatcagatcatattaaacaaggtgctactggtgtcaactagagaaaaagcttacattgggatgccagtggtgaccaatgctgctgttcacgcagtggttgaagaacagggacgggatgataaagttatagtgttcaagtacaagaagaagaagaagtaccagaggaaacttggtcacagacagccaaacacaaggttaagaatcacaggcataagtggatacgaagagtaccctgctgacccaatacttgaccctgctgcagctttaaattaaactgtaagttatgtagttacaaaacggctggtagtagagtagcatgctagttttcttgtttctttctttttttacttctctgtcttgaaaaaggaacacttttcatcacaattttccttgtttttgtgtgttccaaatgctgccagtcaaccaactgtaccatgagctatcttgttcttgttcttttttcacatcgtgtatgctactagccagttgtattgcacgaccggtcctaaagaagaggtttctttctttttgctacaagttggacaccttaacaaaggcgtatctggcactttagttatagtcgacactagaatctttctacaagttacgttcaaaaaaaagaa

SEQ ID NO: 127756 - DNA, 2755 bp, Zea Mays
ctggttgccaaggcaaagggccacaccctcacctcagcatctctctgctccacttctcctcgtccccgtccgacatcgcatcgcatcgcatcaccgcctctcgctttctgcccatcagccctccctctctctcctgcgtctccgaggcgcggacgacggcgacgacgcgaacgcccccgccgcctaggcacatttgctgggaattagggcaatcaacgtttaagtacatgtggtctactgctgtttgattattactgagattcaatcatttggtcagatgagagttctggctggggacttacaagtgtagcactgttgtcggcttgtgactaaatagcatcacttcacatacaacactggataatggatcgtagggatacttcagggtttgttagtggaggatgcaaaaataatgaagcctactagtttctctatatcttctaacttggtagctttattgacaattatttaacccagaagtgaggccagctggtacttcccataaagtttggttactctaatagcaatggaacccaggcatgggcgttcagcattcactataagtttctcaaatccaaatggctttgctaatcagtgcaccgccattccagccgtcagttattcagcggctggttctagccaacttgatgtgctggctcctactagaggttgcaagagaaagtggactgagttggctctaggtctgggtgacacatcaagctcagacagcagcaagcagagcatgggtactggctgcactgtttcttctctcaagggaagcgatgatgtctcatgtatggattacgacataagtttcaagttatctcttggcaatgaagatacttccaagctgcataaacaggcttgtggttctaaaaggactatggagaagcctcggttggatcttaagttatctttggctccatctcaatccgatgtaactgacgcggatctaatcagaagcagtgcacctcaggacatgtttgtgcagccgtacttgatgtcctcagtgccaacagtcgatgaaggatctacatctgctcgacatccatctggaggcatggtggtttccttccttaaccaggctgggatttctccgaaccagttgcccccacttaactctcatctggtccagggtccagcttgttcagcaccaacagtgctccaactgccaaaaagttcagctgccacttcttctgggtttgtccgcccacagcaacgcaacggtagcacaaagatctgttcagagccaggttgtgcaaaaggagccaggggttcatctgggcggtgcattgcccacggtgggggcagaaggtgccagaaagaaggctgcaacaaaggagccgaggggaggaccatcttctgtaaagcccatggagggggcaagcgctgtgagcgccttggatgcaccaaaagtgccgaaggccggacagatttctgcatagctcacggcggcgggcggcgttgcagtcatgacgggtgcaagagggcggcgcgaggcagatcgggcctgtgtatcaagcatggtggcgggaagaggtgccaaacgctgaactgcacaaagagcgcggaagggcggtcaggcatgtgcatcgctcatggtggcgggcggcgctgccagtacgctggctgcgggaagggagcccagggcagcacaaacttctgcaaggcccacggcggcggcaagagatgcacgcaccccgactgctccaagggcgcggaggggagcacggcgttctgcaaagcccacggaggcggcaagcgctgctcggctgacggctgcacgaagagcgtgcacggcgggacccagttctgcgtcgcgcacggaggcgggaagaggtgcgtggtggaagggtgcgggaagagcgcgagaggcaggaccgaccgctgcgtcggccatggcgggggcaagcggtgccactccgccggctgcgggaagagcgcgcaggggagcaccgatttctgcaagtcccacggcggtggcaggcgctgctcgtgggggcaccctggctcagacctcgggtctggtggcgctccctgcgaccggctggcgagaggcaagaaggggctgtgcgaccggcacaacccgctggtccatgacaacagcgtgcatgggggtgcgtcgttcggtggcttcagtgtcgtcagtgccgccgccctttctgagggagatggctctccatctccaggcaccgagacaagcatgcgcagcttcttcatgcacgcggtggaggctcctcgctgtgtggcggcctcggcccatgaaggccgggtgcatgggggcaacttcatgcctatcatgctcgacggtggcgtgggactcgggaagaggccggccgacaacgctgatgctggtgcctctgcccctcctcgcagctggaaaagtatggagaaggcctgtggatctgcgccgcgcagctggctgtagtatttgccagaagttcgtgacctgctcacagctcactctctccatctgggtctcctctgctcctgctccaagtgtctcccgtgtcctctggtcatgcgtggtatggtatgataacatgaactgtgtgtgtactggttggtcaggactcgggacttgtttggtactgtggatattgtggttgtttgtgctcttgtagcataggtctggtcgaacatacctactagtaacagtcgtcgtgtgcggtgtgtgattgaattgtaaatgaaaggaacgcctcgtcatgatacaaataaaaaatagtacctttcctcgcggcgcccgccaaat

SEQ ID NO: 127757 - DNA, 113 bp, Zea Mays
ttttttatttgtatttaactgtgacagtattatctgttgtatgaaatgttcatatggaataaccgagcatgtgaaggatggaatgagttcaatttaagaaaaagaattaaata

SEQ ID NO: 127758 - DNA, 369 bp, Zea Mays
atggagttgaccaccggatccggaggaggagcaccggctgccggatccaaaggaagagacgagacgttccgtatgcggctttcggagggtagcgactggatctggatgaggtttggcggtgagcttcttcctatgtgtcttcttcgtcggcgccagtggaaggtcagtcgtgtccgaaggaggagaggcggcgacgatggagacgcgcacgtgcgccggggcggtggaggtgaaggtggcggccgatatctggaggacgagacggggcttacgtgcccgaccatccggggtgtgtttttcttccctgtgaaaaccgccccgaaccggggtcaagcttccctttccgtggacttccaaatgccaaaatag

SEQ ID NO: 127759 - DNA, 1407 bp, Zea Mays
aattctcttcaacacgcgcacatgtgacatgccccatggtcgccgccgctccaggcatcctcccgtggcctcacctccctctcccttcctcctcccacccgtctgacgcctctgacgccgccgcagcagcaacagacgccaacacctccgcgtatgacatccagatcttcgagcccacctccatcgaggagcgtcgtcgcctcctgatccagcggcgtcgcctccgactcgccgcctcccatgcctcgcggctcaccgttgcctcgcgcgtctcctccaaactcatcagcgccaccgcctcctgctccagcggcgtcgcatccgatctgccgcctcccctcctcatggctcgtcgttgcctcccgcctcttccccaacctcgcccttgccgcccttggaggatcccaaatccgacgacgagctcagtaggcccacgcagacgcggatgtgctatgaacttcagattctgtatcgatggcaatgggttccagaacagtacacaaggcaatttcaagacggttattcaattgctcaaatagttcagtaagtgagaacaaagaaacttcctaaatgtattaatatggtatgatgaatagtgtctcacacattgtgttgttgagctctggtctccatttccgtgctgctagaatgtgatttgaagtattcaccttttgacatggataaacatcttctctctgttgcatttgcaggcgaaagaaggtctgttgaagcagcctaaactattttcgttgtgatttccaacgctacattttccaatatgcctttgtttcatacatttttcctttttttcaaataaggctcatgtgctgcttcgaaaatcagttctaagaaggcaaccagggacaacaaacctgataagggaagaaacatgttctggataaatattggcctttgtttcaagactccaagcccgccaccatccagggatcaatcctcaccacgaggaccaggggtgatgccaacaaggtgtacgtgaacctttcctggggtgttgataatttagctctcgcaaacctgttcactgagcaaggaccatctatgacagtgagaacaagtcaagagggtttgatttttgtcatgacttggatgatagatccgtgttacgataccagcatcaaagccgcctagaagcaatactgaactttcacttgagatgtgagtagttgtagtagtagcccaaactctggaatatagtatcatcattcctagatatgtagttgtaaattctctgcccagaggtttgagctatcactcagattatgggttcaatgtcatgtatagagtcaagaaaaaacatcttctgtgcgtcttcgagtctttcaaaggcaaaacaaattacacgcgcgctgacgcgcaccaatttactagtatatattcaggtacaaa

SEQ ID NO: 127760 - DNA, 1833 bp, Zea Mays
aattctcttcaacacgcgcacatgtgacatgccccatggtcgccgccgctccaggcatcctcccgtggcctcacctccctctcccttcctcctcccacccgtctgacgcctctgacgccgccgcagcagcaacagacgccaacacctccgcgtatgacatccagatcttcgagcccacctccatcgaggagcgtcgtcgcctcctgatccagcggcgtcgcctccgactcgccgcctcccatgcctcgcggctcaccgttgcctcgcgcgtctcctccaaactcatcagcgccaccgcctcctgctccagcggcgtcgcatccgatctgccgcctcccctcctcatggctcgtcgttgcctcccgcctcttccccaacctcgcccttgccgcccttggaggatcccaaatccgacgacgagctcagtaggcccacgcagacgcggatgtgctatgaacttcaggttcgtcttttttcctgtacaccaattatagtcctccagcgcctacgaattttttttgcaaactttatacaagtccttcgctcaacaccgcctttggttgcaacggaagctgctactgttgttgaacgttagttgcttttattagatttatgcattttttttaaattcgagttcaaaattaagcaaaacacacgcttaatcaatttttttgcgttgttttcaactgatatatagacaacatattcctatcaagtggttgtttgcaagattgacgagttgtaggcaccaaatatatcgagtccttgctatcaacatatgagcatattattgtcaaagtaggcaacatctcatttaacagacaactctccgctctatcattctctcaaggctgatgtgcatttctgatatattgagctcaagcgtcagattctgtatcgatggcaatgggttccagaacagtacacaaggcaatttcaagacggttattcaattgctcaaatagttcagtaagtgagaacaaagaaacttcctaaatgtattaatatggtatgatgaatagtgtctcacacattgtgttgttgagctctggtctccatttccgtgctgctagaatgtgatttgaagtattcaccttttgacatggataaacatcttctctctgttgcatttgcaggcgaaagaaggtctgttgaagcagcctaaactattttcgttgtgatttccaacgctacattttccaatatgcctttgtttcatacatttttcctttttttcaaataaggctcatgtgctgcttcgaaaatcagttctaagaaggcaaccagggacaacaaacctgataagggaagaaacatgttctggataaatattggcctttgtttcaagactccaagcccgccaccatccagggatcaatcctcaccacgaggaccaggggtgatgccaacaaggtgtacgtgaacctttcctggggtgttgataatttagctctcgcaaacctgttcactgagcaaggaccatctatgacagtgagaacaagtcaagagggtttgatttttgtcatgacttggatgatagatccgtgttacgataccagcatcaaagccgcctagaagcaatactgaactttcacttgagatgtgagtagttgtagtagtagcccaaactctggaatatagtatcatcattcctagatatgtagttgtaaattctctgcccagaggtttgagctatcactcagattatgggttcaatgtcatgtatagagtcaagaaaaaacatcttctgtgcgtcttcgagtctttcaaaggcaaaacaaattacacgcgcgctgacgcgcaccaatttactagtatatattcaggtacaaa

SEQ ID NO: 127761 - DNA, 1546 bp, Zea Mays
aattctcttcaacacgcgcacatgtgacatgccccatggtcgccgccgctccaggcatcctcccgtggcctcacctccctctcccttcctcctcccacccgtctgacgcctctgacgccgccgcagcagcaacagacgccaacacctccgcgtatgacatccagatcttcgagcccacctccatcgaggagcgtcgtcgcctcctgatccagcggcgtcgcctccgactcgccgcctcccatgcctcgcggctcaccgttgcctcgcgcgtctcctccaaactcatcagcgccaccgcctcctgctccagcggcgtcgcatccgatctgccgcctcccctcctcatggctcgtcgttgcctcccgcctcttccccaacctcgcccttgccgcccttggaggatcccaaatccgacgacgagctcagtaggcccacgcagacgcggatgtgctatgaacttcaggctgatgtgcatttctgatatattgagctcaagcgtcagattctgtatcgatggcaatgggttccagaacagtacacaaggcaatttcaagacggttattcaattgctcaaatagttcaaatgtgatttgaagtattcaccttttgacatggataaacatcttctctctgttgcatttgcaggcgaaagaaggctcatgtgctgcttcgaaaatcagttctaagaaggcaaccagggacaacaaacctgataagggaagaaacatgttctggataaatattggcctttgtttcaagactccaaggtaagccattgaatcccgccaccatccagggatcaatcctcaccacgaggaccaggggtgatgccaacaaggtgtacgtgaacctttcctggggtgttgataatttagctctcgcaaacctgttcactgagcaaggaccatctatgacagtgagaacaagtcaagagggtttgatttttgtcatgtatggttccacagaagagcctgagaatgcattatcgaatctcaatggagctatgagttctgaaacccttttttcttccccttgctgctcgcggcatagcatttggaaattgaagtacaatttgtctttcacgatatactgaattgatttatcattgtcctgcaggacttggatgatagatccgtgttacgataccagcatcaaagccgcctagaagcaatactgaactttcacttgagatgtgagtagttgtagtagtagcccaaactctggaatatagtatcatcattcctagatatgtagttgtaaattctctgcccagaggtttgagctatcactcagattatgggttcaatgtcatgtatagagtcaagaaaaaacatcttctgtgcgtcttcgagtctttcaaaggcaaaacaaattacacgcgcgctgacgcgcaccaatttactagtatatattcaggtacaaagtttgttccgatttctgtgaattgttcatgcagaactgggttttggtggtcatcacgaaagttgtagcaagttttctgcagatttccataatacacatgtttgcctcatttggggccagtgaa

SEQ ID NO: 127762 - DNA, 1695 bp, Zea Mays
aattctcttcaacacgcgcacatgtgacatgccccatggtcgccgccgctccaggcatcctcccgtggcctcacctccctctcccttcctcctcccacccgtctgacgcctctgacgccgccgcagcagcaacagacgccaacacctccgcgtatgacatccagatcttcgagcccacctccatcgaggagcgtcgtcgcctcctgatccagcggcgtcgcctccgactcgccgcctcccatgcctcgcggctcaccgttgcctcgcgcgtctcctccaaactcatcagcgccaccgcctcctgctccagcggcgtcgcatccgatctgccgcctcccctcctcatggctcgtcgttgcctcccgcctcttccccaacctcgcccttgccgcccttggaggatcccaaatccgacgacgagctcagtaggcccacgcagacgcggatgtgctatgaacttcagattctgtatcgatggcaatgggttccagaacagtacacaaggcaatttcaagacggttattcaattgctcaaatagttcagtaagtgagaacaaagaaacttcctaaatgtattaatatggtatgatgaatagtgtctcacacattgtgttgttgagctctggtctccatttccgtgctgctagaatgtgatttgaagtattcaccttttgacatggataaacatcttctctctgttgcatttgcaggcgaaagaaggtctgttgaagcagcctaaactattttcgttgtgatttccaacgctacattttccaatatgcctttgtttcatacatttttcctttttttcaaataaggctcatgtgctgcttcgaaaatcagttctaagaaggcaaccagggacaacaaacctgataagggaagaaacatgttctggataaatattggcctttgtttcaagactccaagcccgccaccatccagggatcaatcctcaccacgaggaccaggggtgatgccaacaaggtgtacgtgaacctttcctggggtgttgataatttagctctcgcaaacctgttcactgagcaaggaccatctatgacagtgagaacaagtcaagagggtttgatttttgtcatgtatggttccacagaagagcctgagaatgcattatcgaatctcaatggagctatgagttctgaaacccttttttcttccccttgctgctcgcggcatagcatttggaaattgaagtacaatttgtctttcacgatatactgaattgatttatcattgtcctgcaggacttggatgatagatccgtgttacgataccagcatcaaagccgcctagaagcaatactgaactttcacttgagatgtgagtagttgtagtagtagcccaaactctggaatatagtatcatcattcctagatatgtagttgtaaattctctgcccagaggtttgagctatcactcagattatgggttcaatgtcatgtatagagtcaagaaaaaacatcttctgtgcgtcttcgagtctttcaaaggcaaaacaaattacacgcgcgctgacgcgcaccaatttactagtatatattcaggtacaaagtttgttccgatttctgtgaattgttcatgcagaactgggttttggtggtcatcacgaaagttgtagcaagttttctgcagatttccataatacacatgtttgcctcatttggggccagtgaa

SEQ ID NO: 127763 - DNA, 2121 bp, Zea Mays
aattctcttcaacacgcgcacatgtgacatgccccatggtcgccgccgctccaggcatcctcccgtggcctcacctccctctcccttcctcctcccacccgtctgacgcctctgacgccgccgcagcagcaacagacgccaacacctccgcgtatgacatccagatcttcgagcccacctccatcgaggagcgtcgtcgcctcctgatccagcggcgtcgcctccgactcgccgcctcccatgcctcgcggctcaccgttgcctcgcgcgtctcctccaaactcatcagcgccaccgcctcctgctccagcggcgtcgcatccgatctgccgcctcccctcctcatggctcgtcgttgcctcccgcctcttccccaacctcgcccttgccgcccttggaggatcccaaatccgacgacgagctcagtaggcccacgcagacgcggatgtgctatgaacttcaggttcgtcttttttcctgtacaccaattatagtcctccagcgcctacgaattttttttgcaaactttatacaagtccttcgctcaacaccgcctttggttgcaacggaagctgctactgttgttgaacgttagttgcttttattagatttatgcattttttttaaattcgagttcaaaattaagcaaaacacacgcttaatcaatttttttgcgttgttttcaactgatatatagacaacatattcctatcaagtggttgtttgcaagattgacgagttgtaggcaccaaatatatcgagtccttgctatcaacatatgagcatattattgtcaaagtaggcaacatctcatttaacagacaactctccgctctatcattctctcaaggctgatgtgcatttctgatatattgagctcaagcgtcagattctgtatcgatggcaatgggttccagaacagtacacaaggcaatttcaagacggttattcaattgctcaaatagttcagtaagtgagaacaaagaaacttcctaaatgtattaatatggtatgatgaatagtgtctcacacattgtgttgttgagctctggtctccatttccgtgctgctagaatgtgatttgaagtattcaccttttgacatggataaacatcttctctctgttgcatttgcaggcgaaagaaggtctgttgaagcagcctaaactattttcgttgtgatttccaacgctacattttccaatatgcctttgtttcatacatttttcctttttttcaaataaggctcatgtgctgcttcgaaaatcagttctaagaaggcaaccagggacaacaaacctgataagggaagaaacatgttctggataaatattggcctttgtttcaagactccaagcccgccaccatccagggatcaatcctcaccacgaggaccaggggtgatgccaacaaggtgtacgtgaacctttcctggggtgttgataatttagctctcgcaaacctgttcactgagcaaggaccatctatgacagtgagaacaagtcaagagggtttgatttttgtcatgtatggttccacagaagagcctgagaatgcattatcgaatctcaatggagctatgagttctgaaacccttttttcttccccttgctgctcgcggcatagcatttggaaattgaagtacaatttgtctttcacgatatactgaattgatttatcattgtcctgcaggacttggatgatagatccgtgttacgataccagcatcaaagccgcctagaagcaatactgaactttcacttgagatgtgagtagttgtagtagtagcccaaactctggaatatagtatcatcattcctagatatgtagttgtaaattctctgcccagaggtttgagctatcactcagattatgggttcaatgtcatgtatagagtcaagaaaaaacatcttctgtgcgtcttcgagtctttcaaaggcaaaacaaattacacgcgcgctgacgcgcaccaatttactagtatatattcaggtacaaagtttgttccgatttctgtgaattgttcatgcagaactgggttttggtggtcatcacgaaagttgtagcaagttttctgcagatttccataatacacatgtttgcctcatttggggccagtgaa

SEQ ID NO: 127764 - DNA, 160 bp, Zea Mays
agcccgccaccatccagggatcaatcctcaccacgaggaccaggggtgatgccaacaaggttgagaacaagtcaagagggtttgatttttgtcatgtatggttccacagaagagcctgagaatgcattatcgaatctcaatggagctatgagttctgaaa

SEQ ID NO: 127765 - DNA, 3506 bp, Zea Mays
ctcagtcaccttcgcctcacgcggtcacaccctcacctcggcgcccaacacaaagccagaaggagggacacagcgagaggaaagaccgaaagacagcagccaaagttggagggagacccaaggcagacggcaacgaggcagtcgcaaaggaaaggagggagctttgctgggctggagtggtcgagtggagtggctcaccgcctgaccgactgagccaggggggcattcgggcgtcccaccccgcgcgggggtgagagagacagagaggagaaaaagcggcgcctcatcacggtcgcccgcctgctcggcctcttcttctccctccccttcctgtctctgcgtcgcgttgcggttgtgcgcacctggtcgttctcggtttcctccccagccggtcctctcgggctccgttttccttccgggccgctcttggcgccttgctctccggcctcttccttgccggccacgcccttcctgcgcattgcttctctgatccccgccgggccgcttcgcgttcccttgattgactccactcgccgacttgtatgcgtccgtctcggcggcggcggttggtgctgtgagcgactcgcggcgggacgagggattccgtcgcgctcaggcgccctcaggagccgacggcatattgtgcatggagggtgaggaggacagctccggctccgtggtgcagcgcccgccgccaccgcagcagcagatacgggtggtgcgctgccccaagtgcgacaaacttttgccggagctgcccaattactccgtctacgtctgcggcggttgcggcgccacgctccaagcaaagaagagctcaggatctgatacttcttcagataagtctgatactgagcatgtgaagtaccttgaagtgcttgagagtttaccagataagaaaggagcagcatctgaagctagctgtgctgttcgagaagcagacaccaacaagatcgaagctaggtcagaagagagatttgcacccaacagaatggtggcggctgcacatagccaatctggattcagtttcgatgataaccatgctacttgtgcacccaactgcaccatgaaacttgaacctgcacttagagatgacagcagggaagttaaggaggcaaaataccgccgcattcgtcttgaagagaaaggagaagcaaagcagccagcgagggcaagtgacagatcaccaaggcctgtggttagcaacatcccttctaatgcttaccctttagaagggccatctgagtgtcataaaaaaccaggattcatatatgctagcggtgagaagggacatctgagtgacaagaatttagatgttcctagcaccagagccggtggccttgagaaagaccgtactgagcttctgcggatgctcgatgagttgagggaccaggtacagagatcctacgagattgctgacaagtcaagtgtgaatgcttcaacaaatagaatggtggatcctgcaagctcctacaatcctcatgagcgtctgagtcgattgcggtatggttcacctcagttgcagcgtaatggttctcagtgctcaccttctttgaatggacaggcacctgttgttcctcctgcttatccttcagtatctgtacagcaagatctccatggatacggacaatctgttgcacatatgggagctcctatttacccagccgccccttatccatggagaaacttcgataactatttccatggacagtatgatcctgaccctctgatctcttatcaccatgacggcttctaccatcagcctgcttgctcttgcttacattgttaccatcgtgaattattacctgttcatggggctccactgggtttcaaccatcgcagggcaccatatcttatgaacaaccctgtagaaggcccggtggtgtttggtgcacagaactacaatccaagaggtattaatggtctgatgcgacacaatcatctgagggacaccctgagtaaaaaacctgcacagacttgtgaaccaattgccaatggtgccccttttaccatatgctacaattgctatgaagtactgcatcttcccaagaattctctcatgctgggaaaagatgagtacaagctgcgctgtgggtcatgttcacatgcaattgtggtcagacttgatggaaacaggcttgatgtttcagcacctacaccagtttcacacttatcacctggaagtaaaaattactccaacaatggccaaggaagcaatggacaaaatgctgacgagagacttcttccatcttatagcttttctgcaggcagtcatttctctcaagaaaaagatttaccatcgaattccagtgaagcagacaaaatgcaatgcatatcatcttccgccagcatttctgaggatgataatagccgagctagttctaactcacagaagaactctggatctagagaccttcctcctgatgctgaagtggttatacgtgttccaagtttgcctcttcgtgatcattttggatattctccatcagagatggtggttgatgggtcaggcaaaggaagcagaagcacccggtctgaacatgagaagggtgtgttaactgaaagttttaagccaaacaaagtgaaagatgtacctgtagcaagcgtgctagacccatcagatgatgagtttgatgatcctgagtacaatcaagatccaggtgacggagcacaatgcgtcgatcacccaagggccacaaaatcgggcgactcctttttctccagcctgataaaaaagagctttaaaattaacggtgggatgggcaatggcagagcaaaggtgttcatcaatggctatcccatttctgatcgtgctgtgaggaaggcggagaagattgctggaccaatctatccgggtgaatactggtatgactaccgtgctggattctggggtgtcataggacagccctgccttggcatgatacccccatacattgcagaatttaactatcctatgcctaagaactgtgctggcggaaatactggtgtgttcatcaacagccgagaacttcaccagaaggacttggatttacttgtgggtcgagggcttcctgattctcctgatagatcatacagagttgagatttctggtaaagtatccgacgaagtatccggtgaagagctttattgccttggtaaactcgcaccaacggtggagaagatgaagcgtgggttcgggatgcgagtcccaaggaccattcagtgaaattggttcacatcgagaagcagaggctctgagatctgtgtgctgccacgcctttgtgctagagattgctaatgtcaccccgccttgaatcgttgcatctgtcgtagtggctgttttgatcgagtgtgtcatggtgtgaccatgtaattttgtctgtggattgttcaagctttctcaacgcacaagtttctgttgtgtagtctacgaactttactgctagtgcgtctgaacttgggcttggggaagtgcgagctgccaaaaaaaagttattgcattaacggctcaagcacggattcttttc

SEQ ID NO: 127766 - DNA, 2119 bp, Zea Mays
gcaccagatcaccgaaaacacaccatctccacctcgccgccgccgctcggatttccctctacctcaccctgtccggctccatggcgaccgccgcggtggagagcaagaggggcagcgcccggggccgcaaggcgctcgtggccgtgctcgacaacgaggctaacatctccgccgggaaggccgcccaggccgccgatctctcgtcctgctcagcgcagaagaaggcgaagcgggcgccgtcaaggagcagcaaggccaaggccgccgcggcgtcggcggccgtggtcgtggacgacatagccgagctgcaggggatgctagagcgcctgcggctggagaaggagaaggcggaggagatggttagggagcgggatgaggtcatccggaagaaggaggaggagatcgagaccagagacaaggagcaggagcgtctccaggccgagctcaggaaggcgcaacgcgccaaggagttcaagcctaccgtgagcttccccctcgtcaagtcgttgctggagaaagagcaagaagcagacgacaagggaaagaagaagaaggggaagggcggccacgagaggaagaagccgtgcccggcgtacgtgctctggctcaaggaccagtggaccgaggtcaagaaggagaaccctgaggccgacttcaaggaggtgtccaacacgctgggcgccaagtggaaggctctgggcgccgaggagaagcagccctatgaggatcgataccgccaggagaaggaggcctacctgcaggtggttggccaggagaagcgcgaggccgaggcgatgaagcttctcgaggagcagcagatgcagtggaccgccaaggagctgctggatcagtacctcaagttcaggcaggaggccgaggagggtgactgcaagaaggggaggaagaagaagagcaagaaggataaggacccctccaagcccaagcagcccatgtcggcctacttcgtgtactcgcaggagaggcgtgccacgctggtcgcggagaagaagaatgtacctgagattggcaagatcaccggggaagaatggaagaacatgacagaaggtcagagggctccctatgaggaggtcgcgaggaagcagaaggaagagtaccacaagcagatggaggtgtacaagcagaagaaggctgaggaagctgctagtcttgagaaggaagagcaggagcataagaaaatcatgaagcatgaggctctccagctgctcaagaagaaggagaaggcagataatatcatcaagaaaaccaaagaaaagcgccagaagaagaaacaggagaacgctgatcccaaccggcccaagaggccagcctcttcctttcttcttttcagcaaggaagagaggaaacagctgatcgaggaacgcccgggcatcaataactcaaccctgaacgcgctcatcacggtgaagtggaaggaactgagcggcgaggagaggcaggcctggaatgcaaaggccgcgcctgccatggctgcgtacaagaaggagatggaggagtacactaaggcccaaagctcatctgcttgacagaataactaattcctgcgagtgagctttggttacaaggatcctcatctctgaatcctggtgtggtagattacttcgtgtgatctttagctttgtgtgaccttattagtcgcagcaatcagtgtaatggcggttcatatggtttagtggcagtttatattgttgccacgggcccaggaattgagtaatctttcagttctgacatttgctgaaatggagagttctaatggaggggccgagggggcagccatgggatattagacccctctactcagtcggcatctgccgtgatgatggagatggacaccggcaatgtctgtttgacacgaaatgtttcatcgccaaaattatcaaatactgaattaatttgaacgctcaatctagtcttaaatcgtttttttgtttgtttgttactaaagcccaacgcgtcgttgccaccgcgcaccgtctcgtcgtagcaggtaaggtctgtatgattcaagagaaaaggcaggaaacgaggcacggagctcacagtgatcgctgggagaattcaatttacaccacccttaaataaatacgatctagacatttca

SEQ ID NO: 127767 - DNA, 854 bp, Zea Mays
caacccgccccacgcgacgccgaccgcagatccttcatctctttcctccctcgtaggcgaacccgactcaaaccctagccccctctccttgccatccccgcccatggatcgcgatcgctcctcacggcgcactcgcaacgacgacgggcaccaccgatcccgcggccgggacgacgaccggcaccgccgccgtagtcgccacgacaccgaggatcaccagcacgacggtggagacgaggaccgtcgccaccgccgccaccgcgacaaggacggtggcagaggcggcgaggatgaccgccggcaccgtgaccatcacgataaggacgacagccgttgccaccgctaccgtgacggcggtgacgacgatcgccgccgcgggaaccgacgttccgtttccccgtccgagtccccgccaccctcggcgaagcgggaccgctcgtctagccgcccccgggagcttgtcgagcgccgcgactccaccgaccgcgagccgcggtcgccgtcgcggaagagaaaggggcacgagggcggtggcgacggggacgagcccggccgcgaagggggcaagcgggccagggcctccgtagacccgcctccacccaaggaggagaggcctaggcgggagcgccggaggtttgaggatgtcggtgcgaatgggaagaatggtgatgtgagtaagtcgagtaaggaaatctcatctcatgggcagaagggggagttatcaattaacggagattcacagaacggcaatgggcctaatgctggttctcagcaactgctcagtgccgttcctatgccatcttctgttcccattccttcaaagatggaagtgcaacatctgctgctggcaaaag

SEQ ID NO: 127768 - DNA, 3370 bp, Zea Mays
ccctagccccctctccttgccatccccgcccatggatcgcgatcgctcctcacggcgcactcgcaacgacgacgggcaccaccgatcccgcggccgggacgacgaccggcaccgccgccgtagtcgccacgacaccgaggatcaccagcacgacggtggagacgaggaccgtcgccaccgccgccaccgcgacaaggacggtggcagaggcggcgaggatgaccgccggcaccgtgaccatcacgataaggacgacagccgttgccaccgctaccgtgacggcggtgacgacgatcgccgccgcgggaaccgacgttccgtttccccgtccgagtccccgccaccctcggcgaagcgggaccgctcgtctagccgcccccgggagcttgtcgagcgccgcgactccaccgaccgcgagccgcggtcgccgtcgcggaagagaaaggggcacgagggcggtggcgacggggacgagcccggccgcgaagggggcaagcgggccagggcctccgtagacccgcctccacccaaggaggagaggcctaggcgggagcgccggaggtttgaggatgtcggtgcgaatgggaagaatggtgatgtgagtaagtcgagtaaggaaatctcatctcatgggcagaagggggagttatcaattaacggagattcacagaacggcaatgggcctaatgctggttctcagcaactgctcagtgccgttcctatgccatcttctgttcccattccttcaaaggtatcttcaattactaccaacaatgcaaatgagggagttagtattagatctgatgaggttaccgtaaaatctagtacagatggaagtgcaacatctgctgctggcaaaagtagtaacctatctcttgatgctttagccaaagcaaaaaaagctttgcaactgaagaaggaactgtcagaaaaactcaagaaattacctatgcttaataataagcttggtacatctgttactgctacacaagtttctaaagaagaagcaaaaacttctgtatcagctgtagatgcacaactcttttctaaaggagaagcaaaacctactgatgtttctgttctgccaactagtaccatctctggaacgccggccgtaggtggtgctatcggtattccaggtcttacgaacattcccaatcttgaatctgtgaagcgagcccaagaacttgctgctaagatggggtttcgccaagatccacaatttggtcctcttatcaacttattccctggtacatccactgaagttactgtgccacaaaggcctgcaaaggctcctgttcttcgccttgatgcccaaggtagggaaattgatgagcagggaaacgttatcagcatgacaaagccaacaaatctgagtactctgaaggtcaatataaacaagcagaagaaagaggcttttcaaataatcaagccggacttggactctcttgcaaaatcaagtgttcattttgatgaacggatgggcataaaccaaaagaagctccttcgtcttaaaaggccaggatttcagttcgttgaagagggtaaactcactaggcaggctgaattgcagaaaattaagagtcaatttggtgaagcgcaagctaaagagctcaaagtaaagcaagcccagcttgctaaggcaaagacagaagtagacatgaatccaaaccttattgaggttgctcttggtgtgagagctccaaaacaaaagcagaaggaagagatccctgaaattgagccatgggatgcaaaaattttactttctgccacatatgaggatgtctctgtggagaaacttaatttggacaagatcaccatatatgttgaacatccagaaccatatgatccacctgctgagcctgcaccaccgccgccccagccactgaagttgactaagaaggagcagaagaagttgagaacacaaaggcgtcttgctaaggaaaaagataggcaagaaatgattaggcaaggcctcttggagccacctaagcccaaggtcaaaatgagcaatcttatgaaagtgctaggctctgaagctgtccaagatcccacacggatggagatggaaataagaactgcggctgcagagcgtgagcaggctcacgttgaccgtaacattgcccgcaagctcacaccatctgagcgccgtgagaagaaagaacggaagctttttgatgatccaactaacacagtggagactatagtttgtgtttacaagataagagacctgtcccatccacagacacgcttcaaagttgatgtgaatgcacaagagaataaactgacaggtgctgcggtcattactgatagtatcagtgttgtggttgttgaaggggggaaaaagtcaatcaaaaggtataataagctcatgctaaaccgtatagattgggctgctgctgttggtggtgatgaagacgcagaagcagaagcggaagctgacaagccagtgaatagctgtgaattggtctggcagggtagtgtggcaaagcccaccttccacaggttcactgtacataactgccggagtgaatctgcagctaagaagatattcgttgatgcttctgttcctcactactgggatcttgctgtcaattcctcggagggttctccctgagcaaagcacctgttcagaaccttggtagctactgctgatctttgctggctacatgctagttatgtgtggccagtgttatagcgcttgttatggtaagacccttaccacgagtatctacatcaatggcctcatcagttgaagtactgaactcagtaatgcctggtgttagggggtgtttatccctccattttatttcatttgtccctagattgccaaatacagccatatttgtcaatttaggaactaaaatggaataaaatgtagggactaaaaattagtccctataaaccgaacacccccttaatctgttgtgaacatgctatttcagagatgttattgttggattttcctgtggcctagaaactgttatgtgagcaactgttgaattttgcacgctcagcgtgcatttggaataaaccaattgcatcaaatgactgcgtgtatttagtattgttgcggtgtgaattgcgggcagtgcctgcacatcaattacaaattcatcaacttgtgtggatgtttataatggttcatcaattttaaaagtataattctggatcaataaacttttcaagctcccttggctcgaatttttttttcaagttgtttaacgtactcactcggtcctaaaagaccatctcaagttgtttaggcacacaattacaagttcatcaacttgtgtggatgtttataatggttcatcaactttaaaagtataattctggatcaataaacttttcaagctcccttggctcg

SEQ ID NO: 127769 - DNA, 694 bp, Zea Mays
atcgcatcataaggcggcgccaggcgccagccaaggaagggatgccaccggcgggccgcattccgggggtcatcgtcctggccctcggcgtcggggcgctgggattccccgacgcgatgcgcctcgtggcggggcggccgcggaacccgctcctcgacatcgccgcctgcgcggtcgccatggtcgtggccacggcctacgctctcggcaccatgctgctggcgcgtttcgtccgcagcggtggcggtgacgcgccgcccgcggacgccttcgcccgcctgaccttcgtcgtctccctcgccgctgcgctgctcgtctccgcgtgcctcctcttcctgcccgcgcccgcgcccggcgccggcggcctgccctgccatactgtcgacgccatcgccggagaaagcgatgtggtcgtctcggccctcgtcgccgtcggcgccgtcgccgcggtcgtccccttcgccaggcgtatgctccgcctccgcaccgcccctgcttcgacttcgagccccacgtcctcgtcctgagcttcgcggtcctcctccgcctctcctccaagaacacatagggactattttgaaggtattgatttgggatttctggagcttattatcagcttgtcgtaggtactcgcatgtcacagatggggatggagtagcagaataaatgaatgaaatgatcattcaagtgctca

SEQ ID NO: 127770 - DNA, 612 bp, Zea Mays
atgaagataaatagtgaccagactgactcgaaggcgctcccacgggtgacatggcggttccctctcgacgacacctccaggttctggtccacggcggcgacgtctgcgcgggacagggcgaatgacaacaagatctgtcccaaacagacctcgccacaggcggtggcacatactgcattggcgcactcgcctgcgacagatggagcaggaatgagtcacttctgcttatgcttcaacgatgtgagaatgacggatgacaaggcaacattgcgtggatttggtataagagatggttcaacggcaatcttgacctctcgttgcgctacctcgagtctaccgcgacaagcacgacaggatgaagcaggacgaagatcacaaggagctgggcttggctggagatgctatggagaaggaagacctgtttggcgtcaaggattgtcaatcattcagaccatatatgatggcgtggtggaagctcttccatcaagcttaaccttgcagaagaaatttttaaagatattaaacagtgttgacctggcacattctgatgagttgaaactggaggtcctcgatgatcttaagagagatttctctcatatcgaggactactga

SEQ ID NO: 127771 - DNA, 711 bp, Zea Mays
atggcaggcaccggccctattccgggggtcatcgtcctggctctcggcgccggggcgctgggattccccgacgcgctgcgccagctgctcgacgccgtcgcggggcggccgcgaagcccactcctcgacatcgccgcctgcgtgctcgccatggccgtggccacggcctacgctctcggcaccatgctgctggcgcgtttcgtccgcaaggcgcccggcggactcggagccgccgcgggcgtgggcggtgacgcgccgcgcgcggacctcttcgccctgctgactctcgtcgtgtccctcggcgctgccctgctcgtctccgcgtgcctcttcctgaccgcgcccggcgccggcggcctgctctaccgtactgtcgacgtcctcgccgggaaaagcggtgtggtatcggcccttgtcgccgtcgccgcccgccgccgccatccccttcgtcaggcgtgtgctctgcgccgccccctgcttcgacccggatcctgggcttcgcggtcgtggggctgtttgtcctcgccgccttcgtcctccttcccacggctcggtggcggcctctacaaacaccgcgtcagcgtgtccgtcggcgtcatggtcatggctctcgcccgccgcttcggcaagctggcgcgggcggcgtcgctggccatcgtcatcgtctccttcgccctcatcggcctcctcacaaccgcgtgtgccaagtga

SEQ ID NO: 127772 - DNA, 1762 bp, Zea Mays
atgttacgtttctctgctaatttatcgatgttatttggagaatatgattttctcgcccgttttgagaaagctgcgcagtgtggttttcgcggcgttgaatttatgtttccttatgactacgacattgaagaattaaaacatgtgctggcgagtaataaactcgaacatacgctgcacaatttaccggcgggtgactgggcggcgggggagcgcggtattgcctgtattcctggccgtgaagaagagtttcgggatggcgtagcagcagcgattcgttatgcccgtgcgctgggtaataaaaaaattaactgtctggtcggtaaaacgccggctggtttcagcagtgaacagattcacgcaacgcttgtagaaaacctgcgttatgccgcgaatatgctgatgaagagatattttattactgattgaacctattaaccattttgatattcctggtttccatctcaccggaactcggcaggcgctgaaattgattgatgatgttggttgctgcaatttgaaaattcagtatgacatttatcatatgcagcggatggaaggtgaattaaccaacaccatgactcagtgggctgataaaattggtcacctgcaaattgccgataatccgcatcgcggcgaaccgggaaccggagaaattaattatgattatctctttaaggtaatcgaaaattctgactacaacggttgggttgggtgtgaatataaaccccaaaccaccacggaagccggtttacgctggatggatccgtaccgttaaaacgtaacgctattcagacaatgcttttttaggccgctaagttggcaggggatcgtgttgtctgaattcaggaaaagcgaaatttaaaagaggttaattatgaaactgggatttattggcttaggcattatgggtacaccgatggccattaatctggcgcgtgccggtcatcaattacatgtcacgaccattggaccggttgctgatgaattactgtcactgggtgccgtcagtgttgaaactgctcgccaggtaacggaagcatcggacatcatttttattatggtgccggacacacctcaggttgaagaagttctgttcggtgaaaatggttgtaccaaagcctcgctgaagggcaaaaccattgttgatatgagctccatttccccgattgaaactaagcgtttcgctcgtcaggtgaatgaactgggcggcgattatctcgatgcgccagtctccggcggtgaaatcggtgcgcgtgaagggacgttgtcgattatggttggcggtgatgaagcggtatttgaacgtgttaaaccgctgtttgaactgctcggtaaaaatatcaccctcgtgggcggtaacggcgatggtcaaacctgcaaagtggcaaatcagattatcgtggcgctcaatattgaagcggtttctgaagccctgctatttgcttcaaaagccggtgcggacccggtacgtgtgcgccaggcgctgatgggcggctttgcttcctcacgtattctggaagttcatggcgagcgtatgattaaacgcacctttaatccgggcttcaaaatcgctctgcaccagaaagatctcaacctggcactgcaaagtgcgaaagcacttgcgctgaacctgccaaacactgcgacctgccaggagttatttaatacctgtgcggcaaacggtggcagccagttggatcactctgcgttagtgcaggcgctggaattaatggctaaccataaactggcctgatacccgcaa

SEQ ID NO: 127773 - DNA, 1279 bp, Zea Mays
atttcttcttcgtggccgagccgtgtgcccacttcctgagcacgccgtgaggctccctgctcctccctcaagctcgcctgaccgcacaacccccatggagctcccttcagttctcctcaagcacgccgcgcctggctcgccgacattcgggccgcggcttcctcctccaactccggtcggccaagagcccagctgccccttggttctttacctccacctcccagcagcgccctgtcgaagcccttctatggcgtcgttctttcctgtgcttgagctccgtcctcctcagccatggtgctctgcgcgccgagctcggcctctgttcctttgcgccctgctcctgctcctcgagctcgccctgcgctcggtttcttctccatggattccccagtcgcgcctttcagctcgctccctctctgttcgcggtgtccagctcagatcccgcctgctcaactgcgtcgctgcccgactcgagttcgtcctggtggccgttgattgggagcagaatcggtagcgcccctacacctcccaatgccggtgatggctgcgacgagcgtcctttccttttccccatcctcgccgtagccctctgctcgattcgctagagctcatccgtgctccccttccatggctgctgtcttcaaggacatcttcctttggcctggagtcttgctgcgctgctagcatctccaaatcccttgcgagctcgctagacctctgcctcaccgtcgtccatggatgtcgtgccgcaccatcagcacttcctgtcgcgagcttgatccctgttgtcatcgcttcaccctgctcgctggccgcgcatcccagcagctccctgctcgtggtcgcaagcgctcgaggtggaaggacggaattagatgaagaagaaagcgaggttcagagtaatgctcacttggtgctcgacaaaaagcccaaacgaatcgttacgccatcgtcttcgtcgaatggaaatcgtcgtgccgacatgtcgacgtcgtcgttcttctcctctccgggtcttcaacaacatcgaatatccctctttggtgcttgttgtcgatccgtcgcctcgcctcgatactggctcctacgtgacatctccgaattgtgatcgcgcgaacaaaagaatccccaagaaagatgtccaaagatttgatggtggtgtgcgtgaagttcgtgtggcccctgccaagagctcgacaaattatttgaatcggaaaatcattacccatctcgcggattcgaatcatctgttggaatagtaagttgattcgttattcca

SEQ ID NO: 127774 - DNA, 1277 bp, Zea Mays
atttcttcttcgtggccgagccgtgtgcccacttcctgagcacaccatgaggctccctgctcctccctgaagcttgcctgaccgcgcgaccccatggagctcccttcagttctcctcaagcacgccgcgcctggctcaccggcgttcgggccgcggcttcctcctccaactccggtcggccaagagcccagctgccccttgcttctctccctccatctcccagcagcgccctgtcgaagcccttccatggcgccgttctttcctgtgcttgagctccgtcctccccagccatggtgctctgcgcgccgagctcggcctctgttcctctgcgccctgctcctgctcctcgagctcgccctgcgctcgtcttcttctccatggattccccagccgcacccttcagctcgctccctctctgttcgcggcgcccagctcagatcccgcctgctccactgcgtcgccgcccgactcgagttcgtcctggtggccgttgattgggagcagactcggtcgcgcccctacacctcccatcgccggtcatggctgccgcgagcgtcctttccttttccccatcctcgccgtggccctctgctcgattcgctagagctcatctgtgctccccttccatggctgctgtcttcaaggacatcttcctttggcctggagtcttgctgcgctgctggcatctccaaatcccttgcgagctcgccggacctctgcctcaccgtcgtccattgatgccgtgccgtgccatcatcgcttcctgttgcgagctcgatcccattgtcatcgcttcaccgtgctcgctggccgcacattccagcagctctctgctcgtggttgcaagcgctcgaggtggaaggatgaaattagatgaagaagaaagcgaggttcagagtaatgctcacttggtgctcgacaaaaagcccaaatgaatcgtcatgccattgtcttcgttgaatggaaatcgtcgtgccgacacgtcgacgtcgtcgttcgtctcctcttcgggtcttcaacaacatcgaatatccgtctttggtgcttgttgtcgatccgtcgcctcgtctcgatactggctcctacgtgacatctcccaattgtgatcgagcggacaaaagaatccccaagaaagatgtctaaagatttgattgtggtgtgcgtgaagttcgtgtggcccctgccaagcgctcgacaaattatttgaatcggaaaatcattaccgatcttgcggattcgagtcatctgttggaatggtaagttgattcgttattcta

SEQ ID NO: 127775 - DNA, 1794 bp, Zea Mays
ccagtcccccacacccaggccatcataacacgaacacgatagcaaatcaggcgccgccgccgcagctactggccaacaggcaacagcgatgcttgcccggcgagacgcggaggatagtggcagcggcacgaaggcagcgcacttcgtgttcgtcccgctgcgagagcagggccacctgatccctgccgtggacacggccctgttgctcgccacccacggtgcgctctgcacaatcgtcggggacccgtacacggctgcgctggtgcgccagaccatcgaggccgcccaggcggccggactggcggtcaggcttgctgagttcccgctcgactacgccgagtccggcctgccggaaggggcggaccgctgagacagcgttccagcggtgcacatgtcgagctactaccgcggcatggcgctcctctgcgcgccaatcgagagctacctccgcgcgaacgcgccgtacccgacgtgcgtggtgtcggacttcgtccacccgtggaccaaggagctcgccgccaacctcggagtcccgcggctcaccttcttcagcatgtgcgccttcggcctgctgtgccagcgcaacctggagaggttcaacgcgtacgacggcgtccaaggctccgacgagccggtggtcgtgccggggctggagaagaggttcgtggtgaccagggcgcaggccccgggcgggtccttcttccgcgggatcccagtcccgtggtgggaggagttcgcggactacgtcgagcgcgcgcaggccgaggccgacggcatcatcatcaacaccttcttggagctggaggcggagtacgtcgccggcttcgcggcggcccgggacttgaaggtctggaccgtcgggccggtctcgatgtaccacatgagccgcacgacgctggcgtcaacgctggcgtcgagggggctgagggcctccgtcatcgaccccgacgagtgccaccagtggctcgacggcaaggaacccgggtccgtggtgtacgtctgcttcgggagcatctcgcaggcggaggcgaagcaggtggtggagctcggcctcggactggaagcgtcggggcacccgttcatctgggcggtgaagaacgcgggcgagtacgacgagacggtgcgcgagttcctgcgcgacctggaggcgcgcgtcgcggggcgtggcctgctcctccgggggtgggcgccgcagctgctgatcctgtcccacgacgcggtgggcggcttcgtgacgcactgcggctggaactcgacgctggaggccatcaccgccggtctgccggtggtcacgtggccgcacttcgtggaccagttcctcaacgagaagatggccgtggaggtgctgggcatcggcgtcagcgtcggtgtgaaggagccgctgacgtaccagatcacgaagaaggagatcctggtgggaagggacgtggtggaggcggccgtccggagcgtgatgggcggcagcgaggacgccgaggacaggaggcggcgggcgcgcgcgctggcgtcaaaggcgcagctggccacgcagatcggcgggtcgtctcacggcaaccttcaggatctggtgaagcgtttcgaggcgtagcgccaacgtgccgtgacgtgaccgattgccaataaatgccaagtctctgctccggcgtttctacgaacttctcccatatttgtattgatgcacagaatccaagcctcctgtttgcgctacgcaagcggtcgggtgtcacagcccggcccgtagtgtccaggcattgtatgatggagcaattcctatgccatcgaaaattattttta

SEQ ID NO: 127776 - DNA, 1557 bp, Zea Mays
atgcccctgccccctgagccccgagaaggggacgcggtagttgaggccgtagacggaggaggaggcccagacgacggccggctacgggtcggcgtccttgcaggccttgaggagggagacgaggccgacgacgttggagtggacgtacgccgccgggttctccatggcgtagcgcacgccggcctgcgccgcgaggtggatcacgtgggtgaagggcacgacgtcgaagagcttggccaggaggcgggtcgtcgtttgatgtcgccctccacgacgaacacgcccgtggctgtcctgcagcccgccgccgccgagctcgtccgcgatgagcaccgccagggtgccgcccaagctgtgcccagtgaccgtgacgcccactcctcgccctacttgtcgagaagccgccgtgaccaccgccaaggcgcatcctattcccccaccgccggcggcgccgccggagtcgccgactcctcttcggcacggacttcttctcctgcgagcctcgtccgccaggtggcttcgtctggagtggacccctcaccggccctccgcgagctggcagtctatgtctatctctccgacgacgacgtcaacgacttcaaaaagaacacgcttgtgggcgccggccgcgtcgccgagaccgtcgcgtcagttctttggagaagagccgaggaaaccggcgtcgaaggcatggaggcggccacgagagtgctagccttgatcttggcctcggatggcatcgacgactcaaacaagaagcgggtggccactggcctcgtcgcagacgcggcggcctcgaccgcgtcgctggcgcgtgtgaagcgcggcgggagcggcctggaggcgaggatcgacgcggccaggctggcagagctgttgctcgtcaatgcggctggcgaggcgaaggcggcggtgaccaaatcgtccgagctgctggccgagctggtacgcctcgtgggcaccgtcgacgatacgggcgccctggataggaacgccgtggacaccagcctttcctgcctggccgccatctgcgggtcgtgtcgcgcgcggcgagatggtgcgccatggcgcggtcccggctgctgtgcgtgctctgcgtgcctcgacggagtccggcgcgtccgcgaaggcgctccgggtcctcgagtccaccgtgggttgcgccgagggccgtgccacgctgtgcgccaacgcggaggacgccatccctgcggtggtgggcaagatgatgaaggctgggcgcgacgacgcggaggccgccgtggccgtgctctgagcggtctgccaccggtaccaggaccgccgggcagcggacgcggctgcggcggccgagggcgggctgacgaggctcctcctcctgatgcagagcgggtgctcgccagcggcgagacagatggcgctggagctgctgaagatatacagggtgaacaccaagagctgcctcaccggctacgactccaagaccacccacatcatgccgttctgaggaaccggagcggacgagaatggcttgccgcgatcctgggtggctgttttgacatgatgaaatggatttaa

SEQ ID NO: 127777 - DNA, 1003 bp, Zea Mays
aggcgtgaacgtgattgatgattaaaaacagaggatgcagttcaacgtaaaatgctgagcatctacaaggccatttctgttcctagctggcgctactgacgagcgcgtccttgtaagacccgggcggcggcggcggtatcgcagggcccctccggccgccgtgtccgtgctccaggatgagcggcaccttgccctcccgctccaaggccagccgctcctgcgtgccgccgcgcagcttctccaggccccggccgcccatctgctgcgtcttgaacaccttgagcaggttcagcaggccgccggcaaggaagaggaggctcccgaacaggcagaaccacgcccagctcctccccacgaagccggagtggcggctgcggcggtcgtgccggttgacgatgccggcgatgaggaagagggtgctccccagcagcagcgggatctgcacgctcttctgcaggagctggacgtgcccgctcgcacgctcgtagaactggcagatgttttgcacagaccccaggcaccacagtgccggcccggctatgagcaggttcaggccgtgcatggctaggctgtgccggtagcctctctccatctgaatcacaaagaagacgacagcgacgagcatgagcacggtgccgacgatctgcacggcggggacgccgagctcgacgagccccatctgcgcgtcaagcccgaccaccatcccgaggcggtaatcgacgccagcggcgtgcgcgaggaggtcgtgcgtgttgacggccagcaagccggcgagcccgatcgcggcgaccacgagccccgggctgctgggcccgccccacggcaggagctgcgcgaggaacccgccgaccaggaggaccgccgcgaagatgtacaccccggcgttgatgtactcccaccggttgcgcaacgccgtgccggaccccgcgccggcgccgaggctgtatgcgcggcactcgcgcgccgtcgccagcttcaccatggtggctgtggcctgaccctg

SEQ ID NO: 127778 - DNA, 2286 bp, Zea Mays
atctcagtccggagaaatttccagcctctcgcgcacacggccgccggctctgatctctttatccacgtggccccctcccagtgggcacctcaccaccacctgtcgacctcctcatccccagcggtgcggtgccccccggcccctccccagtgccactgtctcgtcggctcgtcgctccgtagaccccgcgcctccgcctccccgccactcgccggaggctgccgccatcgttatgccatggccgtcatcctctcctccgcggcgccaacgatactgactcgtcccacgcgccctcggaggcagccgaggagcggcctccgcgggggcctcgcgcgcctctcagctgcgctcggcctcgcgcacgcgggcgccggcgccggcgccgcactcgccgcgccgctctcctacgaggagatgctgcgcctctcgtccgactccggcggtgatgttggcgggttcgcgctcccggagctcggcctcgacgggctcgttgacttcgtcaacgataaccctctcgtcgtcgcggcaggcgtcgcggccatcgcagtgccgcttctccttgcgcagcttctcggcggaggcggcagctccaagccctactccgtcctgtccgccaaggcggcctaccagcggctgctcgaggagcccgacgcgcagctcgtcgacatcaggccgctcaaggatgcacgagaggccggcacgcctgatctcaaggaggctaagaagaaggctgctgccgtaccttacaacggggaggacaaaaacggattcttgaaaaagttgacactaaagttcaaggacccggagaacaccacgctgatcatccttgacaaatttgatgggaactccgaactagttgctgagcttgtgacagccaatggttacaaagctgcttttgcagtgaaggatggtgcagaaggaagccgaggatggaagagcagtaaccttccctggaaggctccgccaaaaggattcagctttgacttgggcgaattatttggggatggttcagatggtttgcctgtgacaattggtctcgctgcagctactggtttgggagtacttgcctacacagagattgaaactttgctacagtttttggggtcagctgctgttgttcagctagtggtaaccaaactcttgtatgccgaggatcgacaaaagacacttaaacagatcgatgagttctttaacaagaaggttgctccgaaggagcttattgacgaaataaaggaaatcgggcaggctctactacctttacctggcgatgctaaaagccaaccagcactagcaacagcgactcaagttgctgccacacaaacagctgcaccagcagaggacgctaccgcagaagccaccacggaatcagatcctgcaacgccaacacctctttcaccttatacaaatgtcagcgtaaacattatatttataaccactgcacaagtgagcctgaatgcccatgtcacactcattactctgcaattggaattccatgcagtacccagatctcaagccgccatcaacccctacgccaccgtcagtggagtctgaagtcgagacgaaggctagcagcaccgtgactgaaggaccagcagtggtcaattctgcacctatagcagacgctgccacgggatcatctcctgccactactaggcccagacctcagtcaccataccctaattatccagatttcaagccaccatcctcgccttcaccgtcagcaccttaatttggcaagagtacaagaaaccgggtctagaggatattaaagaagttgagttgttcatatggagccggcatctcactagaggtgtatgttgtactatgagcgtgacagtgtggctaagtcactgtggcgagttttctgcagcagtaaatatatgatgtaatgttcattagttatcaatgtgctatgattttctttttgttgtcttattttcgatacatgtaaatgtcgaataactagccgtgagaattgagagttcaagcctatagagcttgatatgtttgatcaaagtaaatgtatcttcttaaaaacatgaaagtcaggtgctttctttttttatcctctataaaaagcacaaagtgatggtgatggttttctgtaaggatcttctatgcagtagtttaagtgtgcatttactgtgtgctagatattataatgtacagatagcctttcttttttagtgaagttagaggagtatgtcattaggtgcttcataaaatcgtggagctagaattgtgaatgtacagaagatatttacataaatcattttatttttttta

SEQ ID NO: 127779 - DNA, 2195 bp, Zea Mays
atctcagtccggagaaatttccagcctctcgcgcacacggccgccggctctgatctctttatccacgtggccccctcccagtgggcacctcaccaccacctgtcgacctcctcatccccagcggtgcggtgccccccggcccctccccagtgccactgtctcgtcggctcgtcgctccgtagaccccgcgcctccgcctccccgccactcgccggaggctgccgccatcgttatgccatggccgtcatcctctcctccgcggcgccaacgatactgactcgtcccacgcgccctcggaggcagccgaggagcggcctccgcgggggcctcgcgcgcctctcagctgcgctcggcctcgcgcacgcgggcgccggcgccggcgccgcactcgccgcgccgctctcctacgaggagatgctgcgcctctcgtccgactccggcggtgatgttggcgggttcgcgctcccggagctcggcctcgacgggctcgttgacttcgtcaacgataaccctctcgtcgtcgcggcaggcgtcgcggccatcgcagtgccgcttctccttgcgcagcttctcggcggaggcggcagctccaagccctactccgtcctgtccgccaaggcggcctaccagcggctgctcgaggagcccgacgcgcagctcgtcgacatcaggccgctcaaggatgcacgagaggccggcacgcctgatctcaaggaggctaagaagaaggctgctgccgtaccttacaacggggaggacaaaaacggattcttgaaaaagttgacactaaagttcaaggacccggagaacaccacgctgatcatccttgacaaatttgatgggaactccgaactagttgctgagcttgtgacagccaatggttacaaagctgcttttgcagtgaaggatggtgcagaaggaagccgaggatggaagagcagtaaccttccctggaaggctccgccaaaaggattcagctttgacttgggcgaattatttggggatggttcagatggtttgcctgtgacaattggtctcgctgcagctactggtttgggagtacttgcctacacagagattgaaactttgctacagtttttggggtcagctgctgttgttcagctagtggtaaccaaactcttgtatgccgaggatcgacaaaagacacttaaacagatcgatgagttctttaacaagaaggttgctccgaaggagcttattgacgaaataaaggaaatcgggcaggctctactacctttacctggcgatgctaaaagccaaccagcactagcaacagcgactcaagttgctgccacacaaacagctgcaccagcagaggacgctaccgcagaagccaccacggaatcagatcctgcaacgccaacacctctttcaccttatacaaattacccagatctcaagccgccatcaacccctacgccaccgtcagtggagtctgaagtcgagacgaaggctagcagcaccgtgactgaaggaccagcagtggtcaattctgcacctatagcagacgctgccacgggatcatctcctgccactactaggcccagacctcagtcaccataccctaattatccagatttcaagccaccatcctcgccttcaccgtcagcaccttaatttggcaagagtacaagaaaccgggtctagaggatattaaagaagttgagttgttcatatggagccggcatctcactagaggtgtatgttgtactatgagcgtgacagtgtggctaagtcactgtggcgagttttctgcagcagtaaatatatgatgtaatgttcattagttatcaatgtgctatgattttctttttgttgtcttattttcgatacatgtaaatgtcgaataactagccgtgagaattgagagttcaagcctatagagcttgatatgtttgatcaaagtaaatgtatcttcttaaaaacatgaaagtcaggtgctttctttttttatcctctataaaaagcacaaagtgatggtgatggttttctgtaaggatcttctatgcagtagtttaagtgtgcatttactgtgtgctagatattataatgtacagatagcctttcttttttagtgaagttagaggagtatgtcattaggtgcttcataaaatcgtggagctagaattgtgaatgtacagaagatatttacataaatcattttatttttttta

SEQ ID NO: 127780 - DNA, 804 bp, Zea Mays
atggcgagtcacggccacaataacaaaaaatgtgatttcccccaacccccaggaattgttaaagcacggtttggaagcacaagaaattgcaatcacattccaaggaggaaatcaaggctcaccccgatgctctcaaggtcgttgacgatagatccagagtcgctcgacgtcgagacacttggagtagagaaggccacacaggggtcgcgggcccatcctgggcaaaaccaagagcacgagttcttcacgcctagcggcatgatgggcatatcgtcctatgcagcaacgggcatggactcgagcttgcagtcgagtggcggtagcagcgtgatgtcttccacgagagacctcaccatgaggcgcaacaacgtctcctccaacccggccgttcgggggcctcgcagacgaggtcccacacggtgtgcacggcatcaagttgtgttcactgctgaagagctctctcgtgcccctactgagataattggcaggagctgccatgggacatcctacaaggctacacatgacaatgggtacatgctgacagtgaagtggctgaaggagggctttgctaagagcaagaaagaattttcccgtgaaataaagaagcttggtagtgtaaggcaccccaatcttgtccccttgcgtggctactactgggcccccaaagagcaagagaggatcatgatatcagactatgcagatgccacatctctgtctacctacttgtctgaatttgatgagcagaatctcccgcccctatcagctggatagcggctgaacattgcgattgatattgcccgctgt

SEQ ID NO: 127781 - DNA, 1398 bp, Zea Mays
gtcatgactacgaccaagaaccataagcagcagcagcagcagcagcatgtgttgcccatggcggcggctggcatggccgccccgccctgcaccgtcaagaccaagctcctgctctgcgccgccttcggcttcgcgctcggcgtcgtcgccaccgcgtgcctcatgacctcttcctcctacgcgccgtcgtccgtcgccgccgcgctccgactccggggaggaggagccctcggcctcttcttaccgccatcctccgccaccagggacgccgatcaggaccggcgaccaccgccagcgcgtccgcagcccaaacaaggcgcggtctccgtgccggcagcgatcccccggtctcggtcgagcccgccgggcgcgggcgcgggcacgggcattactagcgctgctgccccgccgccacctggtgttggcgttggcgagggaccagcggcgccttggcctgctagtgccgcctctcgcggcaatgctagcaccatcagtgacgacggcgacggcgacggcgacgaggagttgatggcccgggcggcgtcggcgccgagggaggtgccggccggtacgaccccgagggtggcgttcctgttcctcacgcgctgggacctgcccatggagccgctgtgggacatgttctttcgcggccaccgcagcctctacaacgtctacgtgcactccgacccggccttcaacggctccgagccgccggagacctccgccttctaccgccggagaatccccagcaaggacgtgaaatggggcgagatcagcatgatggaggcggagcgtcggctcctggcgcacgcgctgctggacgaccacgccaacgcgcgcttcgtcctgctgtcggagacgcacgtcccactgttcgacttccccacggtctactcctacctcgtcaactccaccaagctgtacctcgagtcctacgaccagccgggccccacgggccgcggccgctacagccgccgcatgagccccgtcgtggccgccggacagtggcgcaagggctcccagtggttcgacctagaccggggtctcgccgtcgacgtcgtcgccgaccgcgtctacttcccgctcttccaccggttctgccggcgcagctgctacgccgacgagcactacctgcccacgctcctcaacatccggcggccggcggcgggggccaaccggagcctgacgtgggtcgactggtcccacggtggtccgcaccccgcacggttcacgaggatggaggtcaccgtcgacttcctccggtggctcaggggcggcagcacgtgcacgtacaacggcaggaccaccaccgtctgcttccttttcgccaggaagttcctgcctaactcactcaccaggttcttgagattcgcgcccaaggtgatgggtttcggctaa

SEQ ID NO: 127782 - DNA, 197 bp, Zea Mays
ctaattacagagaaaccctcaagtccacacattgaccatgggaatgaagatgttcagggcctcacagttcttttttttcctttcatttttcaatactacaatagcacatcatattctgcctgtccttctccttgtgcgacgtacaacgccggagaaaaggacaacaaacacaatcgcaaggaggaaacttaactttg

SEQ ID NO: 127783 - DNA, 717 bp, Zea Mays
agaatattgctccccttcgttcacctcgcgtacgcgacaactaggctgaccgccgccgccctacgctcaactgcccacctgccctggtcttcgactcttcgtcgtgcgctttgccggcggcgagcacccatcacaccaggtatgtccgccaggtatgtccgcccctgctccttccttcatggtctgcaaaattgagcacctgaaccctaacttaatatatctgtattcggatctgatatagtgtacttataaggatgtgttttgtttggcttttgctcgctaaaacacaaaagtcaaaccaaaggtgaaccaggaagcggctttttcgaaaagccggctttcccacattgcaaaaattaaaatcatcattagacaactgcagaagctcgtggtaaactactgcgactggggagggagcagcaggggcatcaggtatgatgatatagtttggttcctctcttcggtagtggtaccattagaccatagtttttcggtatgatttccttggttctgttgcgaaaagccgaaaattagttgagatcctgctggtacatgttcttcaatagtcggatggttggtcgactcttcccagccatggatttgtcgttgcagatgagtgcagtgtatgtcgttacaatttggaagttggaactgaagacaactatgctattgcctctagcttctctagggcattcctgcatggaaatttcatttcta

SEQ ID NO: 127784 - DNA, 648 bp, Zea Mays
cgcgtacgcgacaactaggctgaccgccgccgccctacgctcaactgcccacctgccctggtcttcgactcttcgtcgtgcgctttgccggcggcgagcacccatcacaccaggtatgtccgccaggtatgtccgcccctgctccttccttcatggtctgcaaaattgagcacctgaaccctaacttaatatatctgtattcggatctgatatagtgtacttataaggatgtgttttgtttggcttttgctcgctaaaacacaaaagtcaaaccaaaggtgaaccaggaagcggctttttcgaaaagccggctttcccacattgcaaaaattaaaatcatcattagacaactgcagaagctcgtggtaaactactgcgactggggagggagcagcaggggcatcaggtacgctaattatcgagatgcgatggccagggtctaggttgacccctagtggtgcaaaggatggcctacttcgagaggcgatgtcggcggaccaatctagaagattgatgatctctacataaacacaagattacattgattcaactctgatctggtgtatgaaatattgattgatactcatttatattatttttttattatattattattaaatatatatgtctgtgtatttctctttcaaa

SEQ ID NO: 127785 - DNA, 586 bp, Zea Mays
ccaaaatcagcaaggattaaaatgattacttgcagtttcttttgtaaggatacctatatttggttagttcttgattggttgattggtagtcttgtggttttaagtgttacgtaagtaccttgtaattttgtaataaactttaggttataaatgcctgtgtttcataaaagttgagtatgattaactccaagtgtgtgattgttatggggtcaaagttagctagtgtttgctcataggaatagtgatgctttgcctgaagtgttttgtcctcttcagttagtttatctatttggtgttatttatgtttgttctcattcatatgcatgatgcatatcatataggtacgctaattatcgagatgcgatggccagggtctaggttgacccctagtggtgcaaaggatggcctacttcgagaggcgatgtcggcggaccaatctagaagattgatgatctctacataaacacaagattacattgattcaactctgatctggtgtatgaaatattgattgatactcatttatattatttttttattatattattattaaatatatatgtctgtgtatttctctttcaaatta

SEQ ID NO: 127786 - DNA, 1477 bp, Zea Mays
ctcccatgaccgccgcgtcttgccgtggagtttctcacgcgcttcttccctgctgcgctcctctgctcggtcgtcccaccccagcgcccttgcagccgagctcccacctcccatggttgcctgctccactgcgccgtcgcccagctactgaccatcgcgcgcgcgccggctaggagctcgcaggcgacgatggtcgcgctccccgaccttgccttggcttcctgctgcagttcgtcagcacctccttgcgccctgtccagcgtcctgctcggttcggttcctttccggcaaccagctgaagctccgccccatgacgtttggatccggccaccgtgttcaggcaactggccgttcgtcttccactttctcttccttcgttgacctgcccgcttgctttttctctgcgttcctgtgagcgtacgtctccctgtgtgcttaccgtggaagctggccgcgccccttctcggcctcttctctccatggcgctccgccgagtggctcccctgcgcgtctctctctgctcgctcacgcacagctcacggagcttttcctcgtcggccccagctcagtcgagtctccctggtattccagctcgtcgtcgcgtcattcgtcgtcgacctcgctaaatacgttgtcgcttggtcctgtgtcgttaggctaatcaaccatgttcgctgccgcgcgcttgtctctaatactgctcgcgtggtatttggatctcgtcgattagccccaccatccttgttttcctctggtcacgataaaatcctgtcccaccaggtcatcgggagctgttcccagctcactatggagtttgctgggctcgccatattttttaaatgtcgtcaaatcatcggagttgctcaactcaccaatcgtattttggccatccctatccgaacttaccagctcgccgactgaccgtcgtgttccttgaaatcccttgtcggtcgacctcgtgacttagttcgtcgtgtcgtgtgtgcagctctatatatgccactctcctatatcgtcgtcaaagctgtcatcccctgttcgacccccacctcaccagctcactccaaacacgatcttgtcgtcgtttcgtgtgtcgtcaagaaatcctaagcgtcgggtgaagacgaagttaacagcgcgatatttccccaagcgctcgacaagttggttggatcggaaaatcgctaccgatctcgcggattcgtgtcagctgtggaaacggtacgttaattagtcgcgtgatgcggaagatgactcaagtcgaccccaagcatgggctactccgcatggtgatgctgatgaacgaacctgcctgatcaagtgctaggacaaggatgatcgtcaagtggacatcgtctaacaaacactaacctagtgttacccaggcaagccccgaatattttcatttggagcaatagtgggatcttactgcaaagttccctgtgatgctctttcatcctaaaggaacagacacaat

SEQ ID NO: 127787 - DNA, 1469 bp, Zea Mays
cacccatgaccgccgcgtcttgccgtggagtttctcacgcgcttcttccctgctgcgctcctctgctcggtcgtcccaccctagcgcccttgcagccgagctcccacctcccatggttgcctgctccactgcgccgtcgcccagctaccgaccatcacgcgcgcgcctgctaggagctcgcaggcgacgatggtcgcgctccccgaccttgccttggcttcctactgcagttcgtcagcacctccttgcgccctgtccagcgtcctgctcggttcggttcctttccggcaaccagctgaagctccgccccatgacgtttggatccggccaccgtgttcaggcagctggccgttcgtcttccactttctcttccttcgttgacctgcccgcttgctttttctctgcgttcctgtgagcgtacgtctccctgtgtgcttaccgtggaagctggccgcgccccttctcggcctcttctctccatggcgctccgccgagtggctcccctgcgcgtctctttctgctcgctcgcgcacagctcacggagcttttcctcgtcggccccagctcagtcgggtctccctggtattccagctcgtcgtcgcgtcattcgtcgtcgacctcgctaaatacgttgtcgcttgatcctgtgtcgttaggctaatcaaccatgttcgctgccgcgcgcgcttgtctctaatactgctcgcgtggtatttggatctcgtcgattagccccaccatccttgttttcctctggtcacgataaaatcctgtcccaccaggtcatcgggcgctgttcccagctcactatggagtttgctgggctcgccatatttttaaatgtcgtcaaatcatcggagttgctcaactcaccaatcgtattttggccgtccctatccgaacttaccagctcgccgactgagcatcgtgttccttgaaatcccttgtcggtcgaccttgtgacttagttcgtcgtgtcgtgtgtgcagctctatatatgccactctcctatatcgtcgtcaaagctgtcatcccctgttcaacccccacctcaccagctcactccaaacacgatcttgtcgtcgtttcgtgtgtcgtcaagaaatcccaagcgtcgggtgaagacgaagttaacagcgcgatatttccccaagcgctcgacaagttggttggatcggaaaatcgctaccgatctcgcggattcgtgtcaggtgtggaaacggtacgttaattagtcgcgtgatgcggaagatgactcaagtcgaccccaagcatgggctactccgcatggtgatgctgatgaacgaacctgcctgatcaagtgctaggacaaggatgatcgtcaagtggacatcgtctaacaaacactaacctagtgttacccaggcaagccccgaatattttcatttggagcaatagtgggatcttactgcaaagttccctgtgatgctctttcatcctaaaggaac

SEQ ID NO: 127788 - DNA, 108 bp, Zea Mays
gtcgtattatcgttctgggaaacgtagagttgttgttgatggcattggctatttgcagtagaaatgggggaagcaagcagttcttggattggcctaacccccagaggg

SEQ ID NO: 127789 - DNA, 193 bp, Zea Mays
tcggactcgaaaccttcaaagtcgttgctacgtgctctgtggtgcgtctcagagccctattccatgtgggggttggaagacatttatttgatcccagagggaggaataattagacctccctctgggttgaggatacgtagcagtggaagatgccggtacattatatgtctactcacttcctaagcaaaaatca

SEQ ID NO: 127790 - DNA, 118 bp, Zea Mays
tcttctttgttggaaaagctttgatagaaacagcaggcttctaccaatggaaaataggtcgagaccacgaacactagacactaggagattgcttttgccgtcggcatatgcggaagta

SEQ ID NO: 127791 - DNA, 478 bp, Zea Mays
tactgctcactctgtcagtccactaacaccaaacatattcacgtcatgaaagaatagattccagataaaaagtatactagcacatattcacgtcattaaagattagattccagattttgggtataaagtatactctcacagattcatccttgagtgcgtgaagatagggcaaggtaatgcggagaatgccacgactcttatatgtttcaaatcgggatggcatgtgtcatttcttataagggtcaggggcgtagcgagagagagagagagatagctaacctagccattgacggggagagggaggcaactgaagcttttagagtcgtgtttaggtcttctttttgcttgccagaatccatcaacaggggctccatagggaggtatttattccataaagttatcaagttatagtggaattaccaaccggactggctttctccaagagaggattttgtcttttccgcttcctcgcgcaaag

SEQ ID NO: 127792 - DNA, 708 bp, Zea Mays
aagctagcgtagcgccagccgtcgaagtgaataaattcgaaagaacgaagaaataaggaaatgagacgactctttcttgaacaatttcataagcagatcttcccctccacaccaatcacgagtttttttattcctctcgtatatcgtcgtcacacccttaatgataggttttgaaaaagatttttcatgtcattcccatttaggttcgattcggatctctctgttgtttccctttcctcctgaaccttttcctcgaaatgataaagaatctggtacactcgaattgtattatttaagtgcttattgcttgccaaaaatcctacttctacaattggtaggtcaccgggttattcaaataagtcgtgttttctgtgcttttcccatgttacaacttccgtaccaattcgatcgatccgggatagatcggttaaacattctattagggagcccggtcttgactcttctgtgtggtattcattctcgttcggctcttggagtcacatccagcagtggttggaacagctcgcaaaatccaaccgcttcacctactttattgcccccaaccgtttcccgtacctctatagaaacagaagggtttcatgttctttcatcgattgggtattcctctccttttgtatctctttatccaatttcggtcttgattagttcacaagattgaatggccaagtcatggaaaagccgttattc

SEQ ID NO: 127793 - DNA, 1553 bp, Zea Mays
tatatgtaacttcattcttgcaacatcacaagcacacaggctttcacacccatcttgcattggctctccggctgctgttcttgcttcctcgctgcacacaaccaagcaaagtcacttttccaaggtaaagaagcatgcatccgagctgctctccactggcagtgcctccgggcttccggttccacccgacagacgaggagctcctctactactacctgaggaagaaggttgcctatgagcccatagatcttgatgtcataagggaggtggacctcaacaagcttgaaccatgggacctcaaagatcggtgcaggattgggacggcggagcctcaggacgagtggtatttcttcagccacaaggacaggaagtaccctacggggacgcgaaccaaccgggcgacgacggctgggttctggaaggcgaccggacgggacaaggccatcttcctcggcaacgctgggaggaggatcggcctgaggaagacgctggtgttttacactggcagggcaccccatggcaagaagacggactggatcatgcacgagtaccgcctcaacgatgacaacgtcgaggtgccgccgattacggtaagcacgcagcgcacaactagctagtagctgtctagcaggagtaagcaattcttttgtgtagagaaattgtgtgttcatatggaaattggaaaagggtcaatggcggttcttgaaacatgctcgcatatatgcgatcgatgcaggaggatggatgggtggtgtgtagggttttcaagaaaaagagcatccagaggggattcgaccagctgggcacagcgtcggctggcgacgacgacgaactccaatccttccactccccgggcggcgtgatgaccactctggcggagcagaagcacggcctcctccaccagctcacgcacggcggagtcgtcgttcccgccttcgacccctgcatgaaccttccacacctcacgagtgcggaagggcagcttgccgccacggcagcatttacatccggcacatcggctgtggccatgaacctgctcgacatgggtcgttgttctcgccacaaccacaaccacaacatgctgaagatgacaacaacaccatgtggctctgccagtgacatgccgctgaacagcggtgagcgcttcggtgccgccgccgattggtcgatcctcgacaagctgctggcgtcacaccagaatcttgaccaactcttccattgcaagttcgggggaacaaccttcgcggtgcctcaccattatcagcaggagatgcagcagcagcacatggaaatcagcgcgtcttcactgcataggctgcctctacattagcttattggacgtcaaaatgatgatatcataagatctccctcaagttttccatgtagctttgattgaacgatatggaggtttaatcgtatctgtccttgtagatctcctcaagttcgtggagttccttctattttacaaggaccagataccgctatattgttagaattattgggacatagtatattttatttcaatataattcgtagaaaatcttaaagttcta

SEQ ID NO: 127794 - DNA, 503 bp, Zea Mays
gagcagcagcacaaagctaagctaagcgccacaggttttatcccgacgaccatggctagaggaggaaatggtatcccgccggcttcgcaagatgctcatcacttcgctgctattccggcttcgcaagaccgcggctggagcttcgcccaggaagatccacatcacccatctgtgaggaggcatgtgcacgccgctggcaccacatgcgccagtaggggtcttcctgcacaggctcgacacaagaacgaggagaaaccggcgcatttcatccctggcatctccaactccaggcctagccatcaagctacggaggagcagtgggactccaagcctacctcatctgtggcaataatcctcatggaggcgttgcagcaccaaaaggctgagctgaaggaaaaggcacaccaattaaaaggtcgcttcccttatttcaggaaataggagaggatgtagttgaacaatctaaaacagcgctatatggcgtgtgtctttgatttgttgaa

SEQ ID NO: 127795 - DNA, 665 bp, Zea Mays
tggacactatatataacaaaaagctaagcggcatcttcccacagcagctgcagctagcacacatggacaggacatacgaaatggccacttccttctattctaattctaagcagcagacgtccgtcgcccctattgctgaagaagcaggtaataatgactactactacacaagctaggacgtcatttgttaccatttctattccatttgctgatgtgttaatttagttactgcttgcacactaattaaaatcggctgtttgctttcgaagatgctcatcgcctccgcaccagagaacagttcgcccgcggtgctgctcggagtcggaggatggacgaaatcccagctggtccaccggtcagtggtgcctccgagagggcgttgccggcacaagaaaggagcaagcaagaggcggcaggacaggaacatcacatccctgtcttctccaaccccgatcttggccagcaagaacaggaggagcagccatcgtcatggccaacgcctgctgctcctccagctagagcgcccatggatgaccacagtaagacgcaggcagtcaaggataggctgaaggacaagacggcgaaggtggcggcgaaggcggtccgcgttttgtttggaaattaaggaaaggtaaagtgactagctacaacccgtcggcaatggt

SEQ ID NO: 127796 - DNA, 441 bp, Zea Mays
atggacaggacatacgaaatggccacttccttctattctaattctaagcagcagacgtccgtcgcccctattgctgaagaagcagatgctcatcgcctccgcaccagagaacagttcgcccgcggtgctgctcggagtcggaggatggacgaaatcccagctggtccaccggtcagtggtgcctccgagagggcgttgccggcacaagaaaggagcaagcaagaggcggcaggacaggaacatcacatccctgtcttctccaaccccgatcttggccagcaagaacaggaggagcagccatcgtcatggccaacgcctgctgctcctccagctagagcgcccatggatgaccacagtaagacgcaggcagtcaaggataggctgaaggacaagacggcgaaggtggcggcgaaggcggtccgcgttttgtttggaaattaa

SEQ ID NO: 127797 - DNA, 1815 bp, Zea Mays
atggcgtcacagcagcaaaccaggaagcagcaggccaccaagggccaccaggaggccgaccgaggccaggcgatgaacctggaggagatcggcaagtaccgcgccgaggcgcagcagcggtcggcggacgccatccgcgccgccgaggaccggttccacaaggccaacaaccagcaggcgcgcggcgccggggcgcgcgggactgtcaccgtggcccaggcgcccgtcgccactgtggtcccgtatcaggagagcgtgaagcaggtggagacggagagccacggccgcggtagccacggctctgagccgcagcagtggctggcggacgccgcggccgatgccagggagaggtgcaacaaggccctggggacgagcccggccgccgctcacgaaggcaaggcgtcggccgcccacgcgacggctggcgcagctccacaccagcaaaccaagaacgagcaggagggtggtcaagtccacggccatctaacaaggcaggacgagatggggaagcacggcagcgaggcgcagaagaactcgaccgcggaggccgcacgtgccgcggtggagaagcacgacggaggcagggagaccggtgcggccgcgggacagggcgtgaaggacacggcggcgaagcacgacaagtacggggagaccggcgcgaccgcgggacgaaagagtgtaaaggacacggcgtcgcgcgcggctggcgccacggcggactacgcctcggccaagggcgccgatgccaaggataccggcgcgagcggcgcgcaggccgcggaggagaagacccaggaggccacggggaaagcggccgactacaccaagcaggcggccgcgaaggtgaaggatctcactgccggtgcggccgggacgaccatggagtacgcgaagcaggcggctgtgaaggccaaggacgtgacgctggccaccggggagacggcagcagagtacgctaagcaggcggcggtgaaaggcaaggacgtgacgctgagcaccggtgagacggccgcggagtacgccaaggccgcggccgagaaggcgaaggaggcagcggtggcaacgggaaagacgacggccgggtacacgcagcaggcagccgtgaaggccaaggacgcgacggtctccacgggcgcgcaggtggcgcagaaggccacggaggtgacggccgacaccgcgcgcaaggtggcggagtacgccaaggagaaggcggagcaaggcaaggagcgcgcggcccgcgccgccgacgaggtggaggagccagggagtggcgcaaccgcgcaggccaaggaaccggcgtcccagacggcggacaataaggctcgcgacatcaccggacagcacaaggacaccaccggcgacatggcgcgtaaggccgcggacacggccgtacaggccaaggacaaggtgagggacacggccgtatccatggttcagaaggcgggcgataccgccgtacgtgccaaggacacggcgtgggatgcggccggcggcatggcgcagaggtcgagagacaccggtgcccaggccggtgacaaggcggaggacgtcacttggcgcgctgagcaggaggcaggggagttgaaagagagagcgtcagggaccgtcaagaccggcggtggcgcttcgacgacgaaggcgaagggtggcggcgacgagaacacgacggtagtgggcgacgtcctggaggcggtgggcgcgacggtggttgggctcgcgaagcacaccaaggggatcgtggccggcgaggaggagctcgtcccagtcggaggtgagaaagggaagtcaccggaggagaagaccaagctcgcgtga

SEQ ID NO: 127798 - DNA, 988 bp, Zea Mays
aagagatgataaacaggtgttcttgttttatacagtgtgtatatatagagagagacaaagagcaagtgaatttgtaggaacaacgcccacggagaacgaacgcaagcctatttcctcatcacaaggaacggaggcatacataggtctcatgtgtgagcactgagcaccgctggttccggatcatcctcatgccttccaccatgggtcctcgccggtcctgaagtcggtctccacccacgggacgaagaggaccttgccgtcgtcgacgtcggcgtgaaccagggccagcgactaggcgccggtccacggaccaccttgccctggttgttgtactgggatccgtggcaggggcagatgaacttgttctcagcgccgttccacggcacgacgcagccgaggtgagtgcacacggcgttgatcccgtaggtggccagcgtcttgtcctgctccaccaccaggtacgtggggtcaccctgcaccccctgcgcgagcgtgcggtcgttgggaccgtgcgtgttgagccacgcctccaccgtgatgtcgttgcccagcttgtccttcgcgtaggtcccgccgccggcgttcccggagctgcgtggacgaagaaggcgccgtaggggacgaccatgccgacggtgggcaacgagatggcgccgaggaggaggaggttcatcagcttccgcttctccatgtcggggacgcggtcggcggagatgctgctcgccgcctggcacacaatgctccgctgggcgcgctcgcggcccatgctcaggccaagccccttcaccggcttgcccagcgaagcaaggaagttgctggctcacctgggtgggattggcggcggtggagagcgccgcggaggtcgccatggctgcagcaggcgaggatcggtaggggtcaggagtcgggacaatacggctggtgttcactcactcgcgtccacaggcttgcggatgagcccccggtgccgagcctaactttatctttg

SEQ ID NO: 127799 - DNA, 169 bp, Zea Mays
gatccttttctccacagctaatgcatggcaacgaagatgaagatgcaattgatcctgaagaagacaaagttgagctggtagagttctatgtttctattttctaataatattagtttagaaacatgattggaagttcagaactgtaatagttattcgttcaagtgcagtt

SEQ ID NO: 127800 - DNA, 497 bp, Zea Mays
gtctctatgctcgatcactacgagtgtgcggcaccagcaggaggccgaggtcgccgcgacacaagaacgcgagcgagcagtagcggcggctgcagcgatgaaggcagcacgactagcagctgcggaactagcaacagcgagagcagaagtagaagcagcggaggcaacagttgctggtcgtgcggcggcaacagagctcgaggctctgtgtggtagtagcatcggtagctctgtttccggcgacgacagcaccaacgacgagctcaggctggcaagggaggcagcgcaagagcaggcgacacaatgggcagccgcgcacctctatggggcacgcgcggtgggagcctagataggcgcagacgcgccgacgatgctctgggcgagaacccacgtggcgacatcctagatgggtgcagacgcgccgacggtgctcccggtggcgttggccgggtcgacgaagattgcggcctctataggcggcgcggctctccctccct

SEQ ID NO: 127801 - DNA, 331 bp, Zea Mays
ctcggaagttagtatattctcggaagttagtagcttcatgccgttagctgactaacttcctacggcttactgtaacccctaggaagttagctgactgtagcccctaggaagttacgacccagttggcctctaggaagttaaattgaccagcattacaaatgttgtttatttttattttacaccacattctacaacataacaaatatatcaacagctatatagcacaacatattttcacataaaacatctcacacacaatcacataacaatatttaaatccatagtctcatcaattacatcacaaaagtctcatccatagtcataataagac

SEQ ID NO: 127802 - DNA, 799 bp, Zea Mays
aaaacaggaaaaaaaaaggctacatcaaaccctcaaaagtgaaaagcccgtgtctactaaacccaagacacttgggcggttcacggcggcccagactgcggcgcctcaccaaccaacgagaccacgaagcagaccatgtcatcctacggtcccgccggcgccgcggcggacgcgatggaagctgccggcggcggcagctaccgtgtgtgcgacacggtggtgctcgtctgcctcgcctgcgcctccgccctcatcgtctctacgatggccgtctgcttccgccgcgccttcgccaacgggtacacggccagcgcgggggccaccgctgcgaacggcagaagccagtgtgggctggcgccgtccgcgctgtcggcgatccccaagctcgcctaccggaggggcgctggcgctggcgctgggtgggcgcagtgcgcgatctgcctcgccttggtgcgggacggcgagacggtgcggttgctgccggcgtgtggccacctattccacgttgagtgcatcgacctgtggctgcgctctcacgctacgtgcccgctttgccggcgtgacgtcggggaggagccacatgaaaaagtttgagctcgccgctggtggaccaggatgacacacgccggctactggttcaaccgccggcctctagagtctagactctagttcaacttttgtttcctgccatgatgttgggcattcatccaaagaattgtacatcctagggtttaggcgtagtttcattttttttcggtggaatggaacctttattctgccatccgatggggaaaacaca

SEQ ID NO: 127803 - DNA, 638 bp, Zea Mays
atgtcgctgtcgtcgaacaccaactcgctgccctactccacggacaagggcggctacagcacgcacgacacgcttgtgctcctcgccatcggcttctgcgccaccgccgtctccgtcctcatcatcgtcctctgcgaatgcctgtgctgccgccgccgccgccgtggcccggggggaaccgtcgtgtacgtggcggcccggccgttcttcctgccgagcaccaccgacgacggcgacggtgggctgagcccctccgcggtgtccacgctgccgtcgttcgtgttccgtaggggcctgccggttggcggcggctccggccgtggcgagggcagcggcagcggcagcgggcgcgggtgggcgcagtgtgcggtgtgcctgagccttgtgcaggaaggcgaggttgtcaggcggctgccggcgtgcactcacctgttccatgtctgctgcatcgacatgtggctgcactctcactccacgtgtcctctgtgtagggccacggttctgcctacgaaggaagtgccttcgaacgacccacagcctccggtgtagcagatgtattccacatgtatataggatgtatataagataagattacttcacacaaccgataattattgaactcagtaagttcccggtaa

SEQ ID NO: 127804 - DNA, 128 bp, Zea Mays
ggatagtttaattcagattatttcaaaatcttattatttgtttgcttgttgcccagaaaaaccttttggttttggatgctcgttgcccctagaaaatgatcttgattttgctaaagaataagattgta

SEQ ID NO: 127805 - DNA, 850 bp, Zea Mays
gcacaacgcttaggacttccttttgcttcttacatttgattttctaatgcccaggcagcaccgccagcgacagccgccgagtgtccggcccaacggctgctccctcgtctgctatggcatcgtcgtggccaccgcgtcgctgctcctgctcgccatactcgctgccacagtcagcatcgtcaaggcgtgcgccctcgccggcgctgtcgcggtggtgttcagcgctgcgggctatgtctctcggtggtgcgcagcagaggacggcgctgctcatgcgctggcgctgcccacgacgatggcgacgccagccgcgcgcggccgcgcggtgtgtggcctcgttgacgcggcgatcgacgcgctgccggcgttcgcgtacgcgcgccctgccacgtgtggcgcagaaagtagcagcaagtccggaagactcgcactctgcccggtatgcctggaggaggtcgaggccggcgagatggtccggcagctgcctgcgtgcggccacctgttccacgtggagtgcatcgacatgtggctgcactcgcatgcgtcgtgccctctgtgccgatgcgacgtctcgccgcaggcagttgctatgacggtcacggaagctgcagatccaccgcatggtgcgctgccggtgatggtgagctgctgagatcatactcacggccgggagtgcgactaaggtcgtcgatttttgctcatgtcctactatgagcccttggcttcacccaaaaatggagagattggatagctactaagctattatccttcgttcatcttctaaaattattattaatagtcagcaaaccaaaaccatcaagcacatgagagtggtgcgtcagagagatcc

SEQ ID NO: 127806 - DNA, 2761 bp, Zea Mays
atgacatatgtgattttgattgaagtttgtaagttttttcaacaagtacatgatgaggatgatatggagactttcgtttccaataagttttgtggagagcaactggtgcaactatgcaagtgcaatcaggctgctggtgctagagcagcaagcaagctgctgatcttataccttggatgttttttgcatgctgctggtctgctagagcagcaagctcctggtgctggatgtttggatgttatcaagtgctacaggcctacagctggattgctctgttttgttcaagtcatatgttgttctgttttgttttatgttgcactatggacttggagtctggactggtgatggtgcttggatcatgctggatggcttattatctcattgaatcgttcaaatgctacagcctacagctagaagatgctattttccattacgtactgctcggctcgtttccaccctgaacttaaaccctctgttatcacagaccaactcaaccacaaaagccagtacgaaaaaatggtgacagaacaatatggaatttagtttgacagtgacatgacagtgaaaaatacctgtgccaactgcaaccaatgggtgtgtatagcctggaactgttacttcccgaggaaacatcacatttgtagtgtcctcagtaacaaaagtgtcaccaactacagagaaagatgggttgagtcattgtaatagtaaatattctagagaaaaaactcaaacacatttgaagaaaaaaatatatcatgacaagcgaacttgggacagacagtttatctaacaatcttttttctaaagcttcaaaagctaagatagcaagctttgcagctagatgactggatgtaaaattttcaatgtaagactcctaatcgactaatcacaacttacaacatattcatatgtataattgtgtatacatgagacttaagtacaagtccaacagattgacagttatcaagggaacgccaagaatcaggtcttctgtagatttgactgtggtacgaccaacctgatattaaggagcaacagaagttatataaaatacatgcattgctagctaagatgtgtgcacacaaaagggaaaaatatagatcaggtatcagtcccaatcatttctccaccctaaaactatttctattgcacttggtcatccagatccatatttcaggcaagctctttgcttggcgccagcacctagctttttgggtagtgggaattgtggttggtgcagcccaagatgttgacatgcacagtgttgaatatggaacaattcccgtgtaccactgatcaaggtgggttatgacataactttcactttagaggttgacgaatttatacaagccatcccacctattgagattgatcccaatgaaaaagatgattatagcaatggggcacaagacaagactgacaataatggtcttcactgcctgtgaaagaaacacaaaagttcagaacctaaacagaatgagcacaatgcttcatcatgaggtccagcaccaatgcatagcagtaacacctttccttataactgcacttgcagcaaaaaatagtgcttcagaagtcagttcagcacaatagaggaagctgaataattctccttttcaagctgctcaatccacttgttttttagtgccaacaaagtttggttttactactgtggaccaagctgcatccttacattctttggctacacatagagcgctgcaggtgctctctccccagtgacaacctgcaggttcgccggtgggattcccaatagtggctgataagctagttgcagatcagttgctattccaccatattttctgcctggggattgcaaactactactggaaacctttgttcaacaaaccctaatgcaactgcacccagtattgctgcttctccttaccggattgttctgtatggatctactgatgtaacaccctaaaaatgattttcctagtgagtaaataagttttatttgtttattttaatttcccatgaatttaaatattccaaataataacttcccacacagttaatcttagtggcaaaaaactaaatatatgagtttcaacctacacttatttcataataaaggacagcataaagagttcttttccagaaactagaaagtgcagacatcaccttttcccctttttgattatgatggatagaatcaaagttcagcacaccctgtagcagtaaggctcaaagattttggacaacaggaataacactcgggccagcgatgctaaacatggaacagaagcaagtagaatccataagagaggatgagaactgctgttacccgtcgtgtaaaagagcaagtatcctcgataatagatatcgggagcaggtatgaaccgggatatgaattggcatgttctttctcaactattagtgctcatcgtagatgaaagaattgagaccactggaaattgcaccagtttattcaagaacttagatctgatttgatgactcactctgttggataagcatgaagcgaacgcctatctcccccaagagtactccaagcccctcaccaagcaaattcctcccatgctgcatcaccaactactcgaatctaatttttctacctcaagttcgaactggaaggaaaattgggaaccaaaacttgcagcaaacataaatagacaagtcacacggaccctaacctgcaccgcccccggctgcacaggagaccggcagccaccgggtgcccccgctgcgcgcgacgcggcaggccaatccgctcttggaggcc

SEQ ID NO: 127807 - DNA, 1934 bp, Zea Mays
ctctctccctccctatgcagccagtcactgcagctgtgtttagtgcctgggaagccagatattattgcagcctccggtcctcccttcccttccctcctcgtctccccctctggttgatttgagagctcgggcaccagatctgaagccctcttgttctgtggttgtgtgcctttcggctggtgtagcattgagaggaggcgctgttccagttccagttccaggatgagcaaggaggatgtgctcaagactttgatgctgagagtgaacatacactgtgacgggtgcgagaagaaggtcaagaagaccctccacaagatcgacggtgtctaccagagcagcatcgacgcggaacaggggaaggtgacggtgtccggcctgctggatccggacaccatcatcaggaagctcaacaaggccggcaagccggcccagctgtggggctccaagcccggcgtccctcagaacggccatggcggcggcaagggccagcctaaggacgccggcggtggcaagggccattccaaggatgccggcggtggcaaggcccagaagggcggtgcgggtggcggcggtcacaagggtgccggtggtgccggtggcgggggtggtggggccaaggatcctaagatggtgatgccgcagccgacgccgcagcagctccagcagctgcagcagcagttgcagatgaaggggctgaagctcccgccgcacctcctgggcggcaacatgccggcgttccccgcggccgcgccgttgaaggaccaccccaagtccgtcaagttcgccctccccgaggacagcttcgacgacgacggtggcagcgagttcgacgatgacttcgacgacgacgacttcgatgacgacgaggactacgacgacgagggcttcgacgacgacgtctacgacgagcccaagatgatgaagcccatggccgtgccgccgccgtccggcgggggcgacaagaagggcggtggtggcaagaagggtggcggcgggaacgagatcccggtgcagatcaagggaaacaaccacggcggcgggcaaccgcacaacgcaaagggaggccccccgggcggcgggaacccgctggcccaggggaagaaaggcggtggcggtggtggcgccgtcggtgggccgatgggcggcatgctgccacagcaggccatgatgaggcccaacatgctgggtggcgctggtgccggcttccccggtacggcccagatgggcggcggacctatgggcatgccgatgggccacccgcacatgggtatcatgcagcagggcgggggcggcggcggcggcgtgccgggcctgggattctaccagggaaatgccaacggcggcggcggcggcggcatgcattctggcgcggagatgcttcaggccgccgcggcgtccgggaaccccatggcgcagcagcagtacatggccttgctgcagcatcagcagcagcagcatcagcagcagatgatgctgcaacacgggaacggcggaggagcagggtacccggcaatgggctacggctatggccggccaccgatgatgcattacccaatgcccccgcactcgcatcccgagccatacaacatcttcagcgacgagaaccccaacagcacctgctcactcatgtgatcagcatatcgtctcttgctgccctgttccaagtaaaacatctgaaggagctcaataccgctggccgccggcggacgtccgccatggttgaagcgccgtccgtgaatcaatcataaatcagtgtgcttggttggggggatgatcgtagctagaatttgccccttttcctcctcccgtttcacctttttctctacgcttattttcgccttcctttcagaaaaaaaggaacttccttgaatgcgaagtttggtatagtaattatgaatagtttccataagggaggagatggtgggggccttctt

SEQ ID NO: 127808 - DNA, 1940 bp, Zea Mays
ctctctccctccctatgcagccagtcactgcagctgtgtttagtgcctgggaagccagatattattgcagcctccggtcctcccttcccttccctcctcgtctccccctctggttgatttgagagctcgggcaccagatctgaagccctcttgttctgtggttgtgtgcctttcggctggtgtagcattgagaggaggcgctgttccagttccagttccaggatgagcaaggaggatgtgctcaaggtgcagactttgatgctgagagtgaacatacactgtgacgggtgcgagaagaaggtcaagaagaccctccacaagatcgacggtgtctaccagagcagcatcgacgcggaacaggggaaggtgacggtgtccggcctgctggatccggacaccatcatcaggaagctcaacaaggccggcaagccggcccagctgtggggctccaagcccggcgtccctcagaacggccatggcggcggcaagggccagcctaaggacgccggcggtggcaagggccattccaaggatgccggcggtggcaaggcccagaagggcggtgcgggtggcggcggtcacaagggtgccggtggtgccggtggcgggggtggtggggccaaggatcctaagatggtgatgccgcagccgacgccgcagcagctccagcagctgcagcagcagttgcagatgaaggggctgaagctcccgccgcacctcctgggcggcaacatgccggcgttccccgcggccgcgccgttgaaggaccaccccaagtccgtcaagttcgccctccccgaggacagcttcgacgacgacggtggcagcgagttcgacgatgacttcgacgacgacgacttcgatgacgacgaggactacgacgacgagggcttcgacgacgacgtctacgacgagcccaagatgatgaagcccatggccgtgccgccgccgtccggcgggggcgacaagaagggcggtggtggcaagaagggtggcggcgggaacgagatcccggtgcagatcaagggaaacaaccacggcggcgggcaaccgcacaacgcaaagggaggccccccgggcggcgggaacccgctggcccaggggaagaaaggcggtggcggtggtggcgccgtcggtgggccgatgggcggcatgctgccacagcaggccatgatgaggcccaacatgctgggtggcgctggtgccggcttccccggtacggcccagatgggcggcggacctatgggcatgccgatgggccacccgcacatgggtatcatgcagcagggcgggggcggcggcggcggcgtgccgggcctgggattctaccagggaaatgccaacggcggcggcggcggcggcatgcattctggcgcggagatgcttcaggccgccgcggcgtccgggaaccccatggcgcagcagcagtacatggccttgctgcagcatcagcagcagcagcatcagcagcagatgatgctgcaacacgggaacggcggaggagcagggtacccggcaatgggctacggctatggccggccaccgatgatgcattacccaatgcccccgcactcgcatcccgagccatacaacatcttcagcgacgagaaccccaacagcacctgctcactcatgtgatcagcatatcgtctcttgctgccctgttccaagtaaaacatctgaaggagctcaataccgctggccgccggcggacgtccgccatggttgaagcgccgtccgtgaatcaatcataaatcagtgtgcttggttggggggatgatcgtagctagaatttgccccttttcctcctcccgtttcacctttttctctacgcttattttcgccttcctttcagaaaaaaaggaacttccttgaatgcgaagtttggtatagtaattatgaatagtttccataagggaggagatggtgggggccttctt

SEQ ID NO: 127809 - DNA, 2132 bp, Zea Mays
ctctctccctccctatgcagccagtcactgcagctgtgtttagtgcctgggaagccagatattattgcagcctccggtcctcccttcccttccctcctcgtctccccctctggttgatttgagagctcgggcaccagatctgaagccctcttgttctgtggttgtgtgcctttcggctggtgtagcattgagaggaggcgctgttccagttccagttccaggatgagcaaggaggatgtgctcaaggtgcaggtgggtgtgcgcgccatttgctggcctccctcttctcaactcagccacccttcgtttttcccctccaggcaggcaggcaggcagctttgcttgtgtttgcagcaagtgttccccttgccgcgcctcctctgcagctgccctgccaatgtttgttgctgttcccttcaaatccctcctcttctgttgtttcagactttgatgctgagagtgaacatacactgtgacgggtgcgagaagaaggtcaagaagaccctccacaagatcgacggtgtctaccagagcagcatcgacgcggaacaggggaaggtgacggtgtccggcctgctggatccggacaccatcatcaggaagctcaacaaggccggcaagccggcccagctgtggggctccaagcccggcgtccctcagaacggccatggcggcggcaagggccagcctaaggacgccggcggtggcaagggccattccaaggatgccggcggtggcaaggcccagaagggcggtgcgggtggcggcggtcacaagggtgccggtggtgccggtggcgggggtggtggggccaaggatcctaagatggtgatgccgcagccgacgccgcagcagctccagcagctgcagcagcagttgcagatgaaggggctgaagctcccgccgcacctcctgggcggcaacatgccggcgttccccgcggccgcgccgttgaaggaccaccccaagtccgtcaagttcgccctccccgaggacagcttcgacgacgacggtggcagcgagttcgacgatgacttcgacgacgacgacttcgatgacgacgaggactacgacgacgagggcttcgacgacgacgtctacgacgagcccaagatgatgaagcccatggccgtgccgccgccgtccggcgggggcgacaagaagggcggtggtggcaagaagggtggcggcgggaacgagatcccggtgcagatcaagggaaacaaccacggcggcgggcaaccgcacaacgcaaagggaggccccccgggcggcgggaacccgctggcccaggggaagaaaggcggtggcggtggtggcgccgtcggtgggccgatgggcggcatgctgccacagcaggccatgatgaggcccaacatgctgggtggcgctggtgccggcttccccggtacggcccagatgggcggcggacctatgggcatgccgatgggccacccgcacatgggtatcatgcagcagggcgggggcggcggcggcggcgtgccgggcctgggattctaccagggaaatgccaacggcggcggcggcggcggcatgcattctggcgcggagatgcttcaggccgccgcggcgtccgggaaccccatggcgcagcagcagtacatggccttgctgcagcatcagcagcagcagcatcagcagcagatgatgctgcaacacgggaacggcggaggagcagggtacccggcaatgggctacggctatggccggccaccgatgatgcattacccaatgcccccgcactcgcatcccgagccatacaacatcttcagcgacgagaaccccaacagcacctgctcactcatgtgatcagcatatcgtctcttgctgccctgttccaagtaaaacatctgaaggagctcaataccgctggccgccggcggacgtccgccatggttgaagcgccgtccgtgaatcaatcataaatcagtgtgcttggttggggggatgatcgtagctagaatttgccccttttcctcctcccgtttcacctttttctctacgcttattttcgccttcctttcagaaaaaaaggaacttccttgaatgcgaagtttggtatagtaattatgaatagtttccataagggaggagatggtgggggccttctt

SEQ ID NO: 127810 - DNA, 2222 bp, Zea Mays
ctctctccctccctatgcagccagtcactgcagctgtgtttagtgcctgggaagccagatattattgcagcctccggtcctcccttcccttccctcctcgtctccccctctggttgatttgagagctcgggcaccagatctgaagccctcttgttctgtggttgtgtgcctttcggctggtgtagcattgagaggaggcgctgttccagttccagttccaggatgagcaaggaggatgtgctcaaggtgcagactttgatgctgagagtgaacatacactgtgacgggtgcgagaagaaggtcaagaagaccctccacaagatcgacggtacaaggacgaaccaccgatgccttcttttttttttctttgtacgtcagaccgtttggtttgctctgcatgcggaaacgtgatggaggttgaccttgccactgtaggtgtctaccagagcagcatcgacgcggaacaggggaaggtgacggtgtccggcctgctggatccggacaccatcatcaggaagctcaacaaggccggcaagccggcccagctgtggggctccaagcccggcgtccctcagaacggccatggcggcggcaagggccagcctaaggacgccggcggtggcaagggccattccaaggatgccggcggtggcaaggcccagaagggcggtgcgggtggcggcggtcacaagggtgccggtggtgccggtggcgggggtggtggggccaaggatcctaagatggtgatgccgcagccgacgccgcagcagctccagcagctgcagcagcagttgcagatgaaggggctgaagctcccgccgcacctcctgggcggcaacatgccggcgttccccgcggccgcgccgttgaaggaccaccccaagtccgtcaagttcgccctccccgaggacagcttcgacgacgacggtggcagcgagttcgacgatgacttcgacgacgacgacttcgatgacgacgaggactacgacgacgagggcttcgacgacgacgtctacgacgagcccaagatgatgaagcccatggccgtgccgccgccgtccggcgggggcgacaagaagggcggtggtggcaagaagggtggcggcgggaacgagatcccggtgcagatcaagggaaacaaccacggcggcgggcaaccgcacaacgcaaagggaggccccccgggcggcgggaacccgctggcccaggggaagaaaggcggtggcggtggtggcgccgtcggtgggccgatgggcggcatgctgccacagcaggccatgatgaggcccaacatgctgggtggcgctggtgccggcttccccggtacggcccagatgggcggcggacctatgggcatgccgatgggccacccgcacatgggtatcatgcagcagggcgggggcggcggcggcggcgtgccgggcctgggattctaccagggaaatgccaacggcggcggcggcggcggcatgcattctggcgcggagatgcttcaggccgccgcggcgtccgggaaccccatggcgcagcagcagtacatggccttgctgcagcatcagcagcagcagcatcagcagcagatgatgctgcaacacgggaacggcggaggagcagggtacccggcaatgggctacggctatggccggccaccgatgatgcattacccaatgcccccgcactcgcatcccgagccatacaacatcttcagcgacgagaaccccaacagcacctgctcactcatgtgatcagcatatcgtctcttgctgccctgttccaagtaaaacatctgaaggagctcaataccgctggccgccggcggacgtccgccatggttgaagcgccgtccgtgaatcaatcataaatcagtgtgcttggttggggggatgatcgtagctagaatttgccccttttcctcctcccgtttcacctttttctctacgcttattttcgccttcctttcagaaaaaaaggaacttccttgaatgcgaagtttggtatagtaattatgaatagtttccataagggaggagatggtgggggccttcttcatagccaacccacccaatagggggtgggtgggtggttcgcttgcgtcttcttccattctactagcttcataaaaggtggactgatggaagagcaaagttgtcaatctcagtaaaatcagtgtgcatatgtcgtggttccttttctgaccatatataatatatatatgtaatggt

SEQ ID NO: 127811 - DNA, 216 bp, Zea Mays
gaaatattttttcctcacataaagagttttttcacagcctcacaggaaaaccctaaaaatctagtgtgtggaaaagacaaactgtcgactctctatcattatatattactaatacataacatgtgcatagtaaagggtagattcgttcgagagaccaaatcgttaatctcaactgccttccaacaccatctatccaaaaaaaatcttaagacatcc

SEQ ID NO: 127812 - DNA, 1341 bp, Zea Mays
gatccgtggcattggcgtcgatgggcgaattgtcctgccatgacagcagcatctcccacacccacaacgtctgtcgcatctgcggtgtcggtcaggtgtcctgaaggggcatcgtcggagccttcaccggcggtggacccttttgcatagaggatgccctttgtccgggcgcgctcttcctgtttgtatgtatcacacaaaacgatgaaggacgcggctcgtgctgcgagggaaggcacttttccttcatcggcgcccgcgccgttggtgccgatggcatatccgagtggcacggtcgcgctgagccactcgggggaagttgtgtcaacggtcgtgccaccatcatgatcggagggcctacaggccaggcgatgcttctgtggtgggcgcgctcggtgccttgctgcctccacctcccttaggttccttgtccctgagtgcggtgaaggcgagccacttgggagaggtcgaggtggcgagagtgtcattgtgccttgatgtcccttcaagcgagcccggtggcgcccttgcgtcggcggttttgccacctctgccaccccgactcctccacctccgagtgcgaagagggtggctctcgcgatgctactggcccctacagttgggaccactttggagtagtgctccgacgatctctgtcctcctctcgaggtgaccagagcaagagaggtcgaagtagaggagtgggggatcgtcaagaaggcttacacattggcttcctagatctcatgggttatcgatgtgcccatgccgccattgaggaggtggcatcgattgcttgctcgacgatcacaagtcagatgcttcctgttgggagcctagcttactgaagatcctcaaaatgcctttaccttgctatatgcaaatgtgtttcgggtatgcggtaaagagcggacaaagttgggctttgaccgaagcaatgaatagaagagatttgtctgtatatatgcgcggcaaggacgtcggtcgaaggttgctggcttcgacgtaaagaaaggatcaagcgtgaggtagcaaagggggagaagcaaaagtcttatgagacaagaaagaaagggaaaaggcaatattacccctgtactatttgttaatcatatttgtaagcttcgtgggcatgcatgtaatttcatgagtgattgttcgtcttccctataaatagatgaacaattccgtgtaaaaattcacctttttgaaggtccttagcttcgttccacttagccttcgaagtatcttcaagctatcttgcacaaagaagccgaaggtatgtttgtaaacttatttaatatgaagggaaatggaatgaaagtgctaaggcataagaga

SEQ ID NO: 127813 - DNA, 334 bp, Zea Mays
aaaatggttgcttctcttttgtcttctagagcaaatccaagtttggttgcagatactactcatgatgtccttggtggacaaactgctagtgatctggttgcatgacaaggttatcatggcttagctacatatctttgtgagaaagggttgactgctcattctaaggctatgtcactgtccaaggataagcgaccaacatcaagaatagagtcatcaaaacaaaataccaaggaatttgataaacatagtgaacaagatttgttcttatgggtagctttaatagcctaccgtagtgatgctggtgctaccaacattcaagccacactcatggagt

SEQ ID NO: 127814 - DNA, 540 bp, Zea Mays
atgtgttacaaacaacatcactacatgaaaaataggaaaaacgccagtaacaataagaacgtcggggccgacgttcttatacagggacgaggagatgcaacaactgcgaaaagagatggaacaaatgcgacaacatatgcaaatgatgcaatctcagaatatgtatatgtggatgcatcaacagtctttccaaatgattctaaatgcacaattggtaatctatttgcttgcagacgtacggtagtggagtacctcagcaaggcgttactcccactccgccagcgaaccccttgtcttcgcatggtgatgcatcacaggatctgggacaggtccccacaaccaaatgacgcgcccaattatgtcgtgggtatatgctccgtagatgctgccttagatgactccgcagatgctgcctcagatgccacctcagatgccaatgcagatgctgtctcagatgccaatgctgatgttgttgccacaggtgatgtgggtatattctcctatggggctgtcaaaatgccttggggatatgctccatga

SEQ ID NO: 127815 - DNA, 346 bp, Zea Mays
accgtagatccgagcgctcctccgtcctcctgggccacagcgatcatcaccgccgctgtgccacccatatccacagctgagtcgctcgccctatagcttcacctcggccgcgcgtggggcggccatggagaactacccggaggagctgcggacgccgccggtgtcgctcgtgtccatcgtggggtgcccagagcttcactcctcgatatcgacggcactcagctcccagcagcctcccatgaacacactggccctcccggacttcgccaaggcctctattctggcccacagcattaagccccatgacctagcgcgcgcggaatcgccgtggcataccggtgcgagg

SEQ ID NO: 127816 - DNA, 106 bp, Zea Mays
caaaaattgacatgaacatttttcaccttgaaaattctcttctccaagaaactaaaaaacattccctttctctgtattggtgttgcaggaggacaaagagacatac

SEQ ID NO: 127817 - DNA, 2445 bp, Zea Mays
tccacaccatctgcatacagagttgagaggcaaagaacagaaaagtaagcatgactcaagctcattcaaagtcatgcttccaacaattttgggatggagttcatgttaagaggaacagtggcagcttcaccattgagctcctgccatctcttggtgcaacaataaaccaatctaacaagttgcagaggttcatcatatctccctacgatccccgttatagatactgggagttgttccttacagtcttagtcatttactccgcctggatttgcccgtttgaactagcatttttgagggacttgtcctctaagcttctgctggtcgagaacattgtcaatagcgtcttcgctattgatatcgttttgacgttctttgtagcttatgtcgacagcaaaacacatcttcttgtggatgatcgaaagagaattgcagtaaggtacctatcaacctggttcatctttgatgtatgttcaacagctccatttcagtcaatcagccttctttttacacataaggggaatgaccttgcttttaagatactcaatatgttgaggctatggcgtcttcaccgagtcagctcgctgtttgcaaggctggagaaggacataagattcaactatttctggactagatgctcaaaacttatttctgttactctgtttgccgtgcattgtgcgggatgtttcaactatatgattgccgatagatatcctgatccagagaaaacatggataggtgctgttatgcccaccttcagatcagagagcttatggactagatatgtaactgcactttactggtcgattacaacattgacaacaacaggttatggggacctacatgctgagaacccaagagagatgttgtttgatatctgctatatgctgtttaatctgggcctgacagcttaccttattggtaatatgaccaacctggttgttcatgggaccagccgcacccggaattttagggactcaatccaatcggcatcggaatttgcggcacgaaatcagttgcccgagaagataaagcagcaaatgttgtctcacttctgcctacagttcaagacggaggggctcaaccagcaagctatgctaaattgtctcccaaaaggaattcgttcaagcatagcatacaacttattttttactatcatacgacaagcctacctctttcatggagtatctaatgatttcattgcagaactggtaatggaagtacaggctgagtatttcccaccaaaggaagacataatgttgcaaaatgagggggcagctgatatttatgtaatagtttcaggatcagtgaatttgataacaacagtaaacggtaatgaacaggtgtttggaaaagttgaagagagagacatgttcggagaggttggtgctctgtgtgacataccccagccatttacttgtcgcaccagtaccctatcacagctcttgagaataaggaagataagattaacagagatcatgcaagaacacagggaagacagcaatattatattgaacaatctatttcagaagctaaagctgcaggaaaatttaccagaattaaatcaactagatcgaagattcatgcacaagtatgagctattccatgctactcgagaagcatggttgttacctcaaccttacttacaatacactgagcacaaatttgaagacattagtaagaaggccccagcctttggtggagatcatggttcaacaaaactagcagcagaaacaatccagttgagggtgccacagcaaggaaacagtcatgaccatggtaattttggggcgacagataggatggcaagtggagatgacaaacgtaatgatcttcacataaactgtgagaccaaaaaaggaaccaaggaattttgcattcagataaaatcgaaagattgtgaagcagcaagctattggcaaacaagccctgaaacagtgaagctgggttcttcccacagtacattggatgccataactacgagagaaaatcaagatactagtaacataaaatcatctaacaaaagagttacaattcacgcagatcctcataatgcaacaggttctttagtacaaaatgggaagcttatcaatctgccttgttcactggaggagattttcgaaatcggaagtcagaagtttccaggtttccaccctacaaaattggtcagtagagactatgctgagatagatgacgttagtgttattcgagatggtgaccacttattccttcttcagatgtagaaccagaataacatcgatctaacctaacgtaacaataaaggcttcaagtcctccaatctggcaaaaacagcagattgtaaatcgagtggagatatgaagaggaatacctttttacaaattgttccggtcatttctgacattatgtaaatatctatttgcacgagctgctgtctcatgcaaaagtcatgccagaaagcggtttccg

SEQ ID NO: 127818 - DNA, 94 bp, Zea Mays
atgcgatctatgattaatctattgttcctcatgaactgcttctctttctttatcaggtttgaaagtctttatgtgcacttctagcacttctttt

SEQ ID NO: 127819 - DNA, 207 bp, Zea Mays
atggaggagttccaggcggcggttcgaggcggagactcgcgaggaagtgcggaggctgaggctgaaatctacaatgcaggaggtgcagagcagtgcgatgtactcgaagtctcgaacaacacagagattgctgcaggagaagctaggaagcctgatctgactgctaagaaggcaaagctgggcgagagcatggcttcagcccgctag

SEQ ID NO: 127820 - DNA, 1753 bp, Zea Mays
gaggaaaaacttttttgaaaacaaaaaaccccccactcccacgtcccaccacctcgcctcggccgctgcgacagtgcatacgccccctcccctcctgactcctgttgcgtatacaccgtatgtgtctactgtgactccgggtcccgggggggtaagcgaccgagcaaggcttcgtctccggcggcggaggcggatctgggagggatggggaaccggataggcgggcggcgcaagtcgggggtggaggagcggttcacgcggccgcagggtctctacgaccacaaggacatcgaccagaagaagctgcgcaagctcatcctcgaggccaagctcgcgccctgctacccgggcgccgacgacgccgcgcccggcggaggggacctcgaggagtgccccatctgcttcctgtactacccaagcctcaaccgttcaaagtgttgctcaaaggggatatgtacagagtgttttcttcaaatgaaaccaactcatactgctcgacctacacagtgcccattctgcaaaacgcctaattatgctgtggagtatcgtggtgtgaaaacaaaggaggaaaggagcatagagcagtttgaagaacagaaagtcatagaagcacagttgaggatgcgccaaaaagaactccaagatgaagaagctaaaatgagaagaaaacagggcaggtgttcttctagcagaacggtaacaccaacaacagaagttgagtatcgagatatttgcagcacatccttttcagtgccatcatatcaatgtactgagcaaggaaatgaatgctgttcatctgaaccttcatgctctagccaggctaacaggcggcctttccattctagacacaaccgtgatgataatgttgacatgaatctggagaacatgatggttatggaagcaatttggcgttccattcagcaggaacaaggacatctagtaaatcctgtttgtggcagctactttcctgtaattgagccaccatcacgtgaaaggcaggcatttcttccggctgctcctctagaaatgcctcatccaggtggatactcttgtgttgcggctttggctgagcaccagccaccaagcatggatttctcttacatggctggcagtagcacatacccagtctttgacatgatccgccgaccgtgcaacatgtctagtggaagcttgtgcagcgtcgagaacagttcactagacacctggagcgggatggcaccaaattgcagcagaggagtggtaagagaggagggagagtgctcaaccgaccactggtcggagggtgcggaggcgggaacaagctatgccggatcggacatcatggtggatgcaggggccatgcaaccgctgcctttcgctgagaatttcaccatggctccaagccacttccgcccggagagcatcgaggagcagatgatgttttccatggccgtgtcactagcagaaggtcatcatggtaggacgcaagcgcaaggtctggcatggttgtaagttgtataacactaattttgacgccttgatccctgcccctttctgttggttcgacctgcttcccctgcacctctgcttttttgccactttgtttagctttttgctccttttttttcttttctttcttttttgcatgtgttgcttcatggcttgatatagatcttgctatagtcctccattgtcattgcttatatgtatgtaaaatggaatatgtggaaataggaaagaaaatgggtcgaaagttcttttgccggtaggatgc

SEQ ID NO: 127821 - DNA, 981 bp, Zea Mays
ggtaagattgatgagattcttcagaacaccttttgaaatcacttttttacttggatcaaatccgaacaataatttttgctttggaatttatgtatttgctaagtcaaagcaaactctatatctgtttcttatttgtttcattaccttagcaggaacaaggacatctagtaaatcctgtttgtggcagctactttcctgtaattgagccaccatcacgtgaaaggcaggcatttcttccggctgctcctctagaaatgcctcatccaggtggatactcttgtgttgcggctttggctgagcaccagccaccaagcatggatttctcttacatggctggcagtagcacatacccagtctttgacatgatccgccgaccgtgcaacatgtctagtggaagcttgtgcagcgtcgagaacagttcactagacacctggagcgggatggcaccaaattgcagcagaggagtggtaagagaggagggagagtgctcaaccgaccactggtcggagggtgcggaggcgggaacaagctatgccggatcggacatcatggtggatgcaggggccatgcaaccgctgcctttcgctgagaatttcaccatggctccaagccacttccgcccggagagcatcgaggagcagatgatgttttccatggccgtgtcactagcagaaggtcatcatggtaggacgcaagcgcaaggtctggcatggttgtaagttgtataacactaattttgacgccttgatccctgcccctttctgttggttcgacctgcttcccctgcacctctgcttttttgccactttgtttagctttttgctccttttttttcttttctttcttttttgcatgtgttgcttcatggcttgatatagatcttgctatagtcctccattgtcattgcttatatgtatgtaaaatggaatatgtggaaataggaaagaaaatgggtcgaaagttcttttgccggtaggatgc

SEQ ID NO: 127822 - DNA, 2773 bp, Zea Mays
cggcagagagcacagtagccaagcgagtggaggagagttggagactcatcactggagagcatccgaagccgcccagtgctcgcacaaccgctcccgattcccaacccctccgtccgcccaaggggcgccgcaccatctccagcctccaggcctcgatccctaccggaccccgtggccctgctgtgttatctggctggagatccggccggagtggcattcctgctctcggtcaataagtattctggaatgtttttccgagctcaaatagagaacttctggagctggatatcagtattctgttagggatatgctccaaccaagggaagctgatgtgcctgcactctttcttgtcttcattgtacttcccgtggtagcttattttcttcttgggagatggcatgactctgcaagtaagaaggcaagggcaagtgtgcttgcacagcgagctgcagaagaagcctatagagaggaaacgatggcgtgcccagacattattccgccaggcccttccttgagaactatgccctatttcaaacctgcgccttcgttaagacaggaataccatgagtgtgcaacttgccatgcccctgcaaagactcgttgctccagatgcaagtctgttagatactgctctgggaagtgtcaaatagtacactggaggcaaggacataaggaaacatgccaaaaatggcttggtagtggttctagcagctttggtggatctagcactgaggctactgaacagatgccgttcttggctaacttgaattcacctcttccaggtggtgacattcacttgcgtgacatgaacttcgatactttatcagaaccatcctttcccacaactgatggttacaatctagatactgacccatttccggcagatagaagcaacatgaatagatcaaatcaaggtattcatatgagcgaaaatggtgctgttggtgtatcttttgaaaagaataattataatgctgctgatgaaatacactcttcggagattttatctggaaacaaggtgtcaaacaactattttggttcagatgcaatgagtggtaatggggatgcaacttatcctgccaaaagtaatgcacagcagcctagcagttgtgctcctgacgtgagaaaacaatcaaaagcaagcatcacagtttatcagcctgacatgagtgtctatttaacttctgacatggtcagttcttgtgagggatcatatgtttctgccggtgagccactgcaaaggagcttgtcatctggaagaactattgggaaagtaactgtggtgaataaaaggccttcttacccatcaagtaaggtggtctcagcacaaaagtcacaggataaggtgtctacatcatatcaaaatgatgcccatgagaagaatccttgcaacaaaaatgaccaaagatctacccccacatgtgaatcaagtcaatcaacaagcagcaatctactgaagtctggaacatccaaggttgaagttttaaagaagccttcaaaatttctcaaaaccagccttgtggcattgatcaatgataataagaggaacaaggtattgttcccatatgaagatattgtcaagttttttcagtatgaagcacggggtgtttcccctagaggtcttttcaattgtggaaacaggcatcttgtgatgtctatgcaagcagcttgcttggatgggctgggtggtgagaagcacgttgaaccaagtttgcaggaaacaacactgatacaacagatgtttggtggccgtcttaaatccaaggttaagtgcctcagatgctatcacgagtctgaaagatatgagaatataatggatcttactttggagattcatggctgggtagagtccttgcaagatgctttgacacagttcactgctcctgaagatttagatggtgataatatgtataaatgtggaaggtgttctgcctatgttaaagctaggaagcaactgagcgtgcatgaggtgccaaacattttaacagttgttcttaaaagatttcagtcaggaaaatatggcaagatcaacaaatgtgttactttccctgatatgttggacatggttcccttcgtgactgggtctggtgacaatccccctctttatttcttgtacgccgtggttgtacatgtcgatacagaaaatgcatcattctctgggcactatatatcatacgtcaaagatatgcagggtacatggttgagaattgatgattcagaggtccaggttgtatcagtgaatcaggttatgtcagaaggtgcatacatgcttttctacttgaggtcttttccccgaccaccaaggatatacatcgagaaggggctgccggttacatccgcaaagcggcacacgtcgaaatcttccaagggctctaaacacgatcgcaagcagacagagttactctttcctgcaaacgatcaggcatatggcgtctatgatttcagacccgatggcgaaggctatgcccaagatcagcatgcagagctgaggtccagagctttccatcacgccgacgatgcctttgcagactcggttagcgcggacttctcggaagcgacatcaagtgaatggtcgctgtttaccagctccgacgagtcctcgttcaccaccgagagcacaagggattcgttcagcgtcgtggactacggagacaacgccggcctggatccgatttcctccatattcgggccaagctatgctccggagcacggtgctcccggcagtttcgtctcgcgcacaaggttctcaccttccagtccacagacaagatga

SEQ ID NO: 127823 - DNA, 3234 bp, Zea Mays
cggcagagagcacagtagccaagcgagtggaggagagttggagactcatcactggagagcatccgaagccgcccagtgctcgcacaaccgctcccgattcccaacccctccgtccgcccaaggggcgccgcaccatctccagcctccaggcctcgatccctaccggaccccgtggccctgctgtgttatctggctggagatccggccggagtggcattcctgctctcggtcaataagtattctggaatgtttttccgagctcaaatagagaacttctggagctggatatcagtattctgttagggatatgctccaaccaagggaagctgatgtgcctgcactctttcttgtcttcattgtacttcccgtggtagcttattttcttcttgggagatggcatgactctgcaagtaagaaggcaagggcaagtgtgcttgcacagcgagctgcagaagaagcctatagagaggaaacgatggcgtgcccagacattattccgccaggcccttccttgagaactatgccctatttcaaacctgcgccttcgttaagacaggaataccatgagtgtgcaacttgccatgcccctgcaaagactcgttgctccagatgcaagtctgttagatactgctctgggaagtgtcaaatagtacactggaggcaaggacataaggaaacatgccaaaaatggcttggtagtggttctagcagctttggtggatctagcactgaggctactgaacagatgccgttcttggctaacttgaattcacctcttccaggtggtgacattcacttgcgtgacatgaacttcgatactttatcagaaccatcctttcccacaactgatggttacaatctagatactgacccatttccggcagatagaagcaacatgaatagatcaaatcaaggtattcatatgagcgaaaatggtgctgttggtgtatcttttgaaaagaataattataatgctgctgatgaaatacactcttcggagattttatctggaaacaaggtgtcaaacaactattttggttcagatgcaatgagtggtaatggggatgcaacttatcctgccaaaagtaatgcacagcagcctagcagttgtgctcctgacgtgagaaaacaatcaaaagcaagcatcacagtttatcagcctgacatgagtgtctatttaacttctgacatggtcagttcttgtgagggatcatatgtttctgccggtgagccactgcaaaggagcttgtcatctggaagaactattgggaaagtaactgtggtgaataaaaggccttcttacccatcaagtaaggtggtctcagcacaaaagtcacaggataaggtgtctacatcatatcaaaatgatgcccatgagaagaatccttgcaacaaaaatgaccaaagatctacccccacatgtgaatcaagtcaatcaacaagcagcaatctactgaagtctggaacatccaaggttgaagttttaaagaagccttcaaaatttctcaaaaccagccttgtggcattgatcaatgataataagaggaacaaggtattgttcccatatgaagatattgtcaagttttttcagtatgaagcacggggtgtttcccctagaggtcttttcaattgtggaaacaggcatcttgtgatgtctatgcaagcagcttgcttggatgggctgggtggtgagaagcacgttgaaccaagtttgcaggaaacaacactgatacaacagatgtttggtggccgtcttaaatccaaggttaagtgcctcagatgctatcacgagtctgaaagatatgagaatataatggatcttactttggagattcatggctgggtagagtccttgcaagatgctttgacacagttcactgctcctgaagatttagatggtgataatatgtataaatgtggaaggtgttctgcctatgttaaagctaggaagcaactgagcgtgcatgaggtgccaaacattttaacagttgttcttaaaagatttcagtcaggaaaatatggcaagatcaacaaatgtgttactttccctgatatgttggacatggttcccttcgtgactgggtctggtgacaatccccctctttatttcttgtacgccgtggttgtacatgtcgatacagaaaatgcatcattctctgggcactatatatcatacgtcaaagatatgcagggtacatggttgagaattgatgattcagaggtccaggttgtatcagtgaatcaggttatgtcagaaggtgcatacatgcttttctacttgaggtcttttccccgaccaccaaggatatacatcgagaaggggctgccggttacatccgcaaagcggcacacgtcgaaatcttccaagggctctaaacacgatcgcaagcagacagagttactctttcctgcaaacgatcaggcatatggcgtctatgatttcagacccgatggcgaaggctatgcccaagatcagcatgcagagctgaggtccagagctttccatcacgccgacgatgcctttgcagactcggttagcgcggacttctcggaagcgacatcaagtgaatggtcgctgtttaccagctccgacgagtcctcgttcaccaccgagagcacaagggattcgttcagcgtcgtggactacggagacaacgccggcctggatccgatttcctccatattcgggccaagctatgctccggagcacggtgctcccggcagtttcgtctcgcgcacaaggttctcaccttccagtccacagacaaggtacttctcggagagcacaggctttgtctcggactcttccatgccggcccacccccacggcattgtacatagaggaaggtatccggatagtagggcgtgcgcctcttctgcggaaccgcttgcgtcggcggcgcatcagcggagcgggtatggccggtacccccttagtcgagatggttttgttcaaacatctggtttttgccaaatgtaatcggctcacatttcattagctgtagctggtgcatcggcagttgcggttcttagcactgccgttaatgctgcctcatgttcttttatttcagatgaggcttattgaatttttagctacatgtcgtttctaggggtagctcgattcgatgtagcgaaaaaaagttagattatgtctatatgcaggtgaaattttagagcatggtgacaagctctgtggcaaccgttttccaatgctaatctcgtaaccctggctgc

SEQ ID NO: 127824 - DNA, 1019 bp, Zea Mays
cgttcgatcggccttttttttcctctgttttttttccttttattatccacagatgactacgcacgaagctgctagtttcaatgcaacggaagcatgtttgctagttattagttaaacaaaaaacatagtttcgtactttattttgcatcaggcttcaacagccaataagctccccttggcatctacagcaagcacacaagagaaaggctctgacatgaaaaatcctccagaacacactggcgccggtgtactaactgctcacaggcctacacatatcgtccaccgtctcatgggagacaggttatttgcacaccgaagatcttggcctagccggtgttctgcatgccggcggcgatgcccttcatggtcaggatgagggtgtcctccaggcctggagcgtactcgctctgctggttcagctgcaccagctccgccggctgactctcgtcggtgaactccttggacaggggcggctgcgggctcacctggaagctcgggtcgcgtatccgcttcagggtgtaggcctggcacacgttcagagtggtgatgtaggactcacgcagccgcagacgctgcttcagataaggatcaccttcaaggacgtccttgtgaccagcaacctgcagcgagagatggcaaaaattgggataataatgcaattagactcatgaaatttcaaggtttcagagggactcgtaaaacttgagtgccaataatgggcgacataactacaaaaatacctgaaggagtagctcttttgtctcctcatagttcttcctcagttgctcgccgaaggattgcaaatcatcagccactagcaatttgtcgtacacagctgcgattcccgggtctcccttcgcgaaaaccatctcaagcaaatcaagggtgaccctgaagaatggccactcattgtacatttctctcagtatatggatgttcctgatgtccttctgcatgatgtgctttatcgctgcaccaaatccaagccagacaggcagatggaaccttgtttgtgtcca

SEQ ID NO: 127825 - DNA, 946 bp, Zea Mays
agtttcaatgcaacggaagcatgtttgctagttattagttaaacaaaaaacatagtttcgtactttattttgcatcaggcttcaacagccaataagctccccttggcatctacagcaagcacacaagagaaaggctctgacatgaaaaatcctccagaacacactggcgccggtgtactaactgctcacaggcctacacatatcgtccaccgtctcatgggagacaggttatttgcacaccgaagatcttggcctagccggtgttctgcatgccggcggcgatgcccttcatggtcaggatgagggtgtcctccaggcctggagcgtactcgctctgctggttcagctgcaccagctccgccggctgactctcgtcggtgaactccttggacaggggcggctgcgggctcacctggaagctcgggtcgcgtatccgcttcagggtgtaggcctggcacacgttcagagtggtgatgtaggactcacgcagccgcagacgctgcttcagataaggatcaccttcaaggacgtccttgtgaccagcaacctgcagcgagagatggcaaaaattgggataataatgcaattagactcatgaaatttcaaggtttcagagggactcgtaaaacttgagtgccaataatgggcgacataactacaaaaatacctgaaggagtagctcttttgtctcctcatagttcttcctcagttgctcgccgaaggattgcaaatcatcagccactagcaatttgtcgtacacagctgcgattcccgggtctcccttcgcgaaaaccatctcaagcaaatcaagggtgaccctgaagaatggccactcattgtacatttctctcagtatatggatgttcctgatgtccttctgcatgatgtgctttatcgctgcaccaaatccaagccagacaggcagatggaaccttgtttgtgtcca

SEQ ID NO: 127826 - DNA, 1147 bp, Zea Mays
aaaacctttgatttttacttgttccatgacttggcatgctgtcaggtgtggagacgaggcttctgctacacaccttgaaacagagtgcttcaaaaaatatgagaaggcgggcaagacgttctacaactcacagatagctgccacagttcggtggctgtcatctgcaacacccagtcagatgcgtgactgcctcgacgctcttattgaccgaaccaaagatgatggtgcgtcaggttgccccgacattgtcccagagtcacctccaacatctcctgaaatcgtcgtcggcgcaaggtcaggagaaaccagtaacgacaaaccacagcatatttgtgagttgaagagttcagatgagtctgcaaagggtgctgcagcatcgactgggaacatggtgctccccgccataccgacgttcaaagaattcttgagccaaaaaggaagggatcgggcgaagtgctattcaaattctaatgcgacgaaccaaccatctggtatttgtaggaagtctagtggtcacgttgataaggaagaagccagcaagaggatgaaatcatgaatatctgtcgggcaacttgaattttttctgccttttcgttgtcagtaatcaaacattgcaaatctacgttgtagtgaaccattcctgaatcagaatctccatgatgattttcttattatatctagtttgtacagtgaaaaggggtgttctacgcttctcgtgcaacatgaaggatctgcctcccaatccctatccaccctctataggttagtcatctcatgtggacacagccagaagggaagcggtggtaaacttaagcaagtatacacatgtcggacctatagcaccctatttgagcagctcttacaacggtcaactacacctgacgcaccctatttgatccaaggaatccttctcaagctccgcgatcagctgctcgatgtttcttctgtatataggcatgtaatggtcattgatcatcattttcgaaagcctcagcttgtcgtacagagatcttggcgtcaagaagatccctaggctactttgtgcctccccatccgtaacatcatcatcaggctcctctccacgaattgcggaaggaatcaattatagcgattggtgatctgattttaaatgcaggttatttgctcc

SEQ ID NO: 127827 - DNA, 1724 bp, Zea Mays
gttttataatggaaaaaatctcctcccgggattcccccagccaccaagcccgactccgctgatcccctcaccacgcaaccctcgccggatcccggcatgccgtcgtggaagcctctcgctggcggcaagctcaagaagccgctcactgacaagcagcgcgctgccgcggagcagcgcctgtcccacctccgcgcccacctcatcctgcgctccctcgactccccagctggcggggcccgttccctaccgccgccgcaggaggcggcgctcgatgccctcggcctgctcatttttttccgcctcgacctgcagtccggcgccccgcgccccgacctcatcgctccgctcgtcgcctactacgaccgtgtctgcaagcgcagcttcgtccgcggcgtccgtgtcggcgtctcgcgccaccacatcatccgcgcgctctgcctaccctcgaagcccgcctctgcggcgccggccccagcagacgtcgatcccgcagcggtggtcgctgccgttatgcagctccttcaggattatgtcctgctcccgttccagggggacgacaggtgcatactaccgcagcaggtggctgccgcagagcagatggtcagggagggggcggcgcatagggttgattggggagagctgatctggggcctcgtcgagaaggagatgctcgagctgcccaagagggaagactgggtgtgctactacgggccgcacctacagcggctcatttatgcccaaaagccacatctgttggagctggtggaggaagggcctgttcaggagccgtctgctaatgtggatttgaaaaggaagagcatggtggagctggagcaaggggatggggatagagaagcgggtaacaatgtcaaaagcaagagcttgaatgattcagaatcggggaaggctggtgcaaggaatgatggtttggacgagttggagttggctgatgctgttacgaggaacaaggtcatgggggagttcggtttaggggatgtagatgctaggaagaacagcatagtgaaactagaggttgtcgacgaagatgcaaggtgcaagtgcttgaatgaaattcaggctgtggatgctatcaacaacaatatagttgaattggatgcggccaatgaagatgcaaggtgtaaaagcttgaatgatgaatcagagccagtggaagaggatgttaagggtccaagcttcgatgacatgaacaccgtggatgagcacgtcgatggcacaaacacggatggatcatgtttgggatttgtggcagttgaagcggtgcctgctgtaaatgtagagcctgacgttgttccagattatccagtcatcccaactgcttcaccaacaaacataaagaggttgaagacgttccacaaacctagtactaacacgaaatcaaacattggtcaaaatttttctaggttgctagaagaacacccgaaaatagcatatgatatttgcaatggtccaataaatatgtacaagtgtactaagaaacttttggagtgtggtttcacaggcaaagtacttcacattgcaatcaaaatactaaaagaagattgggaagctcgtcagatattcatggcattagatagatctgaatctgtaacctttatttccaatgccgttggcgattatagctagatgatgttgtatggatgttgaataatgtgaacaataatgtagtgaacatgaactctgagttatgaactattaagtgattg

SEQ ID NO: 127828 - DNA, 1308 bp, Zea Mays
ccgaattccccaagccaccatgcccgactccgctgatcccctccccacgcaaccctcgccggatcccgacatgccgccgcggaagcctctcgctggcggcaagctcaagaagccgctcactgacaagcagcgcgctgccgcggagcagcgcctgtcccacctccgcgcccacctcatcctgcgctccctcgactcccccgctggcggggcccgtgccctaccgccgccgcaggaggcggcgctcgatgccctcggcctgctcaatttcttccgcctcgacctgcaatctgacaccccgcgccccgacctcatcgctccgctcgtcgcctactacgacccggtctgcaagcgcagcttcgtccgcggcgtccgtgtcagcgtctcgcgccaccacatcacccgcgcgctctgcctaccctcgaagcccgcctccgcagcgccggccccagcagacgtcgatcccgcagcggtggtccctgccgttatgcagctcctgcaggattacgtcctgctcccgtttcaggggggcgacatgtgcatactgccgcaggaggtggccgccgcagagcagatggtcagggagggggcggcgcatagggttgattggggagggctgatctggggcctcgtcgagaaggagatgctcgagctgcccaagagggaagacggggtgtgctactatgggccgcacctgcagaggctcatttattccgaaaagccacatctgttggagctggtggaggaagggcctgttccggaggcgtccgctgatgtggagatggaggatgaggatggtgatgtggatttgaaaagcaagaacttggtggaactggagccgggggatggggatggagaagcgggtaacgatgtcagaagcgagagcttgaaggattcagaattggggaatgctggtgcaaggaatgatggtttggacaagttggagttgggggatgctgttacaaggaacaaggtcatggaggagttgggtttaagggatgtagatgctaggaacaacagtatagaggaactagaggtggtcgaggaagatgcaaggagcaagagcttgaatgaatgtgaggctgtggatgccataaacaacaatatagttgaattggatgcggtcaatgaagatgcgaggtgcaaaagcttgaatgatgaatcagagctggttgaagaggaatttaagagcccaagctttgatgacatgaacaccgtggatgagcacgtcaatggcacagacacggatggattatgtttgggatttgtggaagttgaagcggtgcctgctgtacatgaggcaatgcctga

SEQ ID NO: 127829 - DNA, 3515 bp, Zea Mays
agccaccatgcccgactccgctgatcccctccccacgcaaccctcgccggatcccgacatgccgccgcggaagcctctcgctggcggcaagctcaagaagccgctcactgacaagcagcgcgctgccgcggagcagcgcctgtcccacctccgcgcccacctcatcctgcgctccctcgactcccccgctggcggggcccgtgccctaccgccgccgcaggaggcggcgctcgatgccctcggcctgctcaatttcttccgcctcgacctgcaatctgacaccccgcgccccgacctcatcgctccgctcgtcgcctactacgacccggtctgcaagcgcagcttcgtccgcggcgtccgtgtcagcgtctcgcgccaccacatcacccgcgcgctctgcctaccctcgaagcccgcctccgcagcgccggccccagcagacgtcgatcccgcagcggtggtccctgccgttatgcagctcctgcaggattacgtcctgctcccgtttcaggggggcgacatgtgcatactgccgcaggaggtggccgccgcagagcagatggtcagggagggggcggcgcatagggttgattggggagggctgatctggggcctcgtcgagaaggagatgctcgagctgcccaagagggaagacggggtgtgctactatgggccgcacctgcagaggctcatttattccgaaaagccacatctgttggagctggtggaggaagggcctgttccggaggcgtccgctgatgtggagatggaggatgaggatggtgatgtggatttgaaaagcaagaacttggtggaactggagccgggggatggggatggagaagcgggtaacgatgtcagaagcgagagcttgaaggattcagaattggggaatgctggtgcaaggaatgatggtttggacaagttggagttgggggatgctgttacaaggaacaaggtcatggaggagttgggtttaagggatgtagatgctaggaacaacagtatagaggaactagaggtggtcgaggaagatgcaaggagcaagagcttgaatgaatgtgaggctgtggatgtggatctggatgctatggacatcaatataaatgacagagagacgatcaatggagatacaaggagcaagagtttgaacgaatctgaggctgtggatctggatccagatgccatggaaaacaatatagatgaaatggagacggtcaatgaagatgcaaggactaagagcttggatgaatttgaggctgtggatgtggctccagatgccatggacaacaatatagatgaaatgggtgtggtcaatgaagacgcaaggagcaagggcttgaatgaatctgaggctgtggatgccataaacaacaatatagttgaattggatgcggtcaatgaagatgcgaggtgcaaaagcttgaatgatgaatcagagctggttgaagaggaatttaagagcccaagctttgatgacatgaacaccgtggatgagcacgtcaatggcacagacacggatggattatgtttgggatttgtggaagttgaagcggtgcctgctgtacatgaggcaatgcctgataataatgaagaaacgacagaggaagcaccagcagggggtgctgatgtggcaggcagtgataatgtggcagtgcctacagatgtggattgtgaagaacactatgttgaggcagtagttgtaacacaagaggtagtggctgttgcagaggagttgggggatgaggaggccaagagggatgaagagaaggatgtgatgggattgagcttgggttttaattctaccaatggttatggtgctatggatgtggaaaaggaaaccaatgttgaaagtttggatgaggacgagagtgacagtggcaatgaagaggcagaagagtcagaggatggtgcatttgacgttaatgatggagaggacatgaattggagaattggggatgtcaacgggggtgagggaatgacacattccttacaacgctgtaacacatttgggggcatggagtttgagaacctgaataaaggagaggatgagatgagggatgagttaagatttgacgattttcctgcaagggcatctttggaaaggatgacatcatcaaacctcctccaagccatgaactcaattccctcatcatacaatgtatcagagaatgtgcatgatctgccctctggggatttcttggctatgggggctgatgcacataagagtggagtggacctgggaccagggagctcatatttatttgggaataatggtaagaggaatattgatgatattgatgggtacaatggcaatatgcaggtgcaagaggggtttcctcggtctaatcagcagaagaggatgcggcatagtaacagtagcaacatatcacctggatcaggctttttcaatgcaagcttttcggtgcctatacagaacttgatggttgaggcaagcaggctctatgagcagaatgagcaaaaacttcagagtttgcaatttgagaagcaacattggtctgacatgctgcagcagaaggaagccattatccaatccctaaactcagctcgttttgagcaacataataagtatcaagcggagcttagacgcttcgagcatgatctgaatgttatggctcagttggtcactacatacaaaaaagctttaaaacagacccgggcttcttttgatgagtacaggaagaagttcccttgcaatgttcctctttatggtgatgttgcttgtggcggtggtcttgttcttagtgtgagggagttggagaaaaggcggtgtgaggagcagcagcaaaatattgccatggtaaatggtatgattgaaagattccagtacaaatggctctcaaagtttgaagagtggggactttctgtcaattcactgtggagcagaatggaaggactctataaggagattgagcttctcaaggaaaacagaagagcaagatttgctaccccagctacagaggaatctaccctagctacagaaggatctactccagctacagaggaatgagctccctgacaatcagaggttcagttgtgatgtgaagatgactccctattactgccctaccctctgctggatgttttggtgtcaacgagcatacaagagcaattgtggctgcctggtggtggtacatactgtagtaagataaatagtttcgcttgtaactatggttgtttcctcatgtagggacgttttgattattagtgcttaatttaggtgcatttagggttccgtaatctatatcaaagtgtgcgtttcatatccttttttatgcactaacgacgtgctcatggcctcggaaagccatttaaagactgcatatgctagtggcaccactaatccatactgccttcagcttaactgctggtagtagcttctgcacctgactagtggcctagtgggcggatactgctaggccatgaacaagtttcaggtatcatacgcgatgcactagctgcatttggctctagtggtttgaacgctaatctct

SEQ ID NO: 127830 - DNA, 702 bp, Zea Mays
gtggcattcaccgtcctgaagtcacgaattcgaattcaccgtcctgcagttgagcctgacctcccccgcggaacccgtgagcgggccgatgttgccgagcttgaccatggacgcggcgaagtccgacgagaaggcgtcggcgttggtgccgtagaggcgcacgagcgagtcgagtgcgccgttgctgaagagctcctggtccgagtgcagcaggccggcgccggccatgaggctccggtagtagccgttgtcgaactggtcgggggtgagcgagtcgagcggcgcgagcgcgtcgtcggcgtcggccgacgggcaggcctggcgctgctgcgcggcgaacgccgggctcacgttgtcgtcgcagtagacgcgggtgcggaagctggcgcagcgcgccatccccaccgtgtgcgcgcccgacagcgccgcgaggtcgcgcgggctcaggcccttggcggcgaacccggccaccaggccggccaggtcggagtccgggcccgggaggtccgtcgccgcgcccgtgctgttggggaacgtcgcgtcgcgccggcccagcggcacggcccagctcgggccgccgagctgccacaagtccaggttgacgccccagaggagaaggagaggagagcagatagagaatactacactacgtcatcgattggggggaaaagcaaggcacggaacgaacagagaccaggttga

SEQ ID NO: 127831 - DNA, 996 bp, Zea Mays
ctactatcccatatgagcagagcgagggcgtccaccacctaccgtgcccccgcccggccccgcgcatcccgctccccgaaaacctctccctccgtgccagggctcatccccaccgtgtcgtagccgccatcatcgcccaaatcctcgctcgccccacgccgcgccgaaatcctcatgccccacgcctgcccctgcccctgcctcccaaaccgcgcccattcgaaccggccgcccgaatctagcgcaagcacgcaggcggtgatgacggccacgggagacagccggcgctcggcgtgattcccgccccgccgcgagccaagaggttcgaggtcaagttcgcggaccccccgccgtgccccgcgctcccacgcccgcacaggcatctagcccccatccccctcccgctcgagatatccgccgatctagcctgtcggggggtccgcgacgtgtggaagggtgagcatcgacgatggcggtagaagaggaggaagccttcgatggtgcgctcaccgacgagcagctgcgagagatgaactcatccctctgcttgatgtcctagcaaacaaagtgaacgctatcaggaggcttagggaactcttgacaaccaatcttcctacaggcacatttccagtcaaggaagtcatagctgctacaatgataagaagaaagtagaggaaaaggaacagatctcgactgtaattctgcagatgaagcataccaataaaaaggcatatgaccagactctgtaacaatatctgcacatcagtaccttggcagactctccaagcagcaaacaaagtgaaggctatctggaggcttagtgaactcttgacaaccaaacttcctacaggcacatttccagtcaaggtaaactatctggcaccttggttacattacccgtgcttccagcagattacatcttgccatttattccaatcacaatgcatggttcaatccaatcatgagaagtggcaatctgtgaggtttttgcaaggt

SEQ ID NO: 127832 - DNA, 1200 bp, Zea Mays
ctactatcccatatgagcagagcgagggcgtccaccacctaccgtgcccccgcccggccccgcgcatcccgctccccgaaaacctctccctccgtgccagggctcatccccaccgtgtcgtagccgccatcatcgcccaaatcctcgctcgccccacgccgcgccgaaatcctcatgccccacgcctgcccctgcccctgcctcccaaaccgcgcccattcgaaccggccgcccgaatctagcgcaagcacgcaggcggtgatgacggccacgggagacagccggcgctcggcgtgattcccgccccgccgcgagccaagaggttcgaggtcaagttcgcggaccccccgccgtgccccgcgctcccacgcccgcacaggcatctagcccccatccccctcccgctcgagatatccgccgatctagcctgtcggggggtccgcgacgtgtggaagggtgagcatcgacgatggcggtagaagaggaggaagccttcgatggtgcgctcaccgacgagcagctgcgagagatgaactcatccctctgcttgatgtcctagcaaacaaagtgaacgctatcaggaggcttagggaactcttgacaaccaatcttcctacaggcacatttccagtcaaggaagtcatagctgctacaatgataagaagaaagtagaggaaaaggaacagatctcgactgtaattctgcagatgaagcataccaataaaaaggcatatgaccagactctgtaacaatatctgcacatcagtaccttggcagactctccaagcagcaaacaaagtgaaggctatctggaggcttagtgaactcttgacaaccaaacttcctacaggcacatttccagtcaagggagatgagctcaccttggcaatggtagttaatcttattaatgcaaacaaggatgattaatttgatgtacttttctatgcctcgtggtgcccattctcacaagaatgcatttgaggaatctgcaattaggccaaggcgtcccacacaggtgtttcttccataagaagactaccgacatgggatacgtctcttcagtttgtttgtcaatattttgtaggaatcagaagaggtgttcaacatgtgggttaattttgttttcaagtgtgctcctctaatgacacccttttcttttttggagtaccttttgataataacaaatttgggttctatttt

SEQ ID NO: 127833 - DNA, 2173 bp, Zea Mays
ctactatcccatatgagcagagcgagggcgtccaccacctaccgtgcccccgcccggccccgcgcatcccgctccccgaaaacctctccctccgtgccagggctcatccccaccgtgtcgtagccgccatcatcgcccaaatcctcgctcgccccacgccgcgccgaaatcctcatgccccacgcctgcccctgcccctgcctcccaaaccgcgcccattcgaaccggccgcccgaatctagcgcaagcacgcaggcggtgatgacggccacgggagacagccggcgctcggcgtgattcccgccccgccgcgagccaagaggttcgaggtcaagttcgcggaccccccgccgtgccccgcgctcccacgcccgcacaggcatctagcccccatccccctcccgctcgagatatccgccgatctagcctgtcggggggtccgcgacgtgtggaagggtgagcatcgacgatggcggtagaagaggaggaagccttcgatggtgcgctcaccgacgagcagctgcgagagatgaactcatccctctgcttgatgtcctagcaaacaaagtgaacgctatcaggaggcttagggaactcttgacaaccaatcttcctacaggcacatttccagtcaagattttcatgtgaatgatgacttgtcttgatggaccttaaaggaagtcatagctgctacaatgataagaagaaagtagaggaaaaggaacagatctcgactgtaattctgcagatgaagcataccaataaaaaggcatatgaccagactctgtaacaatatctgcacatcagtaccttggcagactctccaagcaggtttgtacgatcacatatgtaaaaataaagtagataccctccaaattcggatctgaaaatataattgcaacccagttagcagaatagtgcaactagaaagcttgaatgattggaggagagcaactgtagcttacattgccctcagtgttaaacgattctccagaagcaactggtccatgaatataagtctgttgaacccaacattttctttttgtcagagacacaatgccttcggatactgatattgagaaattgtaaatttataatttatagagaacctgagtatttgtgatgtgagggaagtataagctggctttgcagccattgcttggccaccctcctccaataacattgtctggtcttctgctttgactgaactgtcatccatcactgctagattgacatctgaatgtctactgacaaagatgactgttggttgattcctcactgtgtcttgttgttgtcgtagtttcgttcaatcattaatggcacccattagtcgccaaagatgttgtcctgttacaaatattctgatgttcctgagaattagtaatcgaattacccattggtcgccattgtttgaaatatattctcacaacttctcttactgcttcattgtatgaaatattaagaaacaaactaaatgatagatatttaaatgttccagtttctaattaatatatgtggaatatattctattgttgttagcatgggttaagaccagtgttgtggttgacaccggatttccctctgaacactgatgaactcatccctctgcttgatgtcctagcaaacaaagtgaaggctatctggaggcttagtgaactcttgacaaccaaacttcctacaggcacatttccagtcaaggtaaactatctggcaccttggttacattacccgtgcttccagcagattacatcttgccatttattccaatcacaatgcatggttcaatccaatcatgagaagtggcaatctgtgaggtttttgcaagggagatgagctcaccttggcaatggtagttaatcttattaatgcaaacaaggatgattaatttgatgtacttttctatgcctcgtggtgcccattctcacaagaatgcatttgaggaatctgcaattaggccaaggcgtcccacacaggtgtttcttccataagaagactaccgacatgggatacgtctcttcagtttgtttgtcaatattttgtaggaatcagaagaggtgttcaacatgtgggttaattttgttttcaagtgtgctcctctaatgacacccttttcttttttggagtaccttttgataataacaaatttgggttctatttttgtttctagactcaa

SEQ ID NO: 127834 - DNA, 1319 bp, Zea Mays
ctactatcccatatgagcagagcgagggcgtccaccacctaccgtgcccccgcccggccccgcgcatcccgctccccgaaaacctctccctccgtgccagggctcatccccaccgtgtcgtagccgccatcatcgcccaaatcctcgctcgccccacgccgcgccgaaatcctcatgccccacgcctgcccctgcccctgcctcccaaaccgcgcccattcgaaccggccgcccgaatctagcgcaagcacgcaggcggtgatgacggccacgggagacagccggcgctcggcgtgattcccgccccgccgcgagccaagaggttcgaggtcaagttcgcggaccccccgccgtgccccgcgctcccacgcccgcacaggcatctagcccccatccccctcccgctcgagatatccgccgatctagcctgtcggggggtccgcgacgtgtggaagggtgagcatcgacgatggcggtagaagaggaggaagccttcgatggtgcgctcaccgacgagcagctgcgagagatgaactcatccctctgcttgatgtcctagcaaacaaagtgaacgctatcaggaggcttagggaactcttgacaaccaatcttcctacaggcacatttccagtcaagattttcatgtgaatgatgacttgtcttgatggaccttaaaggaagtcatagctgctacaatgataagaagaaagtagaggaaaaggaacagatctcgactgtaattctgcagatgaagcataccaataaaaaggcatatgaccagactctgtaacaatatctgcacatcagtaccttggcagactctccaagcagcaaacaaagtgaaggctatctggaggcttagtgaactcttgacaaccaaacttcctacaggcacatttccagtcaagggagatgagctcaccttggcaatggtagttaatcttattaatgcaaacaaggatgattaatttgatgtacttttctatgcctcgtggtgcccattctcacaagaatgcatttgaggaatctgcaattaggccaaggcgtcccacacaggtgtttcttccataagaagactaccgacatgggatacgtctcttcagtttgtttgtcaatattttgtaggaatcagaagaggtgttcaacatgtgggttaattttgttttcaagtgtgctcctctaatgacacccttttcttttttggagtaccttttgataataacaaatttgggttctatttttgtttctagactcaagtctagagttccatgaattaaaatattggtttatttgttgtggccacctatggtctcattatc

SEQ ID NO: 127835 - DNA, 1040 bp, Zea Mays
atcctcatgccccacgcctgcccctgcccctgcctcccaaaccgcgcccattcgaaccggccgcccgaatctagcgcaagcacgcaggcggtgatgacggccacgggagacagccggcgctcggcgtgattcccgccccgccgcgagccaagaggttcgaggtccgcgacgtgtggaagggtgagcatcgacgatggcggtagaagaggaggaagccttcgatggtgcgctcaccgacgagcagctgcgagagatgaactcatccctctgcttgatgtcctagcaaacaaagtgaacgctatcaggaggcttagggaactcttgacaaccaatcttcctacaggcacatttccagtcaagattttcatgtgaatgatgacttgtcttgatggaccttaaaggaagtcatagctgctacaatgataagaagaaagtagaggaaaaggaacagatctcgactgtaattctgcagatgaagcataccaataaaaaggcatatgaccagactctgtaacaatatctgcacatcagtaccttggcagactctccaagcagcaaacaaagtgaaggctatctggaggcttagtgaactcttgacaaccaaacttcctacaggcacatttccagtcaagggagatgagctcaccttggcaatggtagttaatcttattaatgcaaacaaggatgattaatttgatgtacttttctatgcctcgtggtgcccattctcacaagaatgcatttgaggaatctgcaattaggccaaggcgtcccacacaggtgtttcttccataagaagactaccgacatgggatacgtctcttcagtttgtttgtcaatattttgtaggaatcagaagaggtgttcaacatgtgggttaattttgttttcaagtgtgctcctctaatgacacccttttcttttttggagtaccttttgataataacaaatttgggttctatttttgtttctagactcaagtctagagttccatgaattaaaatattggtttatttgttgtggccacctatggtctcatt

SEQ ID NO: 127836 - DNA, 197 bp, Zea Mays
ataacttatgcggacaggttcccccatccaccagaaggtaaataagtatgttgtacttttgtatcatacgatattcatttatgtcttaagtattgaactttatatttctgtttgtgcaggtaaatactatcttgtggattcaggttatccaaatagaaaggggtaccttgcaccttataagggtcagaagtaccaca

SEQ ID NO: 127837 - DNA, 1078 bp, Zea Mays
atcgtggcagcaatcagcacggggtgtcggcaggtggtgtagtactctgtactggtagcgccagccagccagcagtggtcggggcgaccgtgcgatgatcgataccaggcaaacaaaggataaggatgcatggctcactgaccaggttgacgccgtcgcgcgcggcgagggcgaggatgtcggcgcaggagacggtgccggggcaggcggcctccacctgggacttgatggagtcgatgacctcgaagccgcgcagggagttggcgttgggccccgcgttcttctcccccgtcagcgtcggcgagtcgtcgaggagcacggacgcgtcgcacccctgcatgggcaataataataataataatggagtgttggatggatggcgcggcgcgacgcatactgacgaccagcagcaagcccaaggcgccacgacatgcatgcttacctggacgaagcagtcgtggaagaagaggcggaggatggaggcccccatccgcggctcctgctgcacggcggcggccatcccggcccgcacgatggcctgcaggctggggcagctcgcgtcgtagaacgtcggcgacagctgcgccatggcgccgagcgccagcgcgcacgccacggccagtctcgccagtagcaaggtcgccggcgccatggaagattgatttgggattgggttagctgtgctgtcgtcgatggtgtcccagcacacactgcgcttctgagttatatagtgccctgtgccccatcgcgcgcggtggttacgtagtacatctgtacatgcgtgggccgacacgccacagggccggcagagtttccagtccgtgagcgcatggcgcgcgccctaccctgcaggatcaaattgcccggttacttaaaacacttcaactgcaatacatgtctgtctctatccgtcttgcctttagatcggctggaagccatagccaggccagtggtacaatgtgcatgtgcggcgcgcgtacatccgccgtgttactacggtgctgtttggtaccgaaactctaaggcatggtactcctatcgtcctaccgacgtggtatatcgaggctaattttaagat

SEQ ID NO: 127838 - DNA, 1017 bp, Zea Mays
aaaatcgaacaaagtaaactgaagcataataaattggttcatccatcatcacatccttttcctgatctttttctctcgtcttagctcctctcgtcgcacgaggcagatctagtaaattaattaagcataaacaaagaaagaaggggatctgactcagagaatcaagaccacgagtcgcacgaaaagcatgttctgaggacctcaccctagaacgagtgctccttgagagtcccagggagcaaaagcaaacctctcgccctctgcagtatctgcgaccaagaaatcggatttgtttcggggctccaaggcagcggctggcggacgctgctgccgcgcgtgctgcttctggtggcgagggggcagaggcaaggcagcggctggacgctgctaccgcgcgcgagctacttctggtggcgagggggcagaggcagtaacctgagaatcttgggcgctcgcactgtgtcgctcgcgatgtgtttcttgctggcgctacaggagctgaccttgtgaggggaaggagatggagttgaagacgacgatggtgcggcgacagaggtgctcacggggatggcgtcggcgaggctaggcctagcatcgcggggagccggggcgatgagggagatgctccaaggcaaggttggcggcgccgtggaaacgcctggcctcccgatgccagggttttttccgaccggaaaagatgtttctctggaggaaagtctatcgagtgtttgcgcttccaaacacgcagaatactctttcgtggccacagcccacaagcgccactctcctgtgcgggctgcactcaaccatccagctgcggtaatgatcaggtcatgttggtttcggttttgcgatgcagagtgggatgaaagcgctgtcgtgctcatgcgctggctactgagaggacagggcacagtcgcctgtgactgcgcaagagatggagataaaacatcaatgtctcgatgcccgctaagagcctgtgtgtatgggcctgagactatggacgattactactag

SEQ ID NO: 127839 - DNA, 1926 bp, Zea Mays
ccggtacggtattctcgaaattctcctgtccttgcctacaaaattcctcattctcgtagcagcgtagtgggtggcggtctggcggaggacaggaaggaaaaacaaggcgaaaaaggaggttcggggcgggttccatggcgctgccttcctagcccagccgcctcaccaacctccctcctcaccgaggagagaccgaggcgccaagagagaacaggacactacgagaagaggaggttcatttccgcgtcgtctccgccagcagccccacccaccacatggcagccatgccgggtggggcccacgccgccggcgccgcggaccagatgcaggtggaccagccgctccccgctgcggccgcacacggccccgcggacgccaagcatgctggttctatgattgaagggaatgatccagtcacgggtcatataatctcaacaaccattggagggaagaatggagagcctaaaaagactatcagctacatggcagagagagttgtgggaactggatcattcggaatcgtcttccaggcaaaatgtctggagactggtgagactgttgctatcaagaaggttttgcaggacaagcgctacaagaacagggagctgcaaatcatgcgatccatggatcactgcaatgctgtttccttgaagcattgtttcttctccaccacaagcagagatgaactttttcttaacttagtgatggagtttgttcctgagtcactacatcgtgtgctgaagcactacagcaatatgaaccagaggatgccgcttatttatgttaaattatatacctaccagatatttcgaggtttagcctatattcacacagtacctggtgtttgccacagggatgtgaaaccacagaatcttttggttgatccattgactcaccaagtgaagatatgtgattttgggagtgccaaaatgttggtcaaaggtgaagcaaacatttcatatatatgctcacgttattaccgtgctccagagctcatatttggggcaaccgagtacacaacatcaattgatatttggtcagctggatgtgttcttgctgagctgcttcttggccagcctctcttccctggcgaaagtgctgtggatcaacttgttgagataataaaggttcttggtactccaacacgtgaggaaatccgttgtatgaatccaaactacaccgagtttagatttcctcagatcaaagctcacccatggcacaagattttccacaagcggatgcctccagaagctatagatctcgcttcacgtttgctccagtactcaccaaatctaagatgcactgctcttgaagcgtgtgcacatccattctttgatgagttgcgagagccacatgcgaggttgccaaatggacggccatttcctccactgttcaactttaaacaggaactagcaaatgcctccccggagctcatcaacaggctgatcccagaccatgctaggcggcatcttgggctcactttattgcccaccgctggaccataggcgaaggctctatggtgtttaaaccttgctctttctgattcttcgttgtgccataggcaattcaaggtgtagaatctgaccattattggaaagccaaacacgagctggcgccaatgtgttgcataaggagaggcggtatgttcgtgcagccagccttttgccgcctgttttaatgcaaaatctgattttacttaagcagtgtgaggggaagtgggttggtgtattgttaagctattgaaggaattcaatccctggtattgtattactttctccaacgttaaatgttgtagttcgcctgtaagtgttccacatcgcctgttatcagtccgcaatccttcgtgtaaatgttattaatgaaaaaaatacatcttgctatgttaccgatcgactcattccaatcacattccgtcctgttgcaaac

SEQ ID NO: 127840 - DNA, 926 bp, Zea Mays
ttatacccagccaaaatggacttctctgtaagccccaactgttaaaaagggaccatgaaggtcttatattgccttatctggactacctttgtcaagactcaagaagtcaggaggctgttagcattgacagagttggaagcgtatactgctcttagctggatttcaattcagcactgtaattccttgtgaaattctctccttggaaatgaaattactggacttgcataacaggacttagagtgtcttctttaagaggacaatgttgtaatgcatcaaccatcaagtctgagatgcctagcctaaccaactcctgctgtgattttattgctaattttggtagctcttgcagcttgaagcgtgtgcacatccattctttgatgagttgcgagagccacatgcgaggttgccaaatggacggccatttcctccactgttcaactttaaacaggaactagcaaatgcctccccggagctcatcaacaggctgatcccagaccatgctaggcggcatcttgggctcactttattgcccaccgctggaccataggcgaaggctctatggtgtttaaaccttgctctttctgattcttcgttgtgccataggcaattcaaggtgtagaatctgaccattattggaaagccaaacacgagctggcgccaatgtgttgcataaggagaggcggtatgttcgtgcagccagccttttgccgcctgttttaatgcaaaatctgattttacttaagcagtgtgaggggaagtgggttggtgtattgttaagctattgaaggaattcaatccctggtattgtattactttctccaacgttaaatgttgtagttcgcctgtaagtgttccacatcgcctgttatcagtccgcaatccttcgtgtaaatgttattaatgaaaaaaatacatcttgctatgtt

SEQ ID NO: 127841 - DNA, 345 bp, Zea Mays
gatacatgcagctagctcaagggaaaggcagagactccttgctagctagccatggccttctactatgcaatagcattgcttggcatgcttgctgtcttctcctcgtgggggaatgcactcgatgacaatatgctgaaaaccacggtatacatacaacagcttccctaccaaaaccagagaggtgtagcagaaggtacggcagtaattagctggtacataaaggatgggccaggtgcttctgcgaatacaatcgggcatgcggagggcctggtaatcttgacagatatagccaggtcttcgtgcctaatcactacggacttggtgttcgacggtggaagtttttag

SEQ ID NO: 127842 - DNA, 276 bp, Zea Mays
atgacgacataccgacttgacgctctcaacaggtacgagccattctcctccctggggttcaaattgatcgaaagcgtagagttggctcctctcaaggagctgatcgatcccctgacaggtcgtccgaccccatccggcaacggcaacattggctcctcctattctgtgttctacgacttgtatggcaacagcaacggcaacggcaattcactcccgtggtcgtgcccgctgtctccaccagttcgtcgctgccggggcctgcctgctagcccctag

SEQ ID NO: 127843 - DNA, 270 bp, Zea Mays
atggatttctcctctgaaatctcgctaaaacgcagccaaggacgtcgtgaaggagcaggaggccggggcgagctcgagcaggcaggacgacgggtgcgagctacgacagggagggctctggaaaccgggctgggcgcgagcacgggagggacgccgagggagctgcgcagcagggaagaaaagcgcttgaaactccatggcgaggtcgcggcaccaggggataagctcaccggcgtccatggccgatggaggaagctcgcaggggcgcgg

SEQ ID NO: 127844 - DNA, 246 bp, Zea Mays
atggcgcgatcgagctcctccctgctcgcgctgtcgtctcgcctgttcgtccctgcgcgctcgcccatccgggctctgcccagcgccgtggcttccagctcgctctccagccttcctctttcctgcgcgtgcgttccgttattcctgcgcgtgctgccgcaaagctctttgctcgtcaacgctccagcccggatttcgctttgtcgcccagcttggctctacatctcccatggctgtctgctctag

SEQ ID NO: 127845 - DNA, 1254 bp, Zea Mays
tcgcgattaatatatataatcaataaaacaaaccagatagccaaggcaatgagtccgtgcaccacaactaattaaaactcgaattaacgagatcgacgatgatctacggttcacccattttaccaaacatccgagaagtgctgcgctaaagctattttcaccacacaacagcacaccgacacgacaacggatctagccatagctaccaagcgcacatatactaaataaaaggatcatcgcactaacccattaatttatttaacgtttatcacgaataacccatccactcaccatgaccaaaacgatttgaaaatcgcaaatcgacgatgaatcatggttcgggcgttttgccgaacactaagcggacgctgcacgaaccttcacggcctacatcatctagctttcctcactaatcgcatattgcgattcaaacgcatgaacataggaatgatgtaaatcatcacacgatactaaaacggcgtcgatcacaccatatattttgaacacccacctgctcacctatctgtggacgccggcgacgcttgtaacggcaagggcgagactgacgatctgggcacatcaacatgcggagacgcatgtccatggcgaggacgagtagatgagcagggacgagcttaggcgaccgtcaagccatgacgacgtgagggcgaagtcgacgacgagcaccatggagagaacgacgctgttgctgcagaagtcggagacaatgataattattggtttcggcatttcatcgaacatctagcggacgctgtactggggctgcttcttttcgctagtccacatggatttctcctctgaaatctcgctacaacgcagccaaggacctcgtgaaggagcaggaggccggggcgagctcgagcaagcaggacgatgggcgcgagctgcggcagggagggctctggaaaccgggctacgatcgagcacgggagggacgccgagggagctgcgcagcagggaagaaacgcgcttgaaactccacagcgaggtcgcggcaccaggggataagctcaccggcgtcaatggccgacggaggaagctcgcaggggcgcggtgagcagaggagcacgcgcgtcggggcaggactccgggtggcggcgcgctgggagatggcaaggccgagctcgacgttggggcgagcgccggccatgggaaggagctggagacaccgcgagggagcaggagcagagagagctgcacgccatgggaggaagacgtgagggagagagaaga

SEQ ID NO: 127846 - DNA, 140 bp, Zea Mays
atgcctaccacatgcactatttacgctaaaaactgtaggattttatgcttgaacacggagttcgtatatcagtttactgcatgcatattttttgcatgcacattagaaagacaattccttgatttatgttgttcgtaatt

SEQ ID NO: 127847 - DNA, 99 bp, Zea Mays
tggtgtgttggacaactctgtggatctgctcgctgccgccattataatatagctagtagtatactacaacaaaagaatctttcgatccttgcaacaaag

SEQ ID NO: 127848 - DNA, 2200 bp, Zea Mays
tacccacgccctcgccgccgcccccgctcgcgctacacttcgcttccccagtctcccctcccccgctcactatggcgtccacaccgcggctcgctcgcctcgccgcagccgtcgcggcgtggatgctagccgctgctgcttctgctggtgtggaggccggggatccgccgctttcgcccaaggggctcaactacgaagtggcggcgctcatggcggttaagagccggctgcgggacgagaggggggtcatggccctctgggacatcaactccgtcgacccctgcacctggtccatggtcgcctgctccccggacaagttcgtcgtctcgctccagatggccaacaacggcctgtccgggacgctgtcgccgagcatcgggagcctcagccacctccagacaatgtcactacagaataacagaatatcaggtgaaattcctccagagatagggaagctgatcaatctgaatgctcttgacctttccagtaatgagttcattggtgatatcccaagttcattggggcacctgactcgactaaattatctacgccttgataggaataacttgtctgggccgatcccaacagatgttgctaggcttccaggtctcacattccttgacttgtcattcaacaatttaagtggcccagttccaaaaatctatgcacatgattacagtcttgcgggaaatcgattcctttgcaattcctcagttatacatggttgttcagatgtgacagcaatgactaatgggacaatgtcgagacaggtccaaaaggccaagaaccaccatcaattagctttggcaatttctctaagtgtcacctgttccacaatattagttttgttgttcgtgtattggctaagttattgcagatggcgcttgccttttgcttcagctgatcaagatctagaattcgaattgggccatgtgaagcattttgcttttcacgatctgcaaagtgcaacggacaattttaattccaagaatatattaggtcaaggaggttttggtattgtgtataaaggctgtttgagaaatggaactttagtggcagtgaagagattaaaagatcctgatgttaccggtgaagtccagtttcagacagaagttgagttgattggccttgctgtgcacaggaatctcttgcgtttgtatggattttgcatgacctctaaagaacggttgcttgtatatccatatatgccaaatggcagtgttgctgaccgtttgagagattatcgcaatggaaaaccatctcttgattggagtaaacgcatgcggattgctcttggtgctgccagggggttactctaccttcatgaacaatgcaatcctaagatcatccacagggacgtcaaagctgcaaacatattgctcgatggaaatttcgaagcaatcgtcggggattttggattggcgaaacttcttgaccgtcaggaatcgcatgttactactgcagttcggggcactattgggcatattgctcccgagtatctctcaactggacagtcctcggaaaagactgatgtttatgggtttggcattctcctgttggaactgattactggtcctaaaaccttgagcaatggacatggccagtctcagaaaggcatgattctagactgggttagagagctaaaggaggacaagagaccggataagctggtcgacagggatctcagagattcatttgatattcttgagctggagtgttcagttgacgtgatcatccaatgcacgcagacgaaccctatgctgcggcctaagatgtccgaaattctgcacgctcttgaagccaatgtcacgctggcggaaaccagcgtcgagttgaacagggaacctcttccttatggtgtgcctcgcagtttctctgtgaggcatgaggacccccacgattcgtcgtccttcataatagagccaattgagctatctggtcccagatgacagctgttgtcagtgtggttgaggcgaaaagaaaagaaagcatggaaacaatacaattgtacaaaacatgtatatcgtggatgtagttcaacttagcaagagtttgctgggcgtgttgccataccttacataatattttgaacgtggagctggagcgaaccttgttggctatttttgttgcttacgttttcatctgccatccatgaggcactgaggcggtcatgcatttttgccgaaaattttccgccaga

SEQ ID NO: 127849 - DNA, 2310 bp, Zea Mays
agaaacaacattatcccctgtatttatcagtattaataatacagcatgtcgtgaaaggtagagaagatagagagaaaagaatatcagcagaaactgtaaaaagcagtccgatttcagtagctcagttgacgccctgcagtttcagtgttggttctgtacatagcatgggcggcaatactgcgatatcagcagtgccgtgccgcaatgaaatgctgaatcttatgaacaaagatgtcgcgcagaattcagaaattacccttgcctttcgtaataggtacaagcatcaatcaagtgtccgaaagcatcccattcgtctgaagcaggggagggatgctctgctcgctccagaacacctggtcgggatccacctcggccttcaccatggccagcctcctgaagttgcccctgaagtacatctccccccacgccctggccgcctcgtagctcgtctccccctccaagttctgccccaggtccaggtccctgaagttgacgtacgccgcccggggcctggcgctcgcgtacggcgtcatgaaccggtgcacgccacgcacccacgccaggtgcgcgtcctcgtacgacacgttggcgtcgccgccccacttgacgaagtactgcacgttgtacaggtaccctcgccggtgcgcgtacggcgtgtccgactccggcgtctcgctcatcgccccgccctgcgggtccacgtcgacggacccgcccctgtcctccacgaccctggcgaggagcccgcccagcccggccgcggggatcggggacgtcaggtgggcgctcatctcggcgaccatcccgctgcagttcccgaggaacagtgacttgaaggtcaccgatggatgcctctcgccggcgtcgtcgacctccggctccatggccaccttcacgaacaggtcctcgggaagcgcgtgcgccacgcgctgccattttgtcaggaggcggacagccgcctgggtctgccgctggtccccgcggcgcacgaggcggcgcacggtgaaggcggaaacgacgggcggcacgggaaccagccgcaccgtccaggagaccacgacgccgaagctcccgccgccgccgccgcggatcgcccagaagaggccctcgcccatggcggcgcggtccaggagcctcccctcggcgtccaccacctcggcgtcgaccacgttgtccgcgccgaggccgtgcttgcgcatcatgggcccgaacccgccgccgctgaggtggccgccgacgcagaccgtggggcagatccccgcggggaacccgagcgccccgccgctctcgcgcgtcacggcgtagtagagctccccgagcgtggcgcccgggccggcccgcgccacgcggcgcccggcgtccacgcggacgtcgcggagcgcggcgacgtcgaccacggcgaagggccgggcgcccgccacggatcggtaggagaggccctcgtagtcgtggccgccgctgcgggcccggaccgtgaggccgtggcgcctgcagcaggtgacgcaggcccgcgcctcggcgacggtcgccggggtcagcagcagcgccgggcgcggcgtccgcggggacgcgaagcggaggttctggatcgtggcgttcagaagggaagggtacgaagcggccgacggggcgtggacgagcctggacgtgtcggtggtggccggcgagaggcgcgcgacgcagcggacgaagctcccgtggagggcgccgccgccgccttgctcctgcggggaacaagtctgggcgaggagcagcaggaagaggaaagggaggtgccaggatcttggtcgcacagccgccttcgtcttgctcatcatctcttgcacttacacggttacacctactctcttgccttgcctcgggtgtgcttttgtggattagttagtaacttgagacgctgatggcctttgaaaaatatgaaaacagagtgataaaataatatactggacactaattttacaaaaattcactggaacccaggcataagataattcgcggcagcagcaggtgggaaagagagcggtcgccgttgcaccgtcgttttcaggtgccgccagctttcaacgttagctcaccgtcactggtggcgtttcctgtatgcgtagggaaggggtatcgaggtgagtggcattgttgagatgaagacgatggcagctgacgggcgctctgcagccatgtatgatatgtattggcatgttctaggccagaaaggggcaatcaaagatacttgatgtatgtgttgtatgtgttttatatatgtatgtgtctagatttattatcgatcatttaaatagacaaaaaaaatcaaca

SEQ ID NO: 127850 - DNA, 2011 bp, Zea Mays
gtcgcgcagaattcagaaattacccttgcctttcgtaataggtacaagcatcaatcaagtgtccgaaagcatcccattcgtctgaagcaggggagggatgctctgctcgctccagaacacctggtcgggatccacctcggccttcaccatggccagcctcctgaagttgcccctgaagtacatctccccccacgccctggccgcctcgtagctcgtctccccctccaagttctgccccaggtccaggtccctgaagttgacgtacgccgcccggggcctggcgctcgcgtacggcgtcatgaaccggtgcacgccacgcacccacgccaggtaccctcgccggtgcgcgtacggcgtgtccgactccggcgtctcgctcatcgccccgccctgcgggtccacgtcgacggacccgcccctgtcctccacgaccctggcgaggagcccgcccagcccggccgcggggatcggggacgtcaggtgggcgctcatctcggcgaccatcccgctgcagttcccgaggaacagtgacttgaaggtcaccgatggatgcctctcgccggcgtcgtcgacctccggctccatggccaccttcacgaacaggtcctcgggaagcgcgtgcgccacgcgctgccattttgtcaggaggcggacagccgcctgggtctgccgctggtccccgcggcgcacgaggcggcgcacggtgaaggcggaaacgacgggcggcacgggaaccagccgcaccgtccaggagaccacgacgccgaagctcccgccgccgccgccgcggatcgcccagaagaggccctcgcccatggcggcgcggtccaggagcctcccctcggcgtccaccacctcggcgtcgaccacgttgtccgcgccgaggccgtgcttgcgcatcatgggcccgaacccgccgccgctgaggtggccgccgacgcagaccgtggggcagatccccgcggggaacccgagcgccccgccgctctcgcgcgtcacggcgtagtagagctccccgagcgtggcgcccgggccggcccgcgccacgcggcgcccggcgtccacgcggacgtcgcggagcgcggcgacgtcgaccacggcgaagggccgggcgcccgccacggatcggtaggagaggccctcgtagtcgtggccgccgctgcgggcccggaccgtgaggccgtggcgcctgcagcaggtgacgcaggcccgcgcctcggcgacggtcgccggggtcagcagcagcgccgggcgcggcgtccgcggggacgcgaagcggaggttctggatcgtggcgttcagaagggaagggtacgaagcggccgacggggcgtggacgagcctggacgtgtcggtggtggccggcgagaggcgcgcgacgcagcggacgaagctcccgtggagggcgccgccgccgccttgctcctgcggggaacaagtctgggcgaggagcagcaggaagaggaaagggaggtgccaggatcttggtcgcacagccgccttcgtcttgctcatcatctcttgcacttacacggttacacctactctcttgccttgcctcgggtgtgcttttgtggattagttagtaacttgagacgctgatggcctttgaaaaatatgaaaacagagtgataaaataatatactggacactaattttacaaaaattcactggaacccaggcataagataattcgcggcagcagcaggtgggaaagagagcggtcgccgttgcaccgtcgttttcaggtgccgccagctttcaacgttagctcaccgtcactggtggcgtttcctgtatgcgtagggaaggggtatcgaggtgagtggcattgttgagatgaagacgatggcagctgacgggcgctctgcagccatgtatgatatgtattggcatgttctaggccagaaaggggcaatcaaagatacttgatgtatgtgttgtatgtgttttatatatgtatgtgtctagatttattatcgatcatttaaatagacaaaaaaaatcaaca

SEQ ID NO: 127851 - DNA, 89 bp, Zea Mays
cttagacttgcaatcgcaccagatggctatctggttctagaccaagcgtgcacaatgacgctttcaagaagatctagcaggactatgcc

SEQ ID NO: 127852 - DNA, 130 bp, Zea Mays
aaaatgtagatgattgtacgacctttttatttgaccatattatatttagtaattttttattacatgtctatttgtggattgttgtatttatattgtgaaaaaacaaactggaccacccatcactaaaatc

SEQ ID NO: 127853 - DNA, 369 bp, Zea Mays
aagagcgaaaagagaagggtaccatgttgcgtgtccgaatcaggagaagctaatgcagatgagccaaggtcgtagccgaagaggagagcaggtggtgaatctgggggaggccaagatcgggagagagatgattttggggaaggaggggcagagatcgtgttttccctctgtaggatcatcgctgctcgatccgcagctcgtcccgtcactattgtcgtcagtctcccggaggccggagccaccagccgcaccttatcccaactcccacccttccacacagtttgccgtctctcggatctgggagctcagctccggaggcggcaatagcccaggttgagcgcgtggaagagatcgaggaagggggccgct

SEQ ID NO: 127854 - DNA, 102 bp, Zea Mays
tttttttatttttttagatgtcaaatgacttttatacttttttaaaaaatgtagatgattgtacgacctttttatttgaccatattatatttagtaattttt

SEQ ID NO: 127855 - DNA, 418 bp, Zea Mays
acgcagatgagccaaggtcgtagccgaagaggagagcaggtggtgaatctgggggaggccaagatcgggagagagatgattttggggaaggaggggcagagatcgtgttttccccctgtaggatcatcgctgctcgatccgcagctcgtcctgtcactattgtcgtcagtctcccggaggccggagccaccagccgcaccttatcccaactcccacccttccgcacagtttgccgcctctcggatccgggagctcagctccagaggcggcaatagcccaggttgagcgcgtggaagagatcgaggaagggggccgctgggcgggagccgagagatgacagaggcggcaggcggcgtcggtcggcaaggaagacgagcgtgcgaggtagggagcctggcgaggggctagacggctgttt

SEQ ID NO: 127856 - DNA, 135 bp, Zea Mays
ttttttttatttttttagatgccaaatgacttttatacttttttaaaaaatgtagatgattgtacgacctttttatttgaccatattatatttagtaattttttattacatatctatttgtggattgttgtattt

SEQ ID NO: 127857 - DNA, 114 bp, Zea Mays
atttctttggttcttaagagggtgtttttcttcgtaacaccatcttctatagctatgcttttctttgatcacttttgttccttacacagcgtgatccggcctagaggagattcc

SEQ ID NO: 127858 - DNA, 1374 bp, Zea Mays
atggcacataatgttgctcgcacaccatgtgcagacatctcaaacaccattaatacaggtgatcaaaatggatcaaactcgttacgaccaattgttgatgctaaggaacgtaagaggcaaagagataaggaaagatatgccacgatgttcgatgaacagaaaaacgagaaaaacaaaaagcgtcgagaagcatgtctacggaataaagagttgaataagaagcgtcctgaagcaattcaacgaaacaattgccaaaatatgatgcccaacacgccaagaggtggagacgaaaaagtaaatgttgatccagatgatgaatccgactggttgcatatcaattatacattacagtcaaatgacattgatgcaatgacagaagttctaacaccagccatatcaaggaaggtgggtacttcgattgaggatactagtggtgacgctgttgaaggggacgattggacacagcgccatacgcctatgaagatcaccaacaatggtgatgacgatgagggtgtcatattcgaagacgatgatgatgagaacgagggatacctattcgctgcgcaatatgaggataccgatgaggatatcgatattgatggtactcaagaagaatctactgccactcatgtttctgacccgtacgacaaggtgtacaacaacatccctgaagaaacacatatgctcaagcttgttcccaactgcggttattgcaccgcgaagaagtttgagtatgagccacctgggttttgttgtcatggtgggaaggttgagctagctccagtggagacccctccccaactcaagaggttgtgggatagtgcagactctgatgctaggcactttcgtgataacattaggtttttcaatggccatttctctttcacttccctatactgttgcctcgatagtatgacaactaatgtaaggggttctggtatatacacgtttcgagcacagggcatgatgtaccacaatatcaaatcatttggtagggaaggtggggcagagcataaacaccttgagctttacttttatgacgacgatcccagcctcgagcatcggtaccgttggggtattcatgcttcacttcttgagcttggtatattgcttccagatgctacgatctcctgtgcttggtatatcttaagaaacagccccatggctattcgcgtgctgaaatctgcactcaacgcgacagatgatggccatgcaagccttcaggagcttagcgggaatgccacactaatattctatggcacggaggaggcaaaggaagggaagaacgcgtacatggagagacgacgcccagatttctccaagttcccacgcaaaccttgagtttcagctatttgctgaactggccaattattt

SEQ ID NO: 127859 - DNA, 653 bp, Zea Mays
tatccatctccatccacccatccttgtttgttcctcatgcattcttactgtccgcctgcctgcctgatcaggacaggagccagcatgccgccatcaccgtcgttgctggacctcatgagcctgccgcccgacctgtctccgtctgccgaggaagcggcggactcgtcgtcctcggaaggcagcagctgtggcttggtgcaggtggtgccgagggacctctccgacgagctcctcggcaagttcgaggacaccagcgagttcggcttcgagtacagccagagcggcctctggtcgccgctggtcctgcggcccgaggtcctcgcgaccgcggtgcgggaccgacgcaggcgcagccgccggagttggaggaggaaggtgttctgttgctgctgacatccggtttatgttgggacaagctcttgtctctactaaaaactcctccgcagcttctcatgtaaaaactgtttcgtacttaatttcgtgatgaagttagtttgtactttggttataatgaagattactttttactgggatgtaaactagaatgcctgcgggtttgtaagtgctggtgtccactgattttgggttctcgaatatttgtcgtccgctagtttattttgaactaaaccgcgaaaaataaaaaagaagggaga

SEQ ID NO: 127860 - DNA, 1692 bp, Zea Mays
atggctcgtgctagttatctccttcccctcttcctgatactgatacaccacctccgctcatcactagcttcatccacttggtatggtaacctcacagctccttggtgccatccagaccatgctgcagcactcctccagctcaagcgatcctttctcttcgactactccaccaccacccttgcttcatgggaagcaggcacggactgctgcctctgggagggtgttggatgcgacagtgtctccggccatgtcactgttcttgacctcggtggccgtggcttgtacagctacagtcttgacggcgcgctcttcaacctcacctcactccagcgactcgacctgagcaagaatgacttcggtggatcccctattccggcggctggctttgagaggctttcggtactcacacacctcaacctttcttacgcaggtttctatggacacattccggttgtaataggcaaactcccgagtctcatatcgctggatatttcttcaatccataacattgatggtgctgaaatagacacattgtataatctttttgacagctataaccttttggtcctacaagaaccaagtttcgagacactattgtcaaacctcacaaatctgagagagctctaccttgatggcgtggacataagtagtagtggcagagaagattggggcagaactcttggaaaatacgttcctcatcttcaggttcttagcatggaggaatgcaggcttgttggtcctatccatcgacattttctacgtctccgctctatcgaagtgattaatctaaaaatgaatggaatttccggcgtggttccagaattctttgcagattttctcaatttaagagttcttcaactcagctttaataacttgagaggcacctttccaccgaaaatctttcaactgaagaatctggcagtattggatgtgtcaaataacgatcaactctcggggcttattccaaaatttctccatgggagctcgctggaaactttgaatctacaggatacacatttctctggtgtcactctgagctacttgggcaatctcacatctttgacagacctgggaatagatggaagatcaatttctatggaacctccctattttttcgtagacaagatggaccatgttagtaccttgcgactctcttcggtaaatttttcaagggaggctaggtcaaatttctcatggattggtgatctccagagcttgaaaacattgaaaatttctgattgctactctaccaagacaatgccctcctggattggaaacctaaccagtttgagaagcttggatatcaggtattgtggttccatagggccaattccacagttaattggcaaccttacgacattggaatatttgacaatctctgattgtgcttttactggtcaattactctcttcagttggcaatctagaaaacttaagattcctgcaaatatcctataaccatcaaggtttatctggccctataacaccgacaattggacatctcaacaagttgacagtattaatacttcgaggttgcagcttctctgggagaataccaaatacaatcgccaacatgactaaactgatttttgtggacctttcacagaatgacctcgtcggtaagattcaaaatccaattctcacattgtaccttgtgatttgtgaattgttcatcaaatgatacgatacgtta

SEQ ID NO: 127861 - DNA, 294 bp, Zea Mays
atgtggcggctggagaatgcctcggaggttccgccgatcgagttccctcaagaattactacagaaggaagtcgaccggccgccgacccagcagttctttccgcccactactacggccgcgcagcaggcgacttctaccgcctaccgcggcgtcaccttctaccgccgcaccggccgctgggagtcccacatctgggactgtgggaaacaggtgtacttgggtgagttcctgtccaatcgaaaagaactgaggctcgaattacgtactacattagcatcattttatggcatttaa

SEQ ID NO: 127862 - DNA, 413 bp, Zea Mays
aaacagacattatttattacactagttcacagttaatacagattgtttatagcaagttttgttttgctcaaacatatcagtttgtatgcaaattgtgttttatgtttgcaactgtatgcaatggtatgcaacatattcagatttttatgaatgtagaacaggacagaacatatatgctactgtgtttcatgtatgcaactgtatgcatctttatgcaacatattcagttttttatgattgtatatcattgagtatatgttttatataaaatttcatatatgtttagtgcatacatttatgtatttcggatgattacagctaatacattattggttacagcaaggtctgttattcacttattattgaacagttcagtatatgttttatcgaatcatattcagtttttttattat

SEQ ID NO: 127863 - DNA, 477 bp, Zea Mays
atggcggttgcggccgtaggtggggatgtcgtcgtaatcatgctgctgggcaccgccgaggacgacgaaaccgtcgagggtgacgagaccggcctgggttgcgacctctgtcgcaccatcctcgagttcggcctctgctgcatcacccgcggcgagggagcaggtggaggccgcttcgactttgcctttttgatttttagcacggaagcgatggggtgcggggagaaacgaggaaatgtggagcggcctatactggctttattgtccctacaacaaccgtccaaactgttgtgtaaggaatgccgaaccgtctgcaggcctagattgctatcgactgtcctcttctttttcttggccaaagttcattccatggtcccattgctgctctactcggtcgcctccattgatttctgaatcatcataatcataagcaccgaaatctgcttcagtagtagtactaataataaatgcatacaa

SEQ ID NO: 127864 - DNA, 1534 bp, Zea Mays
gtctgatgccctttgtacacatgtatatatatgaagatccctgcaataaacagacaacaccagtcatttgtctcatttgctcttgtctctccactgattaccactgagcactgcaagagattgcaacacgttatcagcactgtctcaagggagaaatcagagaaggggaagaggaagaacacgctgttcttgacaagaacagcaagatcgatctgcacatcaacagcaaggtatggagcataccgtttccatacgcatacgccgtatgcgcgaagttcttcatattgttgatgatgcaatgttggaagcgttcaccgttgggcaagccactgcactcccaccggtgcacgagatccctgaacgccgtgtgcaagtgcaaaatgtgcacttctgcgttctccatggatggacagcggtggttccgctgccggtggtggagtgtggactccccactgcatccccgtcgccaccggcgccggtgtttgacgcgggatcgtctgcatcggcccctatggatgtcgatttggcagcaccaccaccgcctccgcccactgcagcagcagttgctcgtcattcgccatctccaccagtgcctatggtcgtcgggaccattgctgcccgtcgtggacagccccctcgtgccgtcgatgctccgcgtggacgcatcatcttcacaggccatcgcccaaatggggtggccccgtcttcctcctccaatgggagggcctaatggccctcgatccggccgctgtgtcggccgtttgggggaggggggtggaggaatggcgctgcaagcccagtgctctggcgtggcactgctctccggcatggagcaaaggacatgcagtgaacctgcaatgtcggccccgacccggccatggctcgtctgccaggctcggccgcggccccctccctggcggcgctcgacgcaatgcgacggcgaggagcagtggctccggtcagcggctcggcgcagcctcctggagtcgcgggcgcaggacaagcccggcgcgcgcgcgactcgcgctcggcgcgggcgcggtatggccacctcccgagggcgctcggcaacggccggcgcttggtgcggccgcatgccctggcgcaggcggctccgccccggcgagggcgctcggcgcggcctggcgcgcaccaggcgcgcggccagctacggacgcggctccccggcgcaggcgtccttgcgcgggctcctggcgaaaagaggcgggcgtggcatggccctggcgcgcggctcccctgcgcaaggagctgctcggcgcgggctcgtggcagcgcgcggcgcggcccaccggcggtgctcggcgcggtctccgcctcgcgcttggcgcgggcaccttggcgctcggacgggccccacgcaaggcgcgcgcgcataggcgtgcacagtcggccctggcggcggctgggagccttggcgctcgtccctggccggcggctggaaaacgccctggtggcggcgacggctacaggggcggttagggttggaaaccctagccgccccaatataaaatag

SEQ ID NO: 127865 - DNA, 166 bp, Zea Mays
tttttcttttctgtttgtgctaaagagaaaagcgacagagttgtgtatggtaattaaatcgctttaccgcgacatctggtcgggcaaagtttttattaatatatatcagccaatttcggagaaccatttttttactatttatcatcaagcagcaaccatgtttacc

SEQ ID NO: 127866 - DNA, 974 bp, Zea Mays
gcgacgaggagtgggctgggccggggcttggcggcaataaataggcggccgggtcatcggccaaccccccatcgccgcctgctctctacctctgcactccaatcagatcatcagatagatcactggccccgtgctgattaccgcgcttcccatctgagcagccagcctcccagggtacagggagagacgcagaagagacagctgctgcctcgctgagacgatggccggaggcggagaccactcccagacgaacggaggccacgtcgaccagagggccttggaggagggcaggaaggaggagttcgctgaccagggctgcgccgccatggtcgtctccgtcccatttatccagaagatcatcgcggagatcttcggcacctacttcctgatgttcgcggggtgcggcgcggtgacgatcaacgcgagcaagaacgggcagatcacgttcccgggcgtggcgatcgtgtgggggctagcggtgatggtgatggtgtacgccgtgggccacatctccggcgcgcacttcaacccggcggtgaccctggccttcgccaccagcgggcggttcccgtggcggcagctgccggcgtacgtgctggcgcagatgctgggcgccacgctcgcctccgggacgctgcgcctcatgttcggcggccggcacgagcacttccccggcacgctgcccacgggctccgaggtgcagtcgctcgtcatcgagatcatcaccacattctacctcatgttcgtcgtgtcagtacgtgagaggatatagatatataattcctgcgtgcgtgtgcgtttgtgtgtggatggaaaacatatgaaagaagaggtatggtttgtgtgtggatggaaaacgtactgtgcctgccttcgaccctgggcaacgtcgctctaccccgtgaacgtgcttaacctgttgccgcatgttttgttaactcaattttaatgtgttggcgagatcatacgcatca

SEQ ID NO: 127867 - DNA, 1363 bp, Zea Mays
gcgacgaggagtgggctgggccggggcttggcggcaataaataggcggccgggtcatcggccaaccccccatcgccgcctgctctctacctctgcactccaatcagatcatcagatagatcactggccccgtgctgattaccgcgcttcccatctgagcagccagcctcccagggtacagggagagacgcagaagagacagctgctgcctcgctgagacgatggccggaggcggagaccactcccagacgaacggaggccacgtcgaccagagggccttggaggagggcaggaaggaggagttcgctgaccagggctgcgccgccatggtcgtctccgtcccatttatccagaagatcatcgcggagatcttcggcacctacttcctgatgttcgcggggtgcggcgcggtgacgatcaacgcgagcaagaacgggcagatcacgttcccgggcgtggcgatcgtgtgggggctagcggtgatggtgatggtgtacgccgtgggccacatctccggcgcgcacttcaacccggcggtgaccctggccttcgccaccagcgggcggttcccgtggcggcagctgccggcgtacgtgctggcgcagatgctgggcgccacgctcgcctccgggacgctgcgcctcatgttcggcggccggcacgagcacttccccggcacgctgcccacgggctccgaggtgcagtcgctcgtcatcgagatcatcaccacattctacctcatgttcgtcatctccggcgtcgccacggacaacagagcaatcggggagctggctgggctggccgtgggcgcaaccatcctgcttaacgtgctcattgccgggcccgtctccggcgcgtcgatgaacccggcccggagcgtgggcccggcgctggtgagcggggagtacacgtccatctgggtgtacgtggtggggccggtggtgggggccgtggccggggcgtgggcctacaacctcatccgcttcaccaacaagcccctccgcgagatcaccaagagcacgtctttcctcaagagcacgagcaggatgaactccgccgcctccgcctgatggatctccatggccggtaatttagcctacaaaactatatattcacccgtgtcgtcgtgtcagtacgtgagaggatatagatatataattcctgcgtgcgtgtgcgtttgtgtgtggatggaaaacatatgaaagaagaggtatggtttgtgtgtggatggaaaacgtactgtgcctgccttcgaccctgggcaacgtcgctctaccccgtgaacgtgcttaacctgttgccgcatgttttgttaactcaattttaatgtgttggcgagatcatacgcatcactgtgcttagcc

SEQ ID NO: 127868 - DNA, 902 bp, Zea Mays
ggcggccgggtcatcggccaaccccccatcgccgcctgctctctacctctgcactccaatcagatcatcagatagatcactggccccgtgctgattaccgcgcttcccatctgagcagccagcctcccagggtacagggagagacgcagaagagacagctgctgcctcgctgagacgatggccggaggcggagaccactcccagacgaacggaggccacgtcgaccagagggccttggaggagggcaggaaggaggagttcgctgaccagggctgcgccgccatggtcgtctccgtcccatttatccagaagatcatcgcggagatcttcggcacctacttcctgatgttcgcggggtgcggcgcggtgacgatcaacgcgagcaagaacgggcagatcacgttcccgggcgtggcgatcgtgtgggggctagcggtgatggtgatggtgtacgccgtgggccacatctccggcgcgcacttcaacccggcggtgaccctggccttcgccaccagcgggcggttcccgtggcggcagctgccggcgtacgtgctggcgcagatgctgggcgccacgctcgcctccgggacgctgcgcctcatgttcggcggccggcacgagcacttccccggcacgctgcccacgggctccgaggtgcagtcgctcgtcatcgagatcatcaccacattctacctcatgttcgtcatctccggcgtcgccacggacaacagagcaatcggggagctggctgggctggccgtgggcgcaaccatcctgcttaacgtgctcattgccgggtgagtacttacgatatatatacttactcttcgtgacgtgctcattgcctggaatatacatattttgtacaaaatttaagtagtacaaattataataagtactac

SEQ ID NO: 127869 - DNA, 1505 bp, Zea Mays
ggcggccgggtcatcggccaaccccccatcgccgcctgctctctacctctgcactccaatcagatcatcagatagatcactggccccgtgctgattaccgcgcttcccatctgagcagccagcctcccagggtacagggagagacgcagaagagacagctgctgcctcgctgagacgatggccggaggcggagaccactcccagacgaacggaggccacgtcgaccagagggccttggaggagggcaggaaggaggagttcgctgaccagggctgcgccgccatggtcgtctccgtcccatttatccagaaggtacggtggtgctgtgagagatcaaaaggcactggccgagatctctctctcgtctgccgtgttcttcggctcttcccccgtccgcttaatactctctctctctctctctctctctctcaacatcaacgttattcatcatgtctcggtcaaattatggagttttgtgctgctcactgcatttgcagatcatcgcggagatcttcggcacctacttcctgatgttcgcggggtgcggcgcggtgacgatcaacgcgagcaagaacgggcagatcacgttcccgggcgtggcgatcgtgtgggggctagcggtgatggtgatggtgtacgccgtgggccacatctccggcgcgcacttcaacccggcggtgaccctggccttcgccaccagcgggcggttcccgtggcggcagctgccggcgtacgtgctggcgcagatgctgggcgccacgctcgcctccgggacgctgcgcctcatgttcggcggccggcacgagcacttccccggcacgctgcccacgggctccgaggtgcagtcgctcgtcatcgagatcatcaccacattctacctcatgttcgtcatctccggcgtcgccacggacaacagagcaatcggggagctggctgggctggccgtgggcgcaaccatcctgcttaacgtgctcattgccgggcccgtctccggcgcgtcgatgaacccggcccggagcgtgggcccggcgctggtgagcggggagtacacgtccatctgggtgtacgtggtggggccggtggtgggggccgtggccggggcgtgggcctacaacctcatccgcttcaccaacaagcccctccgcgagatcaccaagagcacgtctttcctcaagagcacgagcaggatgaactccgccgcctccgcctgatggatctccatggccggtaatttagcctacaaaactatatattcacccgtgtcgtcgtgtcagtacgtgagaggatatagatatataattcctgcgtgcgtgtgcgtttgtgtgtggatggaaaacatatgaaagaagaggtatggtttgtgtgtggatggaaaacgtactgtgcctgccttcgaccctgggcaacgtcgctctaccccgtgaacgtgcttaacctgttgccgcatgttttgttaactcaattttaatgtgttggcgagatcatacgcatcactgtgcttagcc

SEQ ID NO: 127870 - DNA, 644 bp, Zea Mays
cccatcgccgcctgctctctacctctgcactccaatcagatcatcagatagatcactgatcggggagctggctgggctggccgtgggcgcaaccatcctgcttaacgtgctcattgccgggcccgtctccggcgcgtcgatgaacccggcccggagcgtgggcccggcgctggtgagcggggagtacacgtccatctgggtgtacgtggtggggccggtggtgggggccgtggccggggcgtgggcctacaacctcatccgcttcaccaacaagcccctccgcgagatcaccaagagcacgtctttcctcaagagcacgagcaggatgaactccgccgcctccgcctgatggatctccatggccggtaatttagcctacaaaactatatattcacccgtgtcgtcgtgtcagtacgtgagaggatatagatatataattcctgcgtgcgtgtgcgtttgtgtgtggatggaaaacatatgaaagaagaggtatggtttgtgtgtggatggaaaacgtactgtgcctgccttcgaccctgggcaacgtcgctctaccccgtgaacgtgcttaacctgttgccgcatgttttgttaactcaattttaatgtgttggcgagatcatacgcatcactgtgcttagcct

SEQ ID NO: 127871 - DNA, 893 bp, Zea Mays
aaagaccgtcacatgagtagagtagggcagggaaaaatgagcttttaaagtgtggttggtgagacaccggtgcaatgacattaatatgaacgtaataccactccactccactgtccttccagcttttaaagtgtgtttgcagaaaactgcagagataatgtgaacaccatatatatacttacttgttattagtaatgacaacagtcctaaaattaactttttttattgtgctagtacatctctctctcttttttttgggtgcttagacctgcaactttcttcagaggtggaaaaaagaacgaaaacaaagaaacaaacacgagcttttgctagctgacggcccgttgctttgtgctgtgccaacaagcaggcccgtctccggcgcgtcgatgaacccggcccggagcgtgggcccggcgctggtgagcggggagtacacgtccatctgggtgtacgtggtggggccggtggtgggggccgtggccggggcgtgggcctacaacctcatccgcttcaccaacaagcccctccgcgagatcaccaagagcacgtctttcctcaagagcacgagcaggatgaactccgccgcctccgcctgatggatctccatggccggtaatttagcctacaaaactatatattcacccgtgtcgtcgtgtcagtacgtgagaggatatagatatataattcctgcgtgcgtgtgcgtttgtgtgtggatggaaaacatatgaaagaagaggtatggtttgtgtgtggatggaaaacgtactgtgcctgccttcgaccctgggcaacgtcgctctaccccgtgaacgtgcttaacctgttgccgcatgttttgttaactcaattttaatgtgttggcgagatcatacgcatcactgtgcttagcc

SEQ ID NO: 127872 - DNA, 207 bp, Zea Mays
atggggaaccagcaaggagcgggggcggtggaggcagcaacggggaaccgacgaggagcgggggcggtggaggcagcaatggggaaccggcgaggagcgggggcgatggaggcagcaatggggaaccggcggcggaggatccagatggggaggggagatgaaagaagggagagagaaggggatggtggcctcacacgagggttctaa

SEQ ID NO: 127873 - DNA, 532 bp, Zea Mays
tcgcgctagcctccgaagtccgacccactcctctctgcgacattgactgccacgacgacgaacgacgcgccgccgcccatccacagcgcgaaggacgccatggacgccctcggccgcgctcctcaataacctgggctccatccccatggccccgctcctcaacgacccaggtgtcgccagtgtcgtgacggcacgcctccgtggatccgggtcgggcgccaggaacgacagcctctaccgctggctctacgacgcgttccggtccaacgtccccgagctccagctcgcggtgctgctgttggtgccgtcgctagttggggtgcacctgtgccgcgccatgtcacggaagccgctggccgggttcgaggcagtgctcctcgcgctgtacgcgcacgccgcgtcgcagcgcggcgccggggaggtcgagactcgagaccatgtcgctcccgaacctggcaaagattttggtacatcacaaagggaacccgtaggaaaaattgaacaagtacaattgatcggtgaggttcactga

SEQ ID NO: 127874 - DNA, 1518 bp, Zea Mays
atgacgatattgaagccggacattgaagccggccaagatcaacaggatagaaaaccccagctaacggtatgcgttgttggtgaaggaaatgttgtggagacgaacagagcagtatgcgaaggagagtatgcgatgctggacgaacctgcacaagctgtggagacggacggagcaaacaaggagacgggatgcacgctggtctccggcgccgcggtcgtcagcgttgcagatggcagccctttgagtggccctttgggagacgacagatacgaacgtttcttccgtatctcggtcgggccattggacctttcagaacgacacgcgcggctggaggagtgccgccgagtggctccggcgtgctacaccagcatcggacaagctctggctgaagctggcaagcttgtccccaaggtgaagcaccgttttgttgtactcatcaagaccggagagtacatagaacaggtgaacatcacgagacggaacgtcgtcctgctcggcgagggcagaggcaacacagtaatttctggcaacctaagcaacctaacggggacggcgatggtgatgacggccaccgtgaatgttgtagccgacggctttttggcccagaacctgacgatccgtaacaaggccgggccgaaaggaaggcaggcggtggctttgaggtcaaactccaaccggaccgtcgtatttggctgcgctatagaaggcttcgaagatagcctgtacgccgaaaatggagtccaggtgtacctggagacggacatatacgggaccgtggattttatattcggaaacgcgaaggcggtcttccagcgttgccgcatccgggtgcggcggcccatccccggcaagcacaacgtggtgacggcgcagggctgcgacaacaatatgtacgagaactccggcttcgtcttccaccggtgcagcgtcgaagctgacccgaatccatggccggtgggccagaacctgaccggcgtggaaacatttctgggccggccgtacaggaagtactcccacgtcattttcatggagtgccaactcagcgacgtcgtgaggtggtgtggtgtggaaatcgtggccgagggtgttgaggattgcgtgcctgcagcattgttcaccaaactagtcgtcccgctccctacacacccgccttctagtgtgaagctccatggcgtgcgcacccactctccggaattccactactatatgtgccacttgaagttgttatgtcaaaaatattatggtgaaagcgagcgtctattaggatctattttttatcttgcaaatgatcttcctgaaggagcgggcacgacacgtgagcgagcgagcatgcggctgtgcgggtgtgcggggtgcaagggcgacggcgcagcgcgctacaatataggcaagcatcagcaaacgatctttgcatcggatgaggaccaggttttggaacaagctcgtgaaatctctataaaagattttagctctcatgaactgttagagggtatcacaagtgaaatgtcatccatatga

SEQ ID NO: 127875 - DNA, 332 bp, Zea Mays
accctcgacgaccatcgcggccgcgacaccaaccagaccaccatgcgccatacccaacggaaactaggccactgcggctacctctcgagctcgctatcgccagcgttcatggaagggctgggaaggacccccatgccatgtggatcgtgcgcgggcagctaatcaggctcggggagtcggaggtcggcgacaattcctcaccaagaaatcagcgccgccgtagatccgccgagagctgaggccagcaacctctgtgtgcaagattctcgcagcatggttgcaaatcacttgaagaccaactgagtacctgggagtctcgagtctaaggcaag

SEQ ID NO: 127876 - DNA, 342 bp, Zea Mays
accctcgacgaccatcgcggccgcgacaccaaccagaccaccatgcgccatacccaacggaaactaggccactgcggctacctctcgagctcgctatcgccagcgttcatggaagggctgggaaggacccccatgccatgtggatcgtgcgcgggcagctaatcaggctcggggagtcggaggtcggcgacaattcctcaccaagaaatcagcgccgccgtagatccgccgagagctgaggccagcaacctctgtgtgcaagattctcgcatggttgcaaatcacttgaagaccaactgagtacctgggagtctcgagtctaaggcaagttgtgcccttgat

SEQ ID NO: 127877 - DNA, 1241 bp, Zea Mays
gacaccaaccagaccaccatgcgccatacccaacggaaactaggccactgcggctacctctcgagctcgctatcgccagcgttcatggaagggctgggaaggacccccatgccatgtggatcgtgcgcgggcagctaatcaggctcggggagtcggaggtcggcgacaattcctcaccaagaaatcagcgccgccgtagatccgccgagagctgaggccagcaacctctgtgtgcaagattctcgcatggttgcaaatcacttgaagaccaactgagtacctgggagtctcgagtctaaggcaagttgtgcccttgatcactcttctttacctaataatgttctggttaatcactgtgacatgctcaggttaatttggtgggacctaataggtttcccaagccttgcaaacatatgaactattgggtagatttggttttgctctacctggttttgggaaattaatgttatactgtgatcatgttccaattatattgttgtttaattattgttcatgaaaagattattgtgtcaattggaacatggagcttaacttgagatcacagtgctaccacaagggtggaactagtggaactttggaaaggcctcgttgtgctaccctgcctctcttcctcgctagaggtgtatggggtttgatcaaccccgtggaaaatgggtaacacgacttgtgggtaaagatgtgtaacctctatagagtgtaaaactggtatatctgtcgtgctcacggtcaagagcgactcatgactctctcatgattaatttatggaactaaacttaatctatcatatgcattgcatcacgagtgttattatcaattgtgatatcttatttagttgggttggtatctacttatacctagtaactgttaataaaattttgaccaactttaaaagcaatgctcagctttaaccatctccttttgtaagccttacacttcacatgagctcccacccttggtgagttcatgaacattattccccgcaacttgttgagcaatgaacgtatgtgagctcacccttgctatactcacatccccccaggtcaagaacaggtaccactggacgaggcacatgaaggatgctgtgatgagttcgtgagtggtctaggctgtcgtctcgcagtcaactttgggttgctggatcgttgtcttcgtatgatgtaattatttaactattttgtacagaactccattatatattaaagatgtgacattcatttctg

SEQ ID NO: 127878 - DNA, 1744 bp, Zea Mays
gaatttgaggagagaaagagagaaagagtgatcgtcatggagagcaggaggaagaatcaacagaagacgagctacattgtaatttccatccagctcctagcggccctcctactcttggagcttgtgtcgctagtgccgggggcgtcatgcgaggagttgcccttggatttttgggtgagtgcactacggggggtcggggcaaaggacgtttcaacagccgatggatgcaccaagaagaataaggacaccatgctctgctctgcccagggtaacacagtaaccaatttcatcaaccctaccaactctgaggaacaaggctataggaccatcgggagtccatcgctaacatccctgatgatagcaccaaacggtacatcctcatcctcagcggtggcaccgtgtaccgagagaaggtattggtgagcaaaagcaagccattcgtcaccataagatcagatgaccccatcaaccctgccatcattgtgtggaacgacactgccgccaccctggggaaggatagcaagccccttggagtagatggtagtagcaccatgaccgtagagtccgactacttcattgcctatggtgtcgtctttaggaatgatgctgcagcagcagcgaagaagaagaaggcagaaggcgaggcgccagcgttgcgggtgctaggaacaaaggcaaccttctacaactgcacaattgaaggtggacaaggcgccctgtatgaccagatggggctgcactacttcaagtcctgcaccatcaggggcaccatcgacttcatctttggctctgccaagtccttttatgaggactgcaccattgtttccgtgaacaacatggaggagatcatgaccttgcctgtggcaccacctcaacttgacattcacgacaatccaatcaaagttgccccagggaagggaggcttctccttcaagacatgtaccatcaccggggaagggcaacaaatcttcctcggaaggatgggcacgccttccatctactcctacacccagattgctaaggaggttgtgcccataatctacgacaaagggaacatcttcatgcccagtaatatgactggtagacgctgtgccactttcaagtgctatggacctgggttagagaaaatatggcacgtcaaacttagatacgctgaagccatatactttcttgggacagattttatcaacggagattcatggatcctgtccataccacctactgatgctgaaacattgctatcagtttgaatatatagaatcctcagagatcatcaaagatcatcatctaccactaattaataatgacccaaattaaataagttttgcgtatatattttatccctatctataaattatgcatgtgttgtaaacaagtcgtggatgggcttcatttgttctcgcgattgaaaaataacaaataaacaaagtagaaaagaggatgaaccagaagtcttgttcagcaagaaggaaggaggaatgacgatatttcccatgtgatacttgtaaatcatatgtgtaaacttcgtgggcgtacttgtaatttcatacgaagttgtacctctcgcctataaatagagtaacagtgtcatgcataaattcacctttcgagagctcaaagcttcatttagctcagccttcgaagtacctttgagctatcacttgtatgaagccgaaggtatgtttgtaattgtttgttatattgcaaggagtgaaataataagtgtggaagcatgaagatgagt

SEQ ID NO: 127879 - DNA, 685 bp, Zea Mays
aacctaattaaagaatttgaggagagaaagaaagaaagagtgatcgtcatggagagcaggaggaagaatcaacagaagacgagctacattgtaatttccatccagctcctagcggccctcctactcttggagcttgtgtcgctagtgccgggggcgtcatgcgaggagttgcccttggatttttgggtgagtgcactacgcggggtcggggcaaaggacgtttcaacagccgatggatgcaccaagaagaataaggacaccgtgctctgctctgcccaggctaacacggtaaccaatttcatcaaccctaccaactctgaggaacaaggctataggaccatcggggagtccatcgctaacatccctgatgatagcaccaaacggtacatcctcatcctcagcggtggcaccgtgtaccgagagaaggtattggtgagcaaaagcaagccattcgtcaccataagatcagatgaccccatcaaccctgccatcattgtgtggaacgacactgccgccaccctggggaaggatagcaagccccttggagtagatggtagtagcaccatgaccgtagagtccgactacttcattgcctatggtgtcgtctttaggaatgatgctgcagcagcagcgaagaagaagaaggcagaaggcgaggcgccagcgttgcgggtgctaggaacat

SEQ ID NO: 127880 - DNA, 95 bp, Zea Mays
acgacaagtcccagcaccgcggtataaagtgtaccatgccccgtgctgacttttcctcctcccctgtgctgcgcgctcccgtgaaccttccacat

SEQ ID NO: 127881 - DNA, 1581 bp, Zea Mays
atggatgcactaagaagaataaggacgcagtgctctgcccaggctaacacggtaaccaatttcatcaaccctaccaactctgaggaacaaggctataggaccatcggggagtccatcgctaacatccctgatgatagcaccaaacagtacatcctcatcctcagcggtggcaccgtgtaccgagagaaggtattggtgagcaaaagcaagccattcgtcaccataagatcagatgaccccatcaaccctgccatcattgtgtggaacgacactgccgccaccctggggaaggatagcaagccccttggagtagatggtagtagcaccatgaccgtagagtctgactacttcattgcctatggtgtcgtctttaggaatgatgttgcagcagcagcgaagaagaagaaggcagaaggcgaggcgccagcgttgcgggtgctaggaacaaaggcaaccttctacaactgcacaattgaaggtggacaaggcgccctgtatgaccagatggggctgcactacttcaagtcctgcaccatcaggggaaccatcgacttcatctttggctctgccaagtccttttacgaggactgcaccattgtttccgtgaacaacatggaggagatcatgaccttgcctgtggcaccacctcaacttgacattcacgacaatccaatcaaggttgccccaggggagggcggcttctccttcaagacatgtaccatcaccggggaagggcaacaaatcttcctcggaaggatgggcacgccttccatctactcctacacccagattgctaaggaggttgtgcccataatctacgacaaagggaacatcttcatgcccagtaatatgactggtagacgctgtgccactttcaagtgctatggacctgggttagagaaaatatggcacgtcaaacttagatacgctgaagccatatactttcttgggacagattttatcaacggagattcatggatcctgtccataccacctactgatgctgaaacattgctatcagtttgaatatatagaatcctcagagatcatcaaagatcatcatctaccactaattaataatgagccaaattaaataagttttgcgtatatattttatccctatctataaattatgcatgtgttgtaaacaagtcgtggatgggcttcatttgttctcgcgattgaaaaataacaaataaacaaagtagaaaagaggatgaaccagaagtcttgttcagcaagaaggaaggaggaatgacgatatttcccatgtgatacttgtaaatcatatgtgtaaacttcgtgggcgtgcttgtaatttcatacgaagttgtacctctcgtctataaatagagtaacaatgtcatgcataaattcacctttcgagagctcaaagctttatttagctcagccttcgaagtacctttgagctatcacttgtatgaagccgaaggtatgtttgtaattgtttgttatattgcaaggagtgaaataataagtgtggaagcatgaagatgagtaacatgtcttgctcgtaactgtttacatttcatccttgttaatatataagcatttgtgccc

SEQ ID NO: 127882 - DNA, 123 bp, Zea Mays
cattttaacgtttatattagaaaaagccctatattacttttaaacattgtgagacataatatatcatcatttataagaacttgaatataaggttaagttaaattttatgggaaatgtaattgg

SEQ ID NO: 127883 - DNA, 413 bp, Zea Mays
gctcaattcaccatggacaatgatagcaaggcagtggaagatgcttgtctagatatgctaaaggttggacaacgccaaatgaggtatagactaaaacaaaagtatttcaatgggatacctgctaatcaagtgaggactacatcgcctatttcaagcatgtctgatgaggactggagaaagttggtggagaagtggtctaccccaaaacacaaggatagttgtatgaagaataaacttaatcgtgaaaaagtacagtatcaacaatgcacaggatcccaatcatatattgcaaaagcttatttactgaaacaagagaaatataaggatgctgaaccgagtgcaatagatcttttcaaggacatgcattgcagcaagaagaaaggtttttctgaaaatgtaaagaaagcaattgt

SEQ ID NO: 127884 - DNA, 1164 bp, Zea Mays
atggcgcgtctctgctccatctccctcgcggcgccctttccagccgtgctctttgctgtatctcaccatcgacgctggtcgagtcctcgtctccaacttcctcacgctcggctcccaggttttccacttcaccggctactgctcttcctggtcgtttccatgccgcactccttcatcgcgtcgctcctcaagctcgtcatggtcactgtctttagctacaccgtcgccttcattcttctcgcaagctcctcccaatctgtcgtccctgtctctgattcctggcgtcattttccaaaccccgctgctccgcttccctctctcgtgctcgccgtcccacagcttgaagccgacgaggtggcctcagcacacgcgcgcgtagccatggcagttgctcatggtggcactgttgtgtgtttatctaagaaagttgagtttctaaggcttcaaaatggcagtgacattcgtggtgttgctgttgctaggattgaaggtgagcctgtcaacctcacggaagatgtcactaaagctatagctgcagcttttgccgcatggctattaaacaagaaactagatgacttgagacgtttaagaatctctgttggacatgattcacgaatttctgcacataaattgcagaatccagtcacttatggaatcactgctgctggacacgatatcctacaatttggattggcttcaacacctgcaatgttcaacagtacacttacagaagatgagagtagtcatatacctgttgttggagccataatgatgacagattattcagtcaaggggagattccaagagtggtggattgaggagaaagtgaagctcatcagtttaatgttcattaggtgttcgatcgaaggcttcaatcagagactatcgtcattcttgcaaatattaagtcgagttgattatgcagccccatactcctcgttgtcgatccacgtcgcgtccgcgacatgcccgtcgatcccaatcttcctatgcgcgccacttgtgttgagctccgaagcccccctgtcatgctcgaccctagaggtctccaacttgtcgacatcccttacgtcgtctaaaactcctgagagtttggataaagcaacaaatcctgtgtggtgcttgccgggtgctcggcaaaaaggtcttaacaagaatcattga

SEQ ID NO: 127885 - DNA, 302 bp, Zea Mays
tgtgaattccatgcttattaaattacatgcatacaaatacttatttgagcaaagtaaataaatgtaaaatatttgcattcatgttggtgttttggttgtgcatatatggtttcaaaatttaaaatcagatttaaattggggtaattaaatctagaaataaaaaataggaaaaaaagaatagcaaataaaaagcttatctattcggccacttaaggaacacaacccatgtgagtttttcctcctatttttttattccacttgtcggatcttgcatcacttttacatcatccatgacatcagcc

SEQ ID NO: 127886 - DNA, 287 bp, Zea Mays
gcgttgagtgcaagtttatgctgtacttatgttacaggaaggaatgcagggccttattaaaggagctaaaaattttgatgcaccaaaaggttttaggttctctcagtgttctcactggtggatcaaacaagcaatgtgtaaatctgtctcatagcaatcccaaatatttcgcttgcctgtatgcccaccacccagatcctgttcttttccctacatggcttatatcaatgttttgatgcactcttttgtctcccattctccccaactgtagcctagatcactagatt

SEQ ID NO: 127887 - DNA, 1454 bp, Zea Mays
attctcttctcacgaacgtttacacgccgggtgcgcgcgctctgctctccctccttcccttgcccaactctcactctctcgcccgcgcggcgcggccttgctttctggtggcaccgactggccggctgccaccgtctcctcctcgctggtgcccaggtcttcgtcggtcccttggtgtctgccccttatcctggtctttgtcaggccctcgcctttcgcccgcgacgagcaccacctgcaggaacaaaatgaagtgcaatgcttgctggcgggatttggaagggcaagctgtatcaaccacctgtggtcatcttttatgtgcagatgatgctaggaaaatactcaataatgatggtacatgtccaatttgtgatcaggtgctctcaaaaagccatatgaaacctatggatataaatccaggtgatgattggacaaatatggcaatggttggaatatccccacaaatacttatgaagagtgcatacagaagcgtaatgttctacattggacaaaaggaactggagatgcagtacaagatgaacagaattgttggtcaatgtaggcaaaaatgtgaacttatgcaggcgaaatttactgagaaactggaagaagtacataccgcataccagaagatggcgaaaagatgtcagttgttggagcaagagaatgaaaacttgaacagagataagcacgagctgcaagaaaaatttgctgagaaatccaggcagaagaggaagcttgatgagatgtatgaccaactgaggaatgaatatgagtcggtgaagcgttctgcccttcaacctgcaaataactacttagcaagacctcagccagacttatttgcaggcatgcccaacgtgatggatggtggcgaccatctgagacaagggcagagagatgagggctggggtccaccgccaaggcaacgtcactgcacctctggtccctttgatctgtccaccgggtctcctgcccatgccgtggctcctccggctgatatcaggcccagacagcagacacggtcagtcttcggagctacactgaacaatccatcaagcaccctgcgaaacctcataatctcacctgtcaagcgtccccagacgtcccgtaatcgccaacacatattcacgttgtagagagttggaatagctgacgctgacggggtgctccgcattggaaatcaaatggagatatggttgattatacgcagacttcgtccatttctacagttacatgtacagcaggaagtttcatctatacccctaatcttagccttggtagtatgacaactgtggttaacatttttctaactcatccgcatctgaacagaccaagtaatcctgtgtgctgattgaggacctaaacgagttgtttaagtgcaagtgatttggaactggaattacttggatgttatcctaaataaactccaagtggagtttgcctcctgtcttaaa

SEQ ID NO: 127888 - DNA, 411 bp, Zea Mays
atgcagatatgctttgaagctgttatgagcgtagttgtagcatctcgtcacactgttgtccacgcggaaggcgagcttcggggagtgaggaggctctacttcttggacccggcgacctccgtctctggggagtgcgaggtgggacagggaagcgggaagcgcacgggtggtggggcggaccgccttcagttgagccaaggcaggagaagaaatggggataccggccttgaggtagtaggggaagctaggatcgtaacaacgggaagggggctaggggcaaggatcgcgcggcgggccgagggcatggtgaggcagggggcatgccctcgccgtgcgggcatcacgacgtccggggagagggggcgcgagcatcgcaagagtgggcagactcctttcctggagcgggaatag

SEQ ID NO: 127889 - DNA, 2136 bp, Zea Mays
atggcttccgatccggatgatgatggaggcgaggtggcccccgtagaagatgcagcaccggcggaggtagcgtcggatccgtcgccctccgcagaggtggctgcaccagagagcgagccggcgaaggcgggcgcaggaagcatcgtcccagcggcggccgccgagtcatctcaccccgaggggctctcccttaactatgaggaagcaagagctctccttggaagactggaattccagaaaggaaatgtggaagttgctctacgtgtatttgacggaattgaccttcaagctgcaattcagcagttccagccatccctgtctgataagacaccatcgaagaaagggcggacaaaatcagaaataccaagttccgtcccgcaaaataatccggctagccttgttcttgaagctatttacttgaaatcactgtctcttcaaaagctagggaaatcgacagaagctgctaaccagtgcaaaagtgtactcgattctgttgagagtattttccagaacggcgctcctgatatcgagcagaagttacaggaaactgtgaataaatccgttgaacttcttcctgaagcctggaaacacgctggctccaaccaggaagcattagcgtcataccgacgagctcttcttagtccatggaatcttgatgatgaatgtcggactagggttcaaaagagattcgcgtcttttctactgtacaacaacaacatagattggagccctccaagcatggctcagcaagttgaaggctgttttgttccgaagaatagcgtggaagaggccgttctactcttgatggtagtgcttaggagctggtaccagggcaagacccattgggatccttcggtgatggaacacttaacctatgccctgtctctttgtggtgaaccactggttcttgcaaagcagcttgaagaggttttgcctggagtgtatcctcgcacggagagatgggccacactagcgctctgctactacgtagctggccagaaagatgtggcgctgaatttcctgaggaagtccttaaacaagcttgagaatccaaatgacgtcctcgccttattgttagctgctaagatatgtagcaaggagcgccatcttgcttctgagggcgtcgaatacgcaagaagagtaatcgcctgtgccgaatcatcggatcctcatctgaagagcgtcggcctccatttcttggggagctgtctaggcaacaagtccaaggtcgtttcgtcggactaccaaagatctctgctgcagacggagactctcaagtcgtttgcagagtcgattggccttaaccgctacaacgccgacctcatattcgacatgggagttgagtacgccgagcaaaggaacatgaatgccgccctgagatgcgccaaggagttcatcgaggcaacgggcgggtcggtttcgaaaggatggaggctgctagcgttgattctttctgcgcagcagaggttctcggaagcggaagtcgcgacggacgctgccttagatgagactgcgaagctggatcaaggatctttgcttagggtaaaggccaagttgaaggttgctcagtcgtcgcccatggaagcagttgaagcgtaccgtgctcttctggctctcgttcaggcccaaaagaactccccgggcggatcttgcaagagcgctacagaggacgcggatggtagtgtctccgagtttgaaatctggcaaggtcttgctaatttgtactccagcctctcgtactggagagatgctgagatttgtttgaacaaggctagagccctcaagttgtactcagctgcaacactccatgcagaaggctacatgcatgaggcgcgagatcaaacaacggatgcactggctgcctacgtcaacgcgttctcgaccgagcttgagcatgtgccgtccaaggtggccatcggcgcaatgctctccaagcaaggtcccaggtttctacctgcagcgaggtgcttcctctccgacgccctaagagtcgagcccacaaatcggatggcttggctttacctaggaaaagtgcacagatctgatgggaggatctctgacgctgccgactgcttccaggcagcggtgatgctagaggaatcggatccagtggaaagtttcagttcgctctcatga

SEQ ID NO: 127890 - DNA, 1980 bp, Zea Mays
atgcctctcatacgctactatgttgaccatgtgcatgttgcagtggaagcaagagctctccttggaagactggaattccagaaaggaaatgtggaagttgctctacgtgtatttgacggaattgaccttcaagctgcaattcagcagttccagccatccctgtctgataagacaccatcgaagaaagggcggacaaaatcagaaataccaagttccgtcccgcaaaataatccggctagccttgttcttgaagctatttacttgaaatcactgtctcttcaaaagctagggaaatcgacagaagctgctaaccagtgcaaaagtgtactcgattctgttgagagtattttccagaacggcgctcctgatatcgagcagaagttacaggaaactgtgaataaatccgttgaacttcttcctgaagcctggaaacacgctggctccaaccaggaagcattagcgtcataccgacgagctcttcttagtccatggaatcttgatgatgaatgtcggactagggttcaaaagagattcgcgtcttttctactgtacaacaacaacatagattggagccctccaagcatggctcagcaagttgaaggctgttttgttccgaagaatagcgtggaagaggccgttctactcttgatggtagtgcttaggagctggtaccagggcaagacccattgggatccttcggtgatggaacacttaacctatgccctgtctctttgtggtgaaccactggttcttgcaaagcagcttgaagaggttttgcctggagtgtatcctcgcacggagagatgggccacactagcgctctgctactacgtagctggccagaaagatgtggcgctgaatttcctgaggaagtccttaaacaagcttgagaatccaaatgacgtcctcgccttattgttagctgctaagatatgtagcaaggagcgccatcttgcttctgagggcgtcgaatacgcaagaagagtaatcgcctgtgccgaatcatcggatcctcatctgaagagcgtcggcctccatttcttggggagctgtctaggcaacaagtccaaggtcgtttcgtcggactaccaaagatctctgctgcagacggagactctcaagtcgtttgcagagtcgattggccttaaccgctacaacgccgacctcatattcgacatgggagttgagtacgccgagcaaaggaacatgaatgccgccctgagatgcgccaaggagttcatcgaggcaacgggcgggtcggtttcgaaaggatggaggctgctagcgttgattctttctgcgcagcagaggttctcggaagcggaagtcgcgacggacgctgccttagatgagactgcgaagctggatcaaggatctttgcttagggtaaaggccaagttgaaggttgctcagtcgtcgcccatggaagcagttgaagcgtaccgtgctcttctggctctcgttcaggcccaaaagaactccccgggcggatcttgcaagagcgctacagaggacgcggatggtagtgtctccgagtttgaaatctggcaaggtcttgctaatttgtactccagcctctcgtactggagagatgctgagatttgtttgaacaaggctagagccctcaagttgtactcagctgcaacactccatgcagaaggctacatgcatgaggcgcgagatcaaacaacggatgcactggctgcctacgtcaacgcgttctcgaccgagcttgagcatgtgccgtccaaggtggccatcggcgcaatgctctccaagcaaggtcccaggtttctacctgcagcgaggtgcttcctctccgacgccctaagagtcgagcccacaaatcggatggcttggctttacctaggaaaagtgcacagatctgatgggaggatctctgacgctgccgactgcttccaggcagcggtgatgctagaggaatcggatccagtggaaagtttcagttcgctctcatga

SEQ ID NO: 127891 - DNA, 264 bp, Zea Mays
atggcggcggcgaaccagctgcgcgtgggagaggaacggcgatgggctgcgggtgggagagggctgcgcgtgggagcagtttggagccagaaatttgggctccggctccgtgggctgttttggctcctgctctttgatgagagccgtttcatcaagatgcgtttgggagagctccgggtaggagctggagccggagccgtgggagagccctcccaaacgggggcgaaaattgtgcaacataaccaaaaccacggagcggagtga

SEQ ID NO: 127892 - DNA, 1502 bp, Zea Mays
ctaaaaccgcgccctccgctgcgcttctctctcactcgtcttggttcgtcgtcgtccacctctccctctctctctctctctctctgctctctctcgtctcaccatcacagcggccagctcagctggaactagtagccaagccaagaaagttccgacgtgccgatcgatccgcacgtgtgcgcgcacgccgatcgcccggctagctcgccgccattgctaattatattctgcatcgatcgaccacttgtgtaatgccggagggagatcaggtgtcgtcgtcgtcgtccaggtccagccaggcgtcgtccgggggaacgtcgtcctcgccgccttggtctccggccgggaagaaggcgggggcggcggagaagcgggcgcgggcgcgggagacgacgacggacccgccgtcgtcgtaccgcggcgtccggatgcgggcgtgggggaagtgggtgtcggagatccgcgagccgcgcaagaagtcgcgcatctggctgggcacgttcccgaccccggagatggcggcgcgcgcgcacgacgccgccgcgctggtggtcaagggccccgccgccgtgctcaacttcccggacatggccgcggcgctcccgcggccggcctccgcctcgccgcgcgacgtgcaggccgcggcggcgcgcgccgcggccatggagatggagcccgctgcggccctgcatgagccgccggacgggcccgcggacgaagccgccgcattgcagatgcagcccgccgccgctgctccgccagcgggcgggcagcagcaggacgaggagctggaggcgatcgtggagctgccgcggctggacgaggactgcgccgtggccacgctcggcgccacgccctgcttgtcgtcgtcgttccacgacgtgctggcgccggcgccgtggtgggtcgacgacgccgcaggatatgtagctgcggcgcacgacgtcgacctgtttggtctggacggcgatcacggatgggcgcaatcggttggtgccctcctgtggaacttgtgattactttgctgctgctcgtgctcgatggtctctgcgttcttagcaataacaacaacgatgacgacgacgacgactactactactctgtgtaattaactcctgataaatgctaatctcctctcctttctgagcggtcttctgcagaatataatgtggaggtagagatacagttgcaacatggtagagagagagagagagagtttagttttcgttactatagctcaacaaaactggaaaggaaaaaagggttgcaagttggcggcggccgctgtggtacggctgattagtggtgtccgtcgtctctctttccggcgtacggtcttttcgttgcctttctggtcggatttggacgcttgtcttgtgaatttgtctgtatttcttctcctttttcttcctttttctctccaaagggcgctgctagctattatcttggcctgcctgatcagtaagtagtaaatgaaaatgtagatgcctgaaattaatgca

SEQ ID NO: 127893 - DNA, 999 bp, Zea Mays
aaacaagcgttccgtgcgcagctcgaaattgccatcgatcgatttgcaatgccggaccgggcggaatcaagcccggcgtcatcgagggaggcttcatcctcaccgccgctgtcagcaactgagacggctgccaggcgcagcgcatcgggatgcgggaagcgagcccgtgcccgtgacggcgagaagcacccgtcgtaccgcggcgttcggatgcgggcgtgggggaagtgggtgtcggagatccgggagccgcgcaagaagtcgcgcatctggctgggcacgttcccgacccccgagatggcagcgcgcgcgcacgacgccgcggcgctagtggtcaagggccctgccgccgtcctgaacttcccggagatggccgcggcgctccctcgcccggccaccgccgcgccccgtgacgtccaggctgccgcagtccgcgccgctgccatggagccatctatgatgcttggccccactgccccattgcccagatcggcgcttgccccggtgaaggggcaggtgcatgacgacgagctcgaggcgatcgtcgagctcccgccgctcgacgaggacttctccgagctgctcgtcccgctcggcaccgcgtctttctcgttccacgacgctacgcaagcgtcttggcgcgacccggagtggatcgaccacgacgctggctatatggcggcggcgcgcgatgccgacgagctgttcggattcgggccggacggcgatcacggatgggcgcagccgtttggtagtaccttcctatggaacatgtaattttggttctggtcggtctgttgatcagtaagtgtaattaactcctgtcgatatctttacctttgaaatttttcttctttgtgctttctctgctgctgctgctgaatgatctgtacataaactggacgtactatgacttgaagaaaaaagtttcaacttcactattactggaaaaacatgttgcaacttgctgctgggggttattattaaattattgcgtca

SEQ ID NO: 127894 - DNA, 113 bp, Zea Mays
gttcagtcaatcgttgtgaactcttttctaatcgctcacttcattggtcgtgttgtaccaaaacatattggatggagtaaacaataacatcagttacccaaatcaaaaaaaaa

SEQ ID NO: 127895 - DNA, 480 bp, Zea Mays
aatagtctcatcatcaagggatttgaatatctctttctccgtatagcaaaccatcaaatcattcatccaatcatcttcaattttgttacgcaattctctcttaatgatgttagccaaaaatattctctcaacacttgttgttgagacgggtaataacaaggccaactcaattagcttgaaaaacaaagggaacacaagatgctttttagtttcaaccatcttcatagatagagatgcaatatcttcacaagtaccaaaagcagcatgccttcgcacgtggacaatgtatgtctcaagttgctctcttaacattgcacattcaataactgaaaaatccttatcatatagagtaccaagacgcacaaatttctctatatcaaaactgcaaaataagttctttggatcgaggcaagaaaagcaaacgagcaactcgctagaaacttcattaaagcgatggcataactcagtgttgattttatc

SEQ ID NO: 127896 - DNA, 866 bp, Zea Mays
gagaggatatcaatatatctgaggagtgactgtgtgtctataatatttgaatccctagttaaagtatcgatggatttattattgaaatctgtgaattttttatttaggccgttctgtgagcaactcttggtataattggttgcaatggcgatatcacaagctcttcatggatatgtgacgatggttcgggttacagtttttccatttcaccccgttcgttgcagctattgctacagtacttttagagagaagaaaattgcagtcgcagttgcagtcttcccgttactcatcaagaagttttcacacgaagagcaagcaaatttagtatggcagttcttatgtagcatccctgtaaacatgatggcaaaatttcttccatggatttctgcttctgtttctacagatgagaatcaagatattcttgactgcctaagtaaaatagttcctgaagaaaaattcctccaagaggtcctcatgattatggcatcatacatcttaacttcccatttgtaaagttattggcatatttcacttcagttttttactttgtgaaggttgttttcacgtggtttggagggaaatcagaaagcagttctacatgtgagtctagctctggtcaatgtgacgtttttttgctacagtggtgttatggtgaaacagagttttgtgtgtatgtaccaacagctaaaatgtaaatacgatattatcatagttgagtacaggaataattatctcttatatcttattgcaaaatctgaaacagttctcctgtagatggttagcttgtattttacgctacaattacctcagatcacttgttgtatcttacaccaatttacgaaatttcttgatgcgttttatgacaa

SEQ ID NO: 127897 - DNA, 984 bp, Zea Mays
aagaaggaagatgtagttaaacttgttacagacaaggaaacgaatgacaacataattttgcaactcaggcaagaacttgaggcaacaaaaaagttgcatgaggcagagactcagcaattagagaccaaagctgccaaagtaaataaggagtttgaacagaggataaaagaaatagaactcatgttagaagattctacaaagaggagaagagaacttgaggaatctactgaatctagaatccaattttggaagcagaaggaaatagtggtaaacaaatttgtgggtttgcaagtaaagaatgctcaggaattgaggctctcttctgtttcagttagacttgaaatacaaaattgtcaaaaaagatggtttgaagaattggctggccttggacaaaatcttaagatggtaacaagtgctgcagaaaaatatcatgcaactcttgcagataatagaaaactattcaacgagatccaggaactgaaaggaaatattagagtttattgccggataagaccttttcgaccctgggaggatgagaagtccacttcagtggaatatattggtgagaatggtgaactggttttatcaaaccctacaaagaagggaaaggaagccggcaagaatttcacttttaacaaggtttttggccctacagctacacaagatatggttttcaacgatattcggccactaattagatcagttcttgatggctacaatgtttgcatttttgcatatggtcaaactggatcaggaaaaacacatacaatgatgggtccggaaaacgcaactgagaaagaatggggtgtcaactatcgagcactaaatgaccttttcaacatctcacatgatcgtcgggacacaattaaatatgaacttggtgttcaaatggttgagatctacaacgagcaaatccgtgatctacttggtaccggtggctcgcagaagaaatatccttcttattcaaggcttgtttcagtatag

SEQ ID NO: 127898 - DNA, 1450 bp, Zea Mays
cgcacactagggatccagaataccacccagcccaatggacttgcagttcctgatgcaacaatgtgtcctgttgattcgacttctcatgttattgaactaatgcaaacagggcacaacaatagatccatgagtgcaacagccttgaacgagaggagcagcagatctcacagtgttgtgaccatccatgtccagggccaggatttaaaaactggtaacactttgcgtggtgctctgcatcttgtggaccttgcaggaagtgaaagggtggaccgatctgcagttacaggagacaggctcaaagaagcacagcatatcaacaagtctttggctgcacttggggatgttatattttctttatcacaaaagaatgctcatgtaccatacaggaatagcaagcttacacaagtcttacaaacttctttgggtgggcatgcaaagactctaatgtttgtgcaagtcaacccagatgtttcatcatacactgagactttaagtacactgaaatttgctgaacgtgtatctggtgtagaactaggtgctgcaaggaccaacaaggagggcaaagatgtcaaagaattaatggaccagctttcactgctcaaagataccattgcaaagaaggatgatgaaattgatcagctccaactagccaacagtagcaattccctactgaagtccacgaaacatggtgactccttgttgaagcattcggcctcttctccaggaatgacatccttaggaaaagtggcaagctttggtagcggggcagcttctgatcttgacaactgctctgacaccagtgataggcattccgaagctgggtccatgctctctactgacgaggcccgacagctgagccagaactcggctgatcctggtggtgattcagatggaaggctaagtgatatatcagatggcggtatacccgcgggtgcagaaactgacagttcagcgaacaacgttgtggaccaagaacaagacaaaacatccgctactggaaaagagcggttagccaaagcagtaagtcgagtccagaagctaacagtacccaaagtcggccaagcatcaagcttgaggcctaaaccaagagatccttctgctcctaaatcttcagtcacaccaggtgtgcgaaaaggtaccaccactcaagcaactccaccagcaaaagcaagcggcacttcaaaaagagtaccatagatcaagataatcatttggcgaagccgcttcccagccatttttctttttgcatagctttttcagatcttattgccatgtgtaacaccgatgccaattactgacttgtgcatctcaggtggataggttcttttcttttcattgtttgcaatgagggtgttaactgcatcagtatgtgatgttagcatgccatgagatatcattgctcaatgtgttagtacaaacagtgaaggaattcggattgatccattcatgt

SEQ ID NO: 127899 - DNA, 839 bp, Zea Mays
atcagcatagtatataaaattccgttctctcagtcctgtttccccgccgccgcctccaagcgccccagcgagccagctccggcgaagtcaatcctgcgctccgcaggcagcatcaagcatggcggacacgaaggcgtcacccgcggtgacgctccgcacgcgcaagttcatgaccaaccgcctcctctcccgcaagcagttcgtgctcgaggttctccacccgggccgcgccaacgtctctaaggcggagctcaaggagaggctggctaagatgtacgaggtgaaggatcccaactgcatcttcgtcttcaagttccgcacccacttcggaggcggcaagtctaccggattcggtctcatctacgacaacgtcgactcagccaagaagttcgagcccaagtacaggcttatcaggaacggtcttgctaccaaggtggagaagtcgcgcaagcagatgaaggagaggaagaacagggcgaagaagatccgcggtgtgaagaagacaaaggctggggacgccaagaagaaatgagcaaggtttcagtgtactttagccgtcttgagttcgagtaacacctgttcgccgtcagaaattttgtaccccatgtcgcaatgctttgatctagaaaaagagtttttttagctgtttacatcgactactggtacatttgaaaaggcatattccccatctttgtggcaatgtcggggcgataccatgctgggccgagaatttttaacgaagttatacttttgaaagatgaaacgtgacgtccgtgagcctagatagtagcgttgattccgttgcggcagaatctgtttctgaaacggtacattctgtg

SEQ ID NO: 127900 - DNA, 273 bp, Zea Mays
atgtcgtacacgtggcttgctgaaattataaacggccagcaaagcgcaagcgccggcgaatttttcccgtatttttcctggtgctacgcgaatttttaccgtccatatttcccgtttccttctcctgataagaaggttggttcaattgttggtgatcttgaagttattgaggctattgtttcaaacttgaaggttgaggacgatgatgtcatagacagtgatggagatatagatgggctaagtgcagatgatcagagctactttgacatgtag

SEQ ID NO: 127901 - DNA, 1895 bp, Zea Mays
accccaacccaaccccctgccgcgcccgcacccagcgccccgagccctgctcccccatcgtcttcttccttgtccgtctccactaccgaccaacgggctgcctgctcacacttcgccactactgctgctgcgcgttggcgagcgcgcgtggttcacgagcgagctccaccacaagcccagtcgcgcacggcagccgttttgcttgttttgtttgctttccgcctcttccgtgcttcctcttttgggcggcctggctgggctagctagctgttctgttcattccgagttcccggcatagaacacgaggttggagttagaggcttaccgagggagcagacagcagaggtcactagcgatttcacagtcacgcacctgcatttcttcttttttttcttcttcttttctttagcaagctctctttcttttcttgctcttgttttgtttgtcctccctgtaataactcttgcctgccttcccctaccctggtctctttccttcttcctgcactgcaggacactataagagtagctagccctacccaatatcttcagccgtgcttgccaacttggagagagagagagagagagagagagagagagagagagagagagagagagagagagagagagagagagagagagagagagagagagagagagagagaagagaagagaagagaagagaagggagtgagtgatcgcaggaaggaggatcggagtgatgggagacgcagcagagaccaacaagactcttcacaactggatgggcgagccgaggccgaggtcgagcgaccagcgcgacgaggaggagacgcttcagctcagcctcggcctccccggaggaggagcaagtgcgggtggtggggtagcacccgccgcctggagaatgctgccggccagagacgaggagatgcgctctgctgctgctgtcgtcgacacctccctgctctctctcggctactccgccccagctttctcgccccgctcaccaggcaaggcaaaggggtccccagcagcagctacagagaatgcccttgcatccaccaacaacgcctcccagagaagatctccaaataccccggttattgggtggcctccagttcgtgccttcagaagaaatctggccacctctagcagagcatcccttgaacatcagaatgggaagaaggaagacaaacctgaacagaccacaaaaagagctccatttgtaaagatcaacatggacggcatccctattggtagaaaaatcgatctgagtgccctcggtagttacgatgagctgtctctgtctgtcgacaagctattccgggggcttcttgcagcacaacaagaccctctggctgccggcgcaaaggagtgttcacaggaagaggtggcgatatcgggtttactagatggaactggggagtacactctggtttatgaggattatgaaggcgatagggtgctggttggcgatgtcccctgggggatgtttgtttcttcggtgaagaggctgcgcgttctgaagacatctgacctctcttcatctctaacagcacctcctggccagaagaggacggtaactgagtgtccagtgtttacctcttagacacttccttgcagtgatgttggtgtgctgtgaagaagaaaacgtcttctgagcttgtatcatctttcttcgtggtttcttcctcttcttttccctactttctcttggaagggatcatcaaagaaccgaaccgaccttttgggttttcctgctcttgtttattttgtttctctttccgggaagcgatgtgaccttttgggttgtatgtaaatgttcagacgaaccagctctatgtttatgcagcctatcctgtctgttgccttttacacaccgaggacatgtactgtttgttgtggtcatgatgg

SEQ ID NO: 127902 - DNA, 1806 bp, Zea Mays
atggcgacattcaagcatacgagtgacgagcagtgggagaagatgatggaggtgttggaccggctggaagatagactggaggcggtgatggtgggtcaacatcgactccagaagcaggcggaccgtgtggccgcggcagcaaggaaggcacaagagagggagttcctcatagtggcaaggacagaaactaccgcacatgacatgatcgatgaaatatctactaagaaggtggtctgggatgcagaagtgttatttgattttgattcacatggtctattgcaacggctagctcaaggggagggtgaccagacgcacaacaattgtgagcagggtgttgtgtctgatgttccatgtatgttggttggaatgccacatcaagccaatacacacctgatgttcagtgaagttggtctaaaagtggcttgggatgaggagatgcaatctgaaactcacatgcatgaaggtttactgaagcagcttgctcaaggcggagaagatttagaagaatcgactagcaaggctgctgatgttgaagatgtgatttgtaatgagaacatgctacatgacttcagttcacataatgatttgcggcaacaattagctaatgatcaagtgttccatgcaaggtctgacaatgagatccgggatgaggaaactgggcatgatgagttgttggatcagctagcatcaaatgggaatgatgtctcagctagtgagcagcattatcttgttgtgtctgatgactcttctcaggaatgcactagagctcaagctgaaataatagaagaagaaaagctaccaaaagcagatgagaatcatgttcttgatgacagacagcttcagcctcctgttctagaagcgtctcctgcttgcagtacatttgaaaggcaaaatgtcatgcaacatgaagcttcagtttcaagtcaaggctccctaacttcttttgaggaggaattaacatcatatggggacaatgtccaggctgttggagaacatcagcttgttgtatcaaaagagtctctagaggaatgcaaaagagatgaagtcaaaagaaacatacagaaagcagaatttcagcttgctgcatcacaagtctcttcttcagaaaacaacatggttgaagtgcaaggggctgcacaagaagaaccattgcctttaaatggagttgaggaaaattcagacaagggtgacttcgtttgcaaagagcagactcagctttgtgtcacaaatgaatccttggctgcacagctgcaaggtaatgttgaatttgctaaagtaatgcagcaccaaaacttggacccaggatggcatgatgttgggtttggtagctgtacaaagagagtggtaccgttattgcatcggcattatacacaacaacctcaggattatgtggtttctcttcatggtcagcttcttgacactggcatacacatgatctgcagatctgatccctgtgctgttgacagatacttattagtggaggaaatgtatggatgtattctgttaactgaatcagcatcaagcaaagcagggatagcactgccaagagatgtggctctcttttctgaccaggttgcaacagacacggcagatgttttaaaaaggtttctaaggaactgtgatggaacaaattcggaagctatcccacggcagcaaagggatccaagaattgatcggtctcattggaatgatgatgacagaagtaagacacaatttctcctttggataattagaccttgggatcccggactgcattacatggcatgtggttgcttggggacaagcaacgtttcgacggggcggtaa

SEQ ID NO: 127903 - DNA, 80 bp, Zea Mays
gctccactaggtccgtgtctgtgaggctccacgtgtcgtgcgccggtgggcagcgcagcacccgccgcactttccctctc

SEQ ID NO: 127904 - DNA, 652 bp, Zea Mays
aataccgaatacagatgctagatacacaagttacagaagtcgttaaaaagttgcgcccttcacagtttcaaagagaaaaacaaaatatgcaacatttaagcagcgaacgagcataactttatgcataaactacccgcatgagtagcgtccaaccaagctccttaagacgagtatttctgtctatcccaagcatggcacacatagcaacatcagctgcagtgcccttcctacgttttcccgtatacaatgaagagatttagcatcttatagctttcctcctctcagcgccaaaagcatccttcaacaacagcacgagaggtttctcttgatcgggttgaggatgccactcaagaattactttctcttcttcaatggtctcacgaatatgctgatacatgttcatggctatcctggaatggaaatcacagccagctatgaaagcatctaacatgcttttgcaatcagcaggatgcaccaagatcccgagttccagctgcacgtaaaacaagtttgtctttttacttgaaacaaaatcgcttgatgattcactttggctgctagatttgatacaaccaattgtaacttttctctggttcttgagccagcaacatgaccaaccttggcaaccttgctaaaagcaccattcagaccg

SEQ ID NO: 127905 - DNA, 1490 bp, Zea Mays
agcacaagaaatgaagaaatattaatgtactaatctatcaagatcacatggagtaagggcaactatcactcgctctccggccgtgagttcacaaaatttctccgactaaacaagacgcttatccaaccacttggatagctctccctttttctcctatatatatccacataagctgcgtccctttgatgtcaaaacattgaatggcagagccttacaacttagcacctcatggagtaccctcgtgtcacaaggagatttgcaataaaccaggtgacgaaagctccgagtcttacaattccttctcgggcgcgtccagtgggtccttgtgctcatcagcttccaacgtgtctgatgatgcaacttcttccccacctggccatcgctctgagccatcctcagcatcttcgagcacgttgcatctggacgccgagggtcccctgtatgagttatcctcgctgctagatgagcttccaatcaggtgcatgtttataatcatttaccttgaagaaaagtcataaaagctgtccaatttctacaaataaatcacaatgtggcttcacaatgtagttttgtaacttttacattcatgatgaaggtagaaaaagatatagcctcaaaattacaaatgcttcaataagttttgcgatttctttgcactattatcttctattaaaccagcaagcttctgtccctaccatacaatggaatgatctgttatttgttataaaaagcttgcaaattcactttcagctcaacaaaacttgatactgctctgtgataactagtagaggttcccttttgcacaagatctatgataagcatgcagcagagttcaacttcatatgtatatttgctgaaaggaaaaaatactgagtggatatataacacaatgtcatgattataaaagatggatagtcaacattacttctataaatttcacttcagatgcaaagcattccaactcatgttcaattaacacgatttccacaggaaagggctgtccaattactaccaagggaaggcccaatcattcacgtctatatctgatgctacaagtgttcaagaccttgcaaagaaagtttcatacagtaagaggatgagagcaagcaaaagctattcagtaggattagacatgaaccaacggacaatcattgtatcaaggccgtgcaacaagatgatagcaaagaggccctcaaatggttcatttgctagagtaatgccaggaactagcaacaccagcaatttgaacatcagcactaaatcatatgcccaccagaacaagagagttgcaacacatattgatctgtaacaaagggaaaactagggtgacaagcctccactttccattgacgagctgtgcttcgtgtgtgctttatgcatgaaaatctgaacaatatttgtttctacaatcaacctgatttcttatgtgcttcatttcatgataaataaaaagatcgatcaatcaaatggatgtaatgagtaacggtgag

SEQ ID NO: 127906 - DNA, 866 bp, Zea Mays
ctagccgccaccaacagcctcctcttcctccccacgctctccttcatccttctgccgtgcagcacctctgctcccctttccatggtgcctagcaggaactccatggccagccgcccctcttctgctcggccaactctgggtaagcggcgccatgggtgcaacttctcctcagtctgtgatccgaccagcggtcacggcgtctgagttccctgcgagctcttctctgcccctgcgttatccatggctgcgagctctccctggcgcaccttacctctggccggcaacctgcacagcatccccctccccaggctcctagcgcagggcatttctctaggtccgagctcgagcaggtgagctcgccccatggcctgggctccttgttcgcttcctgcacgtacgctccctctcccatatggcttcctgcccttctcaagtccggccatccccaccttgccgtggattccctcgagcagtcccatctggccgccatcctcccagatcgagtttccccttttttttgtgcagctcaccatctccccctgcgcgcgctggctagatgccattcgagctccggtctgcaactccctctcgctgcttaccttgaacgccggagctccaaggccgcacccccgtccccatggctgaccagcaaacttcgatggtcgagccctctaacacttccctctcccatggcgtggctgccccatggatgaagccccagtttaccagcatcctctctgctctatggccgagggcccatttccctagcaccctcctcgcatgggcaggctgcaggtgcccgacaaaatgcccgtgagaggcttggtgttggggacagccccgcccacgacgtcgtcgaccctcgg

SEQ ID NO: 127907 - DNA, 1247 bp, Zea Mays
aatacaagcgcagcagccactgagtcctgagagcgcgcaacagcagctaagctagcactagcaggcggccgggcaggtcggcatggagcctcacatggagagcgcgctgcggcagggcctgtcggaggcggagcagcgggagctggagggcgtggtgcgcgcgcaccacacgttcccggggcgcgcgccggggacgtgcacgtcgctggtgacgcagcgcgtggacgcgccgctggccgccgtgtggcccatcgtgcgcggcttcggcagcccgcagcggtacaagcacttcatcaagtcgtgcgacctcaaggccggcgacggcgccaccgtgggcagcgtccgcgaggtcaccgtcgtctcgggcctcccggcctccaccagcaccgagcgcctcgagatcctcgacgaccaccgccacatcctcagcttccgcgtcgtcggcggcgaccaccgcctccgcaactaccgctccgtcacctccgtcaccgagttccagccgggcccctactgcgtcgtcctcgagtcctacgtcgtcgacgtccccgacggcaacaccgaggaggacacgcgcatgttcaccgacaccgtcgtcaagctcaacctccagaagctcgccgccatcgccacctcttcatcggccaattaattcctcctcctccccctccggtgccggtggtgccacggatcatcgtcactagctagcgcgcgctaatccattgcgtccaaggcatgccctgttcgttccgttgctactgcaaattgcctgcaatggtgacgatgcttcttgcttgctttttcatctctccatccgtccatcgtttctagctctttggaacgaacaagaagctagctagctagctagagagagagaaaaaaaatgttgtccaacagtttgctataaacgaccttttccttttatttcatcgtaactaattcagcctttcggtattgcaaatctgctgcgtcggtgacatcgaaaggggttgcaagttggtgttattttatatatatcctggttttcttcttctttgtaaataaatatacacgtacgtcgtctctgctgttatccttatccctgcagtgtcataataccgcgcgcgccagtctattttgtgttttgtcaatcaagtcccggtagttggtacccatacttttatgacatctatttctttgttcggttcttttgtactactatactcttcttcgatcaggtttctttgaggaaaaagaaaaaggcaaaatag

SEQ ID NO: 127908 - DNA, 1221 bp, Zea Mays
aaattaatagcgtgaatgaaaagaatggtcaccagctgaagcgtcttgaggaggttgctccggaccctctgggcctggccccagcgcgcgccggcgtcttcggtcgaggccatgaacctgttggagctcaccgcggacggcgcgccaaccgagccgatgccgctgcacgagtcgtcggtcacgtcggcgacgccgtccagcatgtggccgacgacgtcgttgagcaaatcctggaccacggccgcgtaccgcgagcgcgccaccaccgcggcgaagtgcagcgccatccgggaccgcgcccgcggcagctcggtcagggcggaccggctcgctcccgaggagcactgctccgtcgcgttcagcgcgctgtccgaggaagcgatggagttggagcacagagtcagcgacagctcgctcgccgccgccgcggacgcgttgccgccactgcaggcggcgagcgggtagcggaggcctcccgcgtcggagagcccggccgcggcgaggtggtatggttcatgagctggtccgccggcgctggtccagatgccgtacggcttcttggacgacgatggcgacgaccagaccgccatggccccggattggctggggcaccgcaagctcgccgcgacgcggctgtcgcagccggcgacgccgtacagctcttcgtccatctcgtccggcggcgtcctcccgccggcacgatcatcccgcggcggcgcgggggcgttagcgaggagctggctggcgaaggaggccagcacgatgttgttcgccgcgtagtgcgcgcccagatccgccgccgtcgcggcgccgccgacgaccgccgcgttgccgaggccgccgaacccgaagccgccctggtcaagaagcacgccggggtggtggaagtgcggcacctcggcgctcataatgccgccgcctccgtagctgctgctgccggccatgaagtagccgccgcccatggcgtccaccccgattggcgagaacgtcgacggatcgctcgccattgtaggggaatcttgtaaagtttgtagtgatttcagcacgcctacagacagcaagcagcacgagttagaactctgaacacgttgttctctgcggttttcctgtcggatcagtagtggcagtagcactagagaaaaaagaaggcgagaagacgagccgcgtaactaaaaagatccccatggtgattgcgaaatgattcattgggaaggaaaaaaa

SEQ ID NO: 127909 - DNA, 270 bp, Zea Mays
atgggggcaatagccttcggtttcgtttggcttcggccttgggtgtttttggtgacggttagatttgtgaggtggcgggcgtgtttcgtgtacccgtggcattttaggcagtgctgcacgcctacgcctacgtctgcaccgggcaccggcacagcagtgcacatggagatatttggtgtttggagatgtgattactatagctctgcaacacaaaatgtgattaccaccatccccttctcgcgggatttgagttcccagacaatcccttaa

SEQ ID NO: 127910 - DNA, 678 bp, Zea Mays
atggccgtccggccggcagtgagggtggcggcgaggctctcttcttcgcgttggtggcgcgctccgcagcaggccggcaagccatccctcgtgcggctgcgtggagttgactgggtggctgctgcggctgtggcggcgccggcgggtgcccgcgcaagtgcaggggacggcggctggggtcgctggcccgtggcccaggcggtcggatccggtgctcgggggccagatctggaccctgtcgaccggatctacctcaacaactggcagttggtgcggtggtggccggtggcggttgcggtggcggcagttggttggggcttgtgcagggcggcggaggtagcttgcttttgtcctggagcctcgcttggcattgtgctggggttttcttgggcgaaagccttggcgacggcgacgcccctgggcgccgcttcccctgttgagggcgtcgtgcttcccagcactgtcttacatgggcgaaagccccgttcatttcggaccggcgacggtggcgtcctcgacgtcactcccttcctgaaggcgtcgctactgctggcgggggttttgggtccggtttcccttaaaactggatcaattcctttcttcttaattgagaggcagagctcctgccattacgttcaagaaacaagggatggtgaggtagaggatgagataggataa

SEQ ID NO: 127911 - DNA, 336 bp, Zea Mays
atggccaccgggcggcccgtacgactcgtgctggatgcctccctcctcctcgacccctcctccaccagggaggcggcggcggcggctctgcggcccggggtagaggagctgcggcggcggttgcgctactccaacctcaccgtggcaatctgctatgcagagggcatgccaactaatgaggtgctctacttatctacattattattacatccctctgaagttgtatcttcagaagttcacatcgacagtattttcttcctcttgccatacttacccatcatggcccatggggtgtctatcttatcatgccgtcttcaaagaatggcatcatgttaa

SEQ ID NO: 127912 - DNA, 393 bp, Zea Mays
atggctaacttcccggtggaccctcgcccattccatccgccggagttcattactatggatggggacgccaatcggcgtgctcgcgctcgcattcacctggctcttggacaggagactcatcgtgaggacttcgtcattgcgatggacatggaaggagtggtgcaacccgcggatgccgattacatcctcaccccggaagatgattggagacttgggaatattgatgttgttgccaatcaagaggacgatgtcccaccaaatggtaacccccaccctcttcgacaagatgatggtgatgaggattttctccaagccaaggggaatttaatggagaatgtggctaatcagaatttgggtggtattcaaggtgctgctcagggtgatcctatctag

SEQ ID NO: 127913 - DNA, 1652 bp, Zea Mays
ccaccattccgcgccgtcccgtctcctataaatagcctcccgctcgctcccagctctcatcaacccacccagcagctctcacattttgagtcatcaccgcccatccaaatccactccaagcgacccaccgcgccggagcgagcaaaatctgcagcaatcttcgaagaacgaaaccggcacctacctgatccatcggccatggcggcggcacttcagccacagcgcctcttctcgacggcctccacctccacctccgcctcctcttcctcgtcgttcgccacgcggccgcgccgtccgaccaccgccgccgccacctgccgcgccggcctgcgcgttccgtcgggcgtccagacgacaacaacagccgcgtcgccgtcctccagcccggcggcggacgccggcctcgggggaatcaagctcgactggatcgacgtgaccgcccttagcgtcggctctccgtctccagcgggccgcagcaacgcggccgagaagctccgcgcggtggcggaggccgcggcggaccgcgccgagatgcacgacatcatcgggcggcagcgggacaactggaaccacctgctgctccactccaccaattccctggcgctggcggcgtccgtgatggccgcgctggcgccggccgcgcccgcgcccgcgctcagggcctccgcgggggcgctcctggccacggccgcggtcaccatggccgccgccaaccggctgcagccgtcgcagctcgccgaggagcagcgcaacgccacgcgcctctggaggcagctggagcgcgacgtccgcgccacgctgcagcagcatcgggaggagggcgaggcgcagctggcccaggccgacgtgcaggacgccgtggacagggtgctcgcgctcgacgccgcctacccgctgccgctgctcccggggatgctggagaagttccccaaggcggtggagcccgcgcggtggtggccgcgccgccgcccgcagcagcaggccaagagcgccagcagctcccggtccaggagcttcgggcgccgcggcggcaatgggtggggccaggaagtggaggaggagatgcgcggcctgctgcgcgtgctgcgggccaaggacgagcaggagtacctgagggtggggaagctggtgctgggcgtcaaccgcggcctggccgtggcggggcccgcgctggccggcgccgcggcggtggccacggccttcatcggcggggacgcggcctgggcgtccggcgccgccgtgacgtgcggcgcgctggcggccgcggtcaacacggtggagcacggcgcgcagctgggcatgctgttcgagctgctgcgcaactgcgccggcttctaccgcaagctgcaggaggacatcgaggcggcgctgggcgagcccgacgtggagcgccgggagaacggggacgtgttccggaccaaggtggcgctgctgctgggccgcgacgcgtcggagctccgccagttcaggcggatggcgtccgtgtccgtcaaggacgacgacatcaaggactacgccgggaagctcttctgatcacggctcggaatgttctaaacgtagatataggaggaagaattacattccattgattctttatgtaaacaatccccattcacgcaaactgtgaaatgacaattctttgatttcgattc

SEQ ID NO: 127914 - DNA, 89 bp, Zea Mays
aggagtttcttccttcatgtgtcattcttctccccacgtgtgctcgtcccccttccacacgcggaaaacaatttcaccccacacaccag

SEQ ID NO: 127915 - DNA, 362 bp, Zea Mays
gcccctggtcccagacatggccaccgcgccgtgaaactccctgtgtcgagctcggtccttgctccagtctctgctcggcgttctacgcgcccatctcccccggctcctttcagctcggatccctgcccgcggagtttttcccctagccaagatcgtccttgcgcgctgtcgtcgcctagttcgtgtcccgctcttgctccagctatggcgcttcatcgccgcagttccctatcctatgcgtgctccgctttttgtgcgcgtgtgctcgccgtctctgttccagtcatccgcacaattttctctgttcccttgccgtggtcgtcgcgtgcctacgcgcagctcacgccctgctagcccctgct

SEQ ID NO: 127916 - DNA, 1034 bp, Zea Mays
attctcgcagagccgcctctcccttcccatcgggcgcgtgcgtgcgtgctcctctggccgccaagcaccaagctcacaccagccactacctcaggccaccatgtcgcttgccccagccccaatcttgcccaggtcattgtgtcgtcccctgctcggacctccaccaggtcgcgtcctcgctggtggccagtgccgctgcattgccctttccagcatcggccatggcacccacttccccaacacctagggccaagcctcgccaccgtgccttgtcttggagctccgaagaatgagcataggcttcccctgcaagccccaccgcgtcgccgctcctgccagccatgggcgtacgccccctcgagctcgtccggcgagtcatgccttgtccacgtcgagctcctcccctggaagctgtctctgagcccgaccgcaagctgtcatgtgtcctgctccatcttccagccgagtccctctctgctccagccatggtggccgtcagcttggagctctgtgatgactccatgccgcgcccctcttcaagctggcagctccacctcaaaattcgttgcgcgaccttgcctctccctcggctcgcatgcttgatctccctgctccttccgtcgccgaccttgggagtctagttcctcgacgcgctccacctattcgctgtttgccccacccagtggatagcggcgctcgccactccagacatagatatccatgcctcgtagttcgccctcaggtggcgtcgttgatctcgtctctgccatcgaattcgccttacatcttcgctcccattgtcgcagagaccccaccagctctgcacgccatccacgctttgtgttcgcatcggtgagacccaaagttcttactctatttagtttctcatccggcaccgactttgctagctgtgtatttatgtgtctatgtgtgatttgcaagtaaaggcatcccatgaatgtgtggtgaagacagttcgagcacaacccctgccaagtgttcgatggaaagtctgaaccaagattcatcgtcga

SEQ ID NO: 127917 - DNA, 333 bp, Zea Mays
atgaagagactatttcgtgatctttttatccaggaaggataccagttcatctatgtgtttgactggaccattctgaagtatcctcagataggctccaacctgcgaaccagggtaggtgaaagaaccagtggagttgctggaccctcaatggataagatggagaatgccccaggagaagtgttcggtagaaggaaccctagcagtcctgtgaaccagaccgacagttacgcgcaacagccacacgagactgtatccatgtcgctaaaggaaattatgcatagcactgatcgatctgggaaaggacaatggagagatcactccaaatatctataa

SEQ ID NO: 127918 - DNA, 687 bp, Zea Mays
atggagcaagaaattttgaagttcattcatgaccctagtcgtacagagtatgaattcaatggccttccaacttcgtatctgcgtcttgctgcacatcgcctggcgcaacattacttcttgcagtccattgacataccagacaacagtttgcctgatggaactggttcacgtatcatccttcgtaagacaacattcgactgccgactgcctgctgtccgccttgcagatattccagttaatctaccacaagaagacatctctatggcaagagtagctattaagcagagacctcaaaagaatttccatggcatgaacagctcaaatcccaatgcaaccacatctgaaaacaaagaggagatggattctcggtcggtattcgttggaaatgttgactatgcatgcactccagaagaagtgcagcagcactttaattcttgtggaactgttaatagagtgacaatcctgactgacaagtttgggcaaccaaaaggttttgcttatgtggaatttgttgaagttgaagctgttcaggaagctattaagttgaatgaatcagaattgcatggtcgccagctcaaggtggcaccgaagaggactaacgttcctgggatgaagcaaccccgcggtcgaggtttcaatccataccgaccatatgttttcctatatcttcgtgtacatgtgatttaa

SEQ ID NO: 127919 - DNA, 234 bp, Zea Mays
atggctaaggtgaaggtcatgcgggctcatgctgatggaccgggagcagtgaagggcgagtcctgggtcttgactgacggatcagagcagccaggtgaccaaccacggtggctgacacctggacacacacttgtgcgaggacgtggtggagtggaccgtgttgccggcgtggtcgaggactggcgggacacacgtctgatcgtggaggacatgcacgaggtgcggtgctcatga

SEQ ID NO: 127920 - DNA, 1688 bp, Zea Mays
acgtgcacgggggcaatagctctgttgatctagcccctcacgggcactgtgcgggggtatttataggtgtctgagtgcccagcgtcttgtcttaaggacgcatgtgccctcagacgcctagtttatccccggaatattcccataaagcagggttacaagctgtaattacaagtatgcctttacaagtcaggcccgtaatacagaggcggccacgcggggcccgttacaatgggccagatcacacgtgggccttggggctgaatgaggccgcgccgtgtgaggacgtcgccgcaggtcttcgtcaaagtgtcgagtcctgcgaagggtgtccctgcccgctttgcctccgtcggaccagcggctgcagcgaaggcctggagcgaagggtggcgtctttgccttcgccccaacacctgcggccgacgcgacgcggcagcctaccgggcggacggatccgcggacgaacggatctccggcgcctgacagatcttcggcgcgcggcctactgggtggacggatctccggtgcctggtatatcctcggcgtcgtggcttgcttcttcaccggcgccgcggcctgattctttgacggcacggcggcctgccggtcttctccaggcgggtggatcttcaccagcgcggcagcctgcttcttcaccggcgcggcggcctgcttcttcgacgacgcggaggccggcggcggacgcgacgcggcagcctaccgggcggacggatccgcggacgaacggatctccggcgcctgacagatcttcggcgcgcggcctactgggtggacggatctccggtgcctggtatatcctcggcgtcgcggcttgcttcttcaccggcgccgcggcctgattctttgacggcacggcggcctgccggtcttctccaggcgggtggatcttcaccagcgcggcatcctgcttcttcaccggcgcggcggcctgcttcttcgacgacgcggaggcctgcggcggacgcgacgcggcagcctaccgggcggacggatccgcggacgaacggatctccggcgcctgacagatcttcggcgcgcggcctaccgggtggacggatctccggtgcctggtatatcctcggcgtcgcggcttgcttcttcaccggcgccgcggcctgattctttgacggcacggcggcctgccggtcttctccaggcgggcagatgcggcagcctgtcggtcttctccaggcgggtggatcttcaccagcgtggaggcctgcttcttcaccggcgcggcggcctacttcttcaccggcacagcagcctcttcttcaccggcgcggcggcctgcggcggacgcgacgcggcgacctaccgggcggacggatccgcggtcggtcttcagctgctccgtgcctctgctgctccgtggcctgagctccgggtggacggatccgcgtcggcctccagcggctccgctgcctctgttactccgtgtctccagcggctccgtgcctctgctgctcggcggcctgagctccaaccgtctcgcgctgtccttgcctctagcggcctgagctctggtcgtctcgcgctgaattttagctgaatttggtgaaataactgaagcgctcggtttgctgaaataactgaagtcacttgctgaaataactgaatttgctgaaataactgaaagtgctcagtttgctgttgcttgtgctcgg

SEQ ID NO: 127921 - DNA, 828 bp, Zea Mays
gtttaatgtcaatgtcctactggatagaacaatgtgttttcacttatagcatggtttatggattattgagctgacatgctgtttctggcctctatcatttcaaaattttcatctacttctcctgtccctctggagcacaagggatacatatacattgctttattcgtgtcttgtttgcgagggagaaatgctctaaacagccccaagtcaccaggtgtttggttgtttatggtggtcatgcacaccaatttagtatttagatccttttgttctagttgattgtagatatgatgtttgtgatcattacggaggcaaggttttcctttttgtccactattgccacctatacaacttggtggtggattatgagttgtatcctcatttactattgcctctgattcactatacttgttttagagttgatcccaagaattaaggatttatattctctaaactgtgcatagatcataaaagaagccagtaaatagtgcaactaaagaagggttgtactggaaaaaataggtaaacgaggctaaaatttgggatccaaatacagtccatcttgtacataacttttatttggaatttggaatattcctgaatatcatatatgccaaactgttttgcaaccgaaggattcagaaaaccctgcatgaagctattttattatgtgttatctgtctctattatatgtgcctggtggatctgcaggttgctgtccaatgttgtttttgtgcttaaatagtatcatttgaatgttgtctttgatgcttcattctgtttaatatttttcaacctcagtaaagtaatctagctgatttttatata

SEQ ID NO: 127922 - DNA, 2571 bp, Zea Mays
gtgctagggtttcccccgtcttatcgcttcctcgttcccgcagccgccgcccaaaccctagcaaacccgtcctccgccatggccgacgaccactactcgtccaagcggaagtacgacgacccctcgccgccgccgcggcgcacggggttctcttctggcccgccgcctgcctcgccgcccgctggcggcgccccgtcgtacaacagcgttgcgccgccccccgatgagatccagctcgcgaagcagcgtgcgcaggagatcgcggcgcggatctttaacgccgcagaggccaagcgccctcgcgtcgacaacggcgacgatgacgtcggcggcttcggtggaggaagttccctgggtggcagcggtggtggtggtggtggccgcatcgggggcgcaggacttggcttctcgtcctctgccggtggtgggcatggggcttctatcccaccgttatcttctcagagcagtgcaccacagtactcatatggtggacatcagggtacaagcaaaaagattgaaattccaaatggaagggttggtgttattattggaaaagctggggaaactattaggtatatccaacttcaatcaggagcaaagattcaagttacgagagaccatgaagctgaacctggtgcactgacaaggcaagttgagctttctggcaatcctgagcagataagcaaagctgaacagttgatcaaagaagttatagcagaggctgatgctgggtcatccggtgctgtatctggtggccggaaatacaatgcaccacagccaggcgctgagacattccagatgaaaattgctaataataaggtgggattgattattgggaagggtggtgagaccataaagtctatgcaggccaaatctggagcccgcattcaggttattcctttgcatctgcctgctggtgatacttcaactgaaagaactgtgcatattgatggcactcaagaacaaattgaacatgcaaagcagctggtggctgaggttaccagtgagaatcgtgccaggaatccaatgtctggtggctattctcagcagggctatcaccctcctcgtcctcagtcaaactggggcccgccttctgcgccaccccagcagtctggttatggttatatgcagcctggggcttatcctggggcaccgccacagtatggtgcacctcagcaaccttatggtagctatcccccaacatctggtggctatcagactgggtgggatcagtctcaaaaccagcaatctcatacaactccccctggtactgggtatgattattatagccagcagcagcaacctcaacaacaacaatctgcccctgggactgctgcttctactgatgccactagctacaattatggccagccttcaacatatgcttcacaaggatatgattctacctatactcagcatagtggtgggcagcaagcatatggacatgatggctactctggttaccagacccaaggccagcagcagggctactctcagcagactggttatgaccagcagggatatggtgcatctgcttatggatcagctgcgaactcgacccaggatgggtccagctatggtggtcctggtggggccacccaggcatctccggggcagcaaacttcaaccccagctgctggaagccaccctggctatgccagtcaaccgcctactagtgctgcagcaagctatccagttcaaggttcagctccatctggatatggtgctccaccaccccagcctggctatggcacccaacctccacagcaaggtggatatggtccgggcgcttatgggcagccttctccacacggcgagaaacctcctgcatcttcaccttatggacaagctccgcctcctggatctgctcagggtggttatgtgcagtatggttacagccaacctgcatacggtgcaccaccagcttaccctggtgcacccactgcaagccacccgggctatggccaacagcagtcttatggcgatgcttatggtagtggaagctatgggcagcctacagcctacactactgaagcagcagctcctgctgcatcccaggatcactctgccgcacctgccgcggcccctggaacaacagctgcgccagctcctgacaacaatgggggtgccaaaacttctgcggaaacttgatcttcaacagctaattgggaacaaactttttacaagcctctgttgtgtcgtttcctccactgttgcttaatattacacatctagtttaggctccacatctacaggttatatctttctgcctgttgttttgaccccatgaatcgctctttccgtgctgttgattagtactttgttgtttttttattgctggttagatgtttggactggtgatatatgtgtttgtgcggttactcttgttggactctaatgggtacctaccggcttggtctggacatatactgtcctatatttgtttttagcctccttttacattggttattatgtgtgctgtacaactgtcggacgtttccataagctggtgatagttatggatgaaaatttggtttcaatattgtctaagatgatcataaaaggtttaag

SEQ ID NO: 127923 - DNA, 2587 bp, Zea Mays
atcgacaccttgaagcgtgctagggtttcccccgtcttatcgcttcctcgttcccgcagccgccgcccaaaccctagcaaacccgtcctccgccatggccgacgaccactactcgtccaagcggaagtacgacgacccctcgccgccgccgcggcgcacggggttctcttctggcccgccgcctgcctcgccgcccgctggcggcgccccgtcgtacaacagcgttgcgccgccccccgatgagatccagctcgcgaagcagcgtgcgcaggagatcgcggcgcggatctttaacgccgcagaggccaagcgccctcgcgtcgacaacggcgacgatgacgtcggcggcttcggtggaggaagttccctgggtggcagcggtggtggtggtggtggccgcatcgggggcgcaggacttggcttctcgtcctctgccggtggtgggcatggggcttctatcccaccgttatcttctcagagcagtgcaccacagtactcatatggtggacatcagggtacaagcaaaaagattgaaattccaaatggaagggttggtgttattattggaaaagctggggaaactattaggtatatccaacttcaatcaggagcaaagattcaagttacgagagaccatgaagctgaacctggtgcactgacaaggcaagttgagctttctggcaatcctgagcagataagcaaagctgaacagttgatcaaagaagttatagcagaggctgatgctgggtcatccggtgctgtatctggtggccggaaatacaatgcaccacagccaggcgctgagacattccagatgaaaattgctaataataaggtgggattgattattgggaagggtggtgagaccataaagtctatgcaggccaaatctggagcccgcattcaggttattcctttgcatctgcctgctggtgatacttcaactgaaagaactgtgcatattgatggcactcaagaacaaattgaacatgcaaagcagctggtggctgaggttaccagtgagaatcgtgccaggaatccaatgtctggtggctattctcagcagggctatcaccctcctcgtcctcagtcaaactggggcccgccttctgcgccaccccagcagtctggttatggttatatgcagcctggggcttatcctggggcaccgccacagtatggtgcacctcagcaaccttatggtagctatcccccaacatctggtggctatcagactgggtgggatcagtctcaaaaccagcaatctcatacaactccccctggtactgggtatgattattatagccagcagcagcaacctcaacaacaacaatctgcccctgggactgctgcttctactgatgccactagctacaattatggccagccttcaacatatgcttcacaaggatatgattctacctatactcagcatagtggtgggcagcaagcatatggacatgatggctactctggttaccagacccaaggccagcagcagggctactctcagcagactggttatgaccagcagggatatggtgcatctgcttatggatcagctgcgaactcgacccaggatgggtccagctatggtggtcctggtggggccacccaggcatctccggggcagcaaacttcaaccccagctgctggaagccaccctggctatgccagtcaaccgcctactagtgctgcagcaagctatccagttcaaggttcagctccatctggatatggtgctccaccaccccagcctggctatggcacccaacctccacagcaaggtggatatggtccgggcgcttatgggcagccttctccacacggcgagaaacctcctgcatcttcaccttatggacaagctccgcctcctggatctgctcagggtggttatgtgcagtatggttacagccaacctgcatacggtgcaccaccagcttaccctggtgcacccactgcaagccacccgggctatggccaacagcagtcttatggcgatgcttatggtagtggaagctatgggcagcctacagcctacactactgaagcagcagctcctgctgcatcccaggatcactctgccgcacctgccgcggcccctggaacaacagctgcgccagctcctgacaacaatgggggtgccaaaacttctgcggaaacttgatcttcaacagctaattgggaacaaactttttacaagcctctgttgtgtcgtttcctccactgttgcttaatattacacatctagtttaggctccacatctacaggttatatctttctgcctgttgttttgaccccatgaatcgctctttccgtgctgttgattagtactttgttgtttttttattgctggttagatgtttggactggtgatatatgtgtttgtgcggttactcttgttggactctaatgggtacctaccggcttggtctggacatatactgtcctatatttgtttttagcctccttttacattggttattatgtgtgctgtacaactgtcggacgtttccataagctggtgatagttatggatgaaaatttggtttcaatattgtctaagatgatcataaaaggtttaag

SEQ ID NO: 127924 - DNA, 1626 bp, Zea Mays
ctattctgttctccatgcccctttcatgtatacatatacacatgtgcaaactatattttgcagaatcgtgccaggaatccaatgtctggtggctattctcagcagggctatcaccctcctcgtcctcagtcaaactggggcccgccttctgcgccaccccagcagtctggttatggttatatgcagcctggggcttatcctggggcaccgccacagtatggtgcacctcagcaaccttatggtagctatcccccaacatctggtggctatcagactgggtgggatcagtctcaaaaccagcaatctcatacaactccccctggtactgggtatgattattatagccagcagcagcaacctcaacaacaacaatctgcccctgggactgctgcttctactgatgccactagctacaattatggccagccttcaacatatgcttcacaaggatatgattctacctatactcagcatagtggtgggcagcaagcatatggacatgatggctactctggttaccagacccaaggccagcagcagggctactctcagcagactggttatgaccagcagggatatggtgcatctgcttatggatcagctgcgaactcgacccaggatgggtccagctatggtggtcctggtggggccacccaggcatctccggggcagcaaacttcaaccccagctgctggaagccaccctggctatgccagtcaaccgcctactagtgctgcagcaagctatccagttcaaggttcagctccatctggatatggtgctccaccaccccagcctggctatggcacccaacctccacagcaaggtggatatggtccgggcgcttatgggcagccttctccacacggcgagaaacctcctgcatcttcaccttatggacaagctccgcctcctggatctgctcagggtggttatgtgcagtatggttacagccaacctgcatacggtgcaccaccagcttaccctggtgcacccactgcaagccacccgggctatggccaacagcagtcttatggcgatgcttatggtagtggaagctatgggcagcctacagcctacactactgaagcagcagctcctgctgcatcccaggatcactctgccgcacctgccgcggcccctggaacaacagctgcgccagctcctgacaacaatgggggtgccaaaacttctgcggaaacttgatcttcaacagctaattgggaacaaactttttacaagcctctgttgtgtcgtttcctccactgttgcttaatattacacatctagtttaggctccacatctacaggttatatctttctgcctgttgttttgaccccatgaatcgctctttccgtgctgttgattagtactttgttgtttttttattgctggttagatgtttggactggtgatatatgtgtttgtgcggttactcttgttggactctaatgggtacctaccggcttggtctggacatatactgtcctatatttgtttttagcctccttttacattggttattatgtgtgctgtacaactgtcggacgtttccataagctggtgatagttatggatgaaaatttggtttcaatattgtctaagatgatcataaaaggtttaag

SEQ ID NO: 127925 - DNA, 183 bp, Zea Mays
ttttttttcctttttttcttttctttattgtttctattttcctttcttatttcaatttcaaatcaaaccaagttttaatttctaaatttcaaatttatgcacaggaaaaactccacatgatgcacaatttatacatagtatttctttatttattttattattaggtaatgttttcaacatgaa

SEQ ID NO: 127926 - DNA, 127 bp, Zea Mays
gagttgtgttaatttggtgttacattgttaaggtacaggtacgtgaaactataaaaataattactattttatattgttaaattagtttaaaattaactagaaattgattattatatatatatattat

SEQ ID NO: 127927 - DNA, 1056 bp, Zea Mays
atggcagatctcgccggcacgactagcagcgtggtgcatgctcagggtttacaggatcttatgaccacattacgtgctttcgaggatgtcaaccactggctccagaccaagttctcccaggtagatatcgagctcaaacagtttatcaaaggctactcagatgccttacaacctgaattagggatgaaactgctaattgcacatggaagtcaccaagaacttggtaaaggtgattcaatgacaaatctaatgattaacatgtgcgatgtggttcacatgttaatgcatgcaactgaagtgcattaccaatgtcccaagagcgtaagggtacagtctgatgtatctgaaaggattgctaatggaactagtgttcatgtaaatattcctgttcaaaatttgaatctggatattgaagagcaatcacacaaacactcgatttcacacatccaggagccaaacactaataattcagaaggatccctggctggtgctgctgtctgggatgtattccgcaggcaggatcttccaaagcttaatgaatatctagctgttcatcgggaagaatgtgcagctagattcttaaataaattctcaaaggtgtttcatgttactatacttttgatgcaagttaaatatcctatttatgatcaaacagtgtaccttaacgattatcataagaagatgttgaaggatcaatatgagggactgaagacaatcgagcagattacaatggactcagcttcggtcgagaccaatatgttgaagctctgcaaggtgaggtctgttcagtttggccaaaaaggcatcccctacctgaacacctacgacggccgcaccatccgctaccccgacccgctcatcaaggccaacgacaccatcaagatcgatctggagactaacaagatcatggacttcatcaagtttgacgttggcaacgtggtcatggtgactggcgggaggaacaccgggcgtgtaggagtcatcaagaacagggagaagcacaagggcagctttgagaccatccacgtgctgcttggagctttttgctatgtctag

SEQ ID NO: 127928 - DNA, 174 bp, Zea Mays
gtggtcgcaaaagtgtggagactttaattcatataaagttaggcttaacattagtgcaaacaattgtattttagtttatatttagagtacacttatgtatgcgttgtttgacaatgcttatttatgatatattgaatggtacttatttatattatattaattataatgttgttc

SEQ ID NO: 127929 - DNA, 199 bp, Zea Mays
agggatccgggatcatgggccacaacacgccaccaccggtgataccagtaccaggaggagcttatgtaggggagagagctactacaggagataatccaaaccagttacacgacttcgtcaacgagttgttcgcttctggaggtagtggtcacaactccaacgacccccatatgtgatggtttgagtcttgtgccgaatt

SEQ ID NO: 127930 - DNA, 1562 bp, Zea Mays
gcggctctccgtccatctccacggcgagtcagcgacggaaccggtgttccggatctgctgctcactatcactggtgacatctccctgtccagcacagagatctgcttgctggtattcggatctactgttcactgatgaattgttgtttgttgggaacttgctatcttgaactgacttgatctgtcaagccgcgtttggcacagaggtaaccagatcctgatcttccttgttctgtagtttagggtttaatccaatgaaccgatgtttagggtttgggtttatcctatgaactgttgtttgtttagggtttgggtttatcctacgaattattgtttgtttagggttttggtttatcatatgaactgaataatgtgaactggtttgttggtattggttggtccaactccaacgagcactaatgatctgcttgttcctatgttctggtcttaatgttaatatgcactgatgatctacttgttcatatgcattgatgatctacttgttaatttgcactgatgatctgcttgttcatatgcactgatgatctgcttgttcatatgcactgatgatctacttgttgttctggtgaactgatgataatgttaaaatctcactatatgttcatatgtaccgatgaactaatgataatgttaatgatctgcttgttcctatgttctggtcttagacatgttgttgctcctatgaagtctaagttccttaagtactagagggacatacatatgctctatgcatttgcttttatattagatcctagagccaagctaaggggttttagcaatatcttaagaattttatctgggctatctggtactgactactcactttattttacttgtgtgaaaagtgaattgtctaccatgtttaataaatatgatgttaagtttggtgcagttttggcagcaagtgcctcctcctccatatgtcgcaggtaaaaggaaacaaaactgggattgatttatggatctgattctatttctgagtttccataccctggttctagtactcctaaccttgcaactggaaaatcagcatatgctttgcttcaacaagcacactctagtgctagccttagttcacttgacccagaactgtcctcctacctggacagtgactttgcagaagtttgatgaggacttcaatatcctaaactgatggcatgaacataagttgtcctatcatgttctctccatcttagctagagatgttatttctattcctgtctccacaatttcctcagaatctgcatttagcctttgtggcaggataattgaggaatgacaacgacacccagaaatggtagagatgttactttgcatgaaagattgagaactaagagaagctagagggcaacactctacacaggaccaagaccttgaagaagcatttgaatgactttatcttgatgacccttagggcctagggccctacactttgtaatcctcctactattcttccaattcctactctattctagtgatctggacatttggtgatgtaagttgtactctctttagacatgaacttattaaatcaaagttggg

SEQ ID NO: 127931 - DNA, 459 bp, Zea Mays
atgggtatggtacaggtagacagcctagcccccacgctattcggtggctcaccttacgatggaggtggcccatggaatgacgggcaactcctcagcggtgatggtcgccgccacctcgccctactccttttccatctccggctccacggtggagactatcgagaccgtgtccacccgccgaggacccgaggacccgttgcgcaggaaagacttagcaaagcggtagatctagtgagacattatgtggagacgtgcgctgactcaccatgccgcttcaaggacggagatgccgatggcagagaaggtgctggaggcggcggaaggggcacaagccatggagcgccgcgtcgccgtcaccatcccacgcgagcatcgtcaggaggtggttgcagtgtgcagggagggccgaggacggaggcgctgatggagacgatgatgccgatggcggagaaggtgtag

SEQ ID NO: 127932 - DNA, 175 bp, Zea Mays
agagagaaactggttctacaaccttaagggcatacccttgaggaagatcgcatcgtcgggttatacacaatctcaagggcatacccttgagagagatcacactgcacgggcatatacgccgttgtggctcttcggaaaggactactacaaggtaagaaaagctccatgtcgctag

SEQ ID NO: 127933 - DNA, 305 bp, Zea Mays
ttcccgtcaagcacctctctctaaggcataccttagagagaagctgactcaagaaacctcaagggcatacccttgaggaagatcgcgttgatcactcatacacgtcattgtagcctgctataaaggtctgctgcaagggctattaattaaataaaggaaaataaagaaaatgcatacatggctacatgtgtcttccatgaagtgtgcaaaatttggctacaaaataaacgattccccatacccataaaaaaacgtccatatctgatcaatcacaataaataaattctctacatgatagagtttgt

SEQ ID NO: 127934 - DNA, 241 bp, Zea Mays
gctaaatctcaagccatggctgccaacgctagtcgacctgctatgcgcgccatggttaaaataactaaatgtgttataaatattggaacaagcctagcaaataaaaaatgcacgcttggttcatcaattatcgttccgcccaattaataaaaacagcaactctattaagtatttaaattaaactaaataggttatatatgtaagccatggtcaaatactatatcatggccatatatctggc

SEQ ID NO: 127935 - DNA, 1344 bp, Zea Mays
atgcggaagatcacgccggtaactcccactgtggcatttaccatccgtgatggtcgtctgtttactctgcgtgagcgtgaactgcccgcttttcgtctgtatcgtatgcgtgcccgtagccagtcgatggtagacggtaacgcctacgagttgctgctggatctgttcgaaaccaaaatcgaacagttggcagatgaaattgaaaatatctatagcgaccttgattgcacaggatatgtcctctccaaggtgcagcctagttctggtacagcaaccaaaaaaagacaatcaaccttgcaatttaaggcaagtagtaaagcacagccaaagacagccaagtccgtagttgagatgttgcggaaaacaccagaggaggtggtggatgagagactttcaggctcttatcagcccacaatcttggctagttcaaaaagcaaggaggacaaacactatgtggacatgcagtgggctttgttcttctatgagtgtggtgtacctttcaatgccgcagcagctaggcagtttcagattgcaattgaggccacaccacagtttggttcagggcgtgtgacaactttcatataccgacatgggagaattcttgctgccatgagagagaaaactggtggggctgatcttgtgaggcctgctgccactcgttttgctacttcctttctcacattgaagagcttgtacaagcacaaggatgctttgaaggctttatttgcaagcacagcttggactgataacagattgtcaaagacaagtgctggattggatgtgtataacattgtcttctccacacagttttggaattcagtagaagattgccttagagcttcagggccactacttattgtacttagggtggtagatggagatgagaggccagctatgccagaggtccaagcattgatgaaatgtgcaaaggaaaagatcaatcaaagctttgttgtccaaagaaagaagactttactcaagaaaatcataactataattgaacggcgttgggagaaacaaatggatcacccattgtatggggctgcaatgtatttgaacccaggaaagctgcatcctctcataagaaatgatgatgatgctactgttggtcagctaagaggttgctttcttgatgtgcttgcaagaatggtagatgatgaggaaactagagacaagatcaattctcaagcaatggattacgagtttcttagaggagcagctttttcaaataagatggccaaagataacctacaaactatgaccccacctactaaggcgtcgcctaggcgcccgcctaagtcgcctaggcggtcaggcggtggctgggcgcctagttctgcctag

SEQ ID NO: 127936 - DNA, 1752 bp, Zea Mays
cgcacacggctcatataaaatgccggagccgtctgcgcattggactcaaagcgaacctcgccgccgcctcttccgtctctctcatctccgtcctcctgcaatctcacccctccctctaaacccgcaggccgcagtagcgccgctacggtttgctcaggattcgaaccccaccttctgattgctccgaatccgaggcggcggttgcgcagaagtttgcggcatggcggggtacccggaggacaaccagcacgcgttgaacgggtacgacgatgaggaggtcgacgaggaggggcaccccgggcggcggggaggtcgggatggggcgtctgggtacggcgatgctggcggagaggatgtgaggggggcgggcggcgactcatcggggaagatttttgtcggaggcgttgcttgggagacaactgaagaatcattctccaagcattttgagaagtatggggcaataactgattctgtaattatgaaggacaagcatactaagatgcctcgtggatttggattcgttacattttctgatccatctgttatagacaaggttttggaggatgaacacgttatagatggcagaacggtggaagtcaagaggacagttccgagggaagagatgaataccaaagatggccctaagacaagaaagatcttcatcggtgggctacctgcatctcttactgaagatgagttgaaggatcacttttcattgtatggtaaggtgcttgaacatcagataatgcttgatcatagcactgggcgttctagagggtttggttttgtcacttttgaaagtgaagattctgttgaaagagtcatatcagaggggagaatgcgtgatcttggtgggaagcaggttgaaataaagaaggctgaaccaaagaaacatggatctgataacatcggtaatgggagatcaagccaagggggtggaggttaccgcagtacttaccgtggtggtggtggagctggtagtggcagcagcggcagcggtgggggtggttatgggtttggtgatgcttatcgatctgctgcagcgagttatggatatgatggtggcgcaggagcaggatatggctatggtagagggtatggctatggaggcaatgctggctttgcgtctggttttggtggtgggtatggtggatccatgtatggaggcgcatatggtgcatatggggcatacggtggtggtgcttatggaggtggtgcctatggaggtggtgcatatggaggcagcgcctatggtggcgccccaggtggtggttatggcactggtggatacggcagttatggtggagcaggtggtactggtggtgggagtacaggtgctcggggttcaagtaggtaccatccatatggaaaataagctacaagttcaatcaagttttctcggtgtcgggagtttctctggtcctcctagttcagttttcatgccatgtccacctaaacaggggcattggagcatagttgggttgaacacgtcaccaccggaacaattgtgtaactgcagctgttgagcctgcccgcctgccttcgcttgctgtacaagctacacatgaaacctgtgttgtattctttagttcggtatgcagagtttagaaccctgagaaacaagcattttatggtagggacagtatttggtccggtagaactatattctgtgctgtaacttgctgttgcaagttttaactgctgtccttgtccgtccggttgcacagaaatcgaaagggattaaaggagatc

SEQ ID NO: 127937 - DNA, 1654 bp, Zea Mays
aaagcgaacctcgccgccgcctcttccgtctctctcatctccgtcctcctgcaatctcacccctccctctaaacccgcaggccgcagtagcgccgctacggtttgctcaggattcgaaccccaccttctgattgctccgaatccgaggcggcggttgcgcagaagtttgcggcatggcggggtacccggaggacaaccagcacgcgttgaacgggtacgacgatgaggaggtcgacgaggaggggcaccccgggcggcggggaggtcgggatggggcgtctgggtacggcgatgctggcggagaggatgtgaggggggcgggcggcgactcatcggggaagatttttgtcggaggcgttgcttgggagacaactgaagaatcattctccaagcattttgagaagtatggggcaataactgattctgtaattatgaaggacaagcatactaagatgcctcgtggatttggattcgttacattttctgatccatctgttatagacaaggttttggaggatgaacacgttatagatggcagaacggtagggcatctaatttagatcggccgtaagatgggacctttgtttgcagctctgcaaacctctgcaatttagttgacatttagcttctctcgacccctctcaacttcttgtttatgcaggtggaagtcaagaggacagttccgagggaagagatgaataccaaagatggccctaagacaagaaagatcttcatcggtgggctacctgcatctcttactgaaggttgaaataaagaaggctgaaccaaagaaacatggatctgataacatcggtaatgggagatcaagccaagggggtggaggttaccgcagtacttaccgtggtggtggtggagctggtagtggcagcagcggcagcggtgggggtggttatgggtttggtgatgcttatcgatctgctgcagcgagttatggatatgatggtggcgcaggagcaggatatggctatggtagagggtatggctatggaggcaatgctggctttgcgtctggttttggtggtgggtatggtggatccatgtatggaggcgcatatggtgcatatggggcatacggtggtggtgcttatggaggtggtgcctatggaggtggtgcatatggaggcagcgcctatggtggcgccccaggtggtggttatggcactggtggatacggcagttatggtggagcaggtggtactggtggtgggagtacaggtgctcggggttcaagtaggtaccatccatatggaaaataagctacaagttcaatcaagttttctcggtgtcgggagtttctctggtcctcctagttcagttttcatgccatgtccacctaaacaggggcattggagcatagttgggttgaacacgtcaccaccggaacaattgtgtaactgcagctgttgagcctgcccgcctgccttcgcttgctgtacaagctacacatgaaacctgtgttgtattctttagttcggtatgcagagtttagaaccctgagaaacaagcattttatggtagggacagtatttggtccggtagaactatattctgtgctgtaacttgctgttgcaagttttaactgctgtccttgtccgtccggttgcacagaaatcgaaagggattaaaggagatc

SEQ ID NO: 127938 - DNA, 1371 bp, Zea Mays
aaagcgaacctcgccgccgcctcttccgtctctctcatctccgtcctcctgcaatctcacccctccctctaaacccgcaggccgcagtagcgccgctacggtttgctcaggattcgaaccccaccttctgattgctccgaatccgaggcggcggttgcgcagaagtttgcggcatggcggggtacccggaggacaaccagcacgcgttgaacgggtacgacgatgaggaggtcgacgaggaggggcaccccgggcggcggggaggtcgggatggggcgtctgggtacggcgatgctggcggagaggatgtgaggggggcgggcggcgactcatcggggaagatttttgtcggaggcgttgcttgggagacaactgaaggtggaagtcaagaggacagttccgagggaagagatgaataccaaagatggccctaagacaagaaagatcttcatcggtgggctacctgcatctcttactgaaggttgaaataaagaaggctgaaccaaagaaacatggatctgataacatcggtaatgggagatcaagccaagggggtggaggttaccgcagtacttaccgtggtggtggtggagctggtagtggcagcagcggcagcggtgggggtggttatgggtttggtgatgcttatcgatctgctgcagcgagttatggatatgatggtggcgcaggagcaggatatggctatggtagagggtatggctatggaggcaatgctggctttgcgtctggttttggtggtgggtatggtggatccatgtatggaggcgcatatggtgcatatggggcatacggtggtggtgcttatggaggtggtgcctatggaggtggtgcatatggaggcagcgcctatggtggcgccccaggtggtggttatggcactggtggatacggcagttatggtggagcaggtggtactggtggtgggagtacaggtgctcggggttcaagtaggtaccatccatatggaaaataagctacaagttcaatcaagttttctcggtgtcgggagtttctctggtcctcctagttcagttttcatgccatgtccacctaaacaggggcattggagcatagttgggttgaacacgtcaccaccggaacaattgtgtaactgcagctgttgagcctgcccgcctgccttcgcttgctgtacaagctacacatgaaacctgtgttgtattctttagttcggtatgcagagtttagaaccctgagaaacaagcattttatggtagggacagtatttggtccggtagaactatattctgtgctgtaacttgctgttgcaagttttaactgctgtccttgtccgtccggttgcacagaaatcgaaagggattaaaggagatc

SEQ ID NO: 127939 - DNA, 1712 bp, Zea Mays
aaagcgaacctcgccgccgcctcttccgtctctctcatctccgtcctcctgcaatctcacccctccctctaaacccgcaggccgcagtagcgccgctacggtttgctcaggattcgaaccccaccttctgattgctccgaatccgagaagtttgcggcatggcggggtacccggaggacaaccagcacgcgttgaacgggtacgacgatgaggaggtcgacgaggaggggcaccccgggcggcggggaggtcgggatggggcgtctgggtacggcgatgctggcggagaggatgtgaggggggcgggcggcgactcatcggggaagatttttgtcggaggcgttgcttgggagacaactgaagaatcattctccaagcattttgagaagtatggggcaataactgattctgtaattatgaaggacaagcatactaagatgcctcgtggatttggattcgttacattttctgatccatctgttatagacaaggttttggaggatgaacacgttatagatggcagaacggtggaagtcaagaggacagttccgagggaagagatgaataccaaagatggccctaagacaagaaagatcttcatcggtgggctacctgcatctcttactgaagatgagttgaaggatcacttttcattgtatggtaaggtgcttgaacatcagataatgcttgatcatagcactgggcgttctagagggtttggttttgtcacttttgaaagtgaagattctgttgaaagagtcatatcagaggggagaatgcgtgatcttggtgggaagcaggttgaaataaagaaggctgaaccaaagaaacatggatctgataacatcggtaatgggagatcaagccaagggggtggaggttaccgcagtacttaccgtggtggtggtggagctggtagtggcagcagcggcagcggtgggggtggttatgggtttggtgatgcttatcgatctgctgcagcgagttatggatatgatggtggcgcaggagcaggatatggctatggtagagggtatggctatggaggcaatgctggctttgcgtctggttttggtggtgggtatggtggatccatgtatggaggcgcatatggtgcatatggggcatacggtggtggtgcttatggaggtggtgcctatggaggtggtgcatatggaggcagcgcctatggtggcgccccaggtggtggttatggcactggtggatacggcagttatggtggagcaggtggtactggtggtgggagtacaggtgctcggggttcaagtaggtaccatccatatggaaaataagctacaagttcaatcaagttttctcggtgtcgggagtttctctggtcctcctagttcagttttcatgccatgtccacctaaacaggggcattggagcatagttgggttgaacacgtcaccaccggaacaattgtgtaactgcagctgttgagcctgcccgcctgccttcgcttgctgtacaagctacacatgaaacctgtgttgtattctttagttcggtatgcagagtttagaaccctgagaaacaagcattttatggtagggacagtatttggtccggtagaactatattctgtgctgtaacttgctgttgcaagttttaactgctgtccttgtccgtccggttgcacagaaatcgaaagggattaaaggagatcaaatccctttctatttaatttt

SEQ ID NO: 127940 - DNA, 1275 bp, Zea Mays
atgacggtggcggctctgcaggcgatggacgcgctgtcgcggtcggggaccatgctgcgggactctgcggatggacgtgatgccgccggtcgccgatgtaagctcccacgccccctccctgcgcagacgatgtctacatcgttgtcccgccgcatctttttctttgatttttttccggtcgccgggtggtgctctggggcacgtttcccgcgcgatcggccgaccattcgtgggaaacatcgatccgatgaggtgcgcgtgccccgatgcatccgccgtttgcgggctgggttcgtcaaggatcggtcgcggggggcgcgcaggcggtggatttggattgaaaggagctcagaaggctgggacgctgacctgctttacgacaaggagcgtgggatggttcaaggtggccctgttcgcatacctgctttacgacgaggatgcgtggacgaactggtgcctagcgtaggacgccacgtccgcgttatggtcgtcatcctcgacgccgagaacctagtctgcaggcttgatagaaatgcttctactagcacacatgttgcatttaagatatggtcacttttatgttcttttttattgcaagtcgctatcacatatgacccaagcaacatgtatcagctctcaaaactgagatatggacatgtggaagcacaacttggagctgctgaagaagatcgtcttgctcgatggctccattctttgtgtgcgtttgccaggctagccgaccaaagactgcatgtttaccgaccaggcacgcggcggcatcaggaagagcgcaatctcaattgcaactgttgtgcagtggcttgctccaccgataaacacagcaacaaggccatggtgcatgtcagcttctaccgcaacaaaatatcaagtgatggtggaactcaatcttcatgggccatggatgatgacctccatgaaatgagtatagctgaggatactgatgattcaagcatcgatcttggagctgagttgtgccagcaaataactgtttcacaacttgtagccgctgctatttcccaggattttgctcgtgctgaagttgaattagagatggaacccgtgattgccgcaaagaacttcgagattgcaaggctgtcggatagggtccagtactatgaagctgcaaatagggaaatgtcccaaagaaaccaagaagctatcgaaatatctcggctggccaggagagtactatggtcactcatcgccattactcggctgacctgcctgctacaagaagtaaaaggtatgatttga

SEQ ID NO: 127941 - DNA, 113 bp, Zea Mays
gttattcaatatgaatgactaaccttacgcaaagtgtgacacatttagccacaaaccaaacaggcccaattattcgtaaccaaattctcagaaaagattatcagaaattaaag

SEQ ID NO: 127942 - DNA, 108 bp, Zea Mays
atttctatttacactttacacaaacaatttattgattttatgcattatctcatttacttaatccagtgtgtattgggttcctaccatttatgccatatgtataagata

SEQ ID NO: 127943 - DNA, 111 bp, Zea Mays
ctaaatttattatttgtagttgatggcttttatggtgttacagtcgtagagtccttcgtgcagcgccgagggctacctctctagggtgtttgacttaattgcatattctaa

SEQ ID NO: 127944 - DNA, 1194 bp, Zea Mays
agctctctctctctctctctctctctctctctctctctctctctctagctctcttctctctcgtagtacatgtctaccgtcttcatgacccaactgccgcgtactctccgtctaatggagggagagcaggatcagggactctttccggcgtcgaccttccatgtcgcaaaggaccctccaatcttgttcccgttcatgatcaccagccccgtccatgtagatcagctccaagggcaaagcagctatggtgatcagcacttggggcagcatgtcttgtctgaatctactcaacagttcaccgatcggacgatgataagtgggtcagaagtcttccctaggcggccatcgccgttcgggcagactatccaaagcatcgatggtgatatgatccagccatctgcgtatgatccatatgatatagtggagaaccagcgcacggaaggattgagcggcggcggctggacagtgtcgtcgtcctcgtcgtcaccgccggcgaagatgaagatcatgcgcaaggcgacgagcgagtatcccgagggtggagctgcaagaaagccaaggagaagagcccaagcgcaccaagacgagagccagctactgacgatgcagcagcaggctatgggcgtcgtcgttagagtgtgctccgactgcaacaccacaaagacccccttgtggaggagtggtcctcgtggccccaagtctctctgcaacgcatgtggcataaggcaaaggaaggcgaggcgggcgatggtggccgcggccgcggcagctgctgccagcaacggaggcgcgcctccacaagcggtgagcggcgttgccacccagcagcagccgaagccgaagccggccaggaaggagaagaggtcggacgccgccgaccggtcgctgccgttcaagaagcggtgcaagatggtggttgtcgatcacgctgccggtgcagcggcagccacggcgacgccagaggccgcagctgctcggagtaccaaggatcaagcggatcacgtctccggcgacaagcaggttgttgcccctgccgccgcgatgaggagtctggatcagagcgagatcgccactcctcctccctcggcggtgtcgtcgtttcatgctgctttcccggccgacgagatcaccgacgccgccatgctgctcatgaccctgtcctgtggtctcgtccgcagctagctatatatggct

SEQ ID NO: 127945 - DNA, 603 bp, Zea Mays
cggcccggcccgggcacggccagcacggcacgcgcacacgctgagtccaggatcatggcggcgggcctcaaggtccccgagatggcgctcaggctctgcgtcgtcccgctctccttggcctccctgtgggagatggccaccaacgcgcaggcagacgacacctacggggaggtcaagttctccgatctctccggattcagctatttggttggcgtcaacgccgtcacagccgcctacgctgtagcctccgtcttggcgtcgtccttcaagcggcccctcgccgcgcgctacgactgggtggttctcgtcatggatcaggcgtcggcatacctgctggtgacgtcggcctcggcggcggcggagctgctgcagctggcgcggcacggcgaccggggcgtgtcgtggggcgaggcgtgctcctacttcggccggttctgcgggaaggccacggtgtcgctggcgctgcacgccgccgcgctggcctgcttcgccgcgctctcactcgtctccgccttcagggtgttcagcagcaggtgccacccgccgcctgacgctgacggccagccgcccaagcacgcacgggacgaggagcaacgggtgtag

SEQ ID NO: 127946 - DNA, 321 bp, Zea Mays
gttatattttagatcttttgtttagcattttttaatccacatgtatttctctatcatataaaactctatattgattctttaaaataatttatatgaatttgataatgtttgtcacaactcacacgaattctgtataccataatgaattgatggttgagagactatgcacgaggcatgcaaattaacaagactcgtacaagcgttgaacagtgtgctgatgatgatcagagacacaagggcagcacatgatcaggtcttaacatgtttggcttccgtacatgcttttctctagatccccaaggaagaagaagatccggtcag

SEQ ID NO: 127947 - DNA, 331 bp, Zea Mays
cacaacaatttatccatggatcataagcaactacactaatcaaactgagaccaagtcaccaagaatgatattgtctggtaactattgagactaaggatgatattaattggtagctgatgaagatataccataaacctatgggttcaatgaacataaattttagtgaggtgggcaagggctacaaggagccattttatacaacagttcatgtttccatttcaattaatcttaagtttgataacagtttggaacagtaccatttaatctaaccaaagtaacagtgacttcatgcggcgttttgggagatacaaggttcaaaatagtcattgac

SEQ ID NO: 127948 - DNA, 1197 bp, Zea Mays
aaaacaataatttgtaaacatgacccttacactagatcttagaaactctctctctaaacaaaaggcaccctgtttcccgttcgtgagaaattcctcgcagacacgggcgcgcctactcaaccgaggccaacaagtcaaggcgagtgcggagtagaggcacaaggtcggatgcctagagagatttcccggtcgcctccgccattccgccggcgaggctcccctcctttgcggtacgctagccggagaaacagacgagatcggagccgctccccttacgcctctcggcgaaaaactcgttctccttctccactatgggataggagcaactcaccaagtccaagaaggcatagaagcccactatctccaaggagacacagaagacagagaagtcggagcactacaagttcattagagaataacccatccagtccaagtcacgcatcagagaaaataaattcctctgtaaaacaaaggctggaagaagaaaagaaaaggcgtcaaaaggaagctgaatttaagttactggaagaggagcttgctagaagggtcgaagaagctataagaaaaaatgtcgaggaacgtctgaaatctgaagaggtgaaacgtgacatagaacaccgaattgaggagggtattagaaagttatttgatgaggttgacgctcagctacaaaaagagaaagcagtggccctttatgaggccaggcagaaagcagagcaagaaagaagagagagggaggagttggatagaatgctcgaagagaacaggcgtaaagtggaggaagcacaaagaaaggaagctcttgagcagcagcagaaagagttggaacgatatttggagctggaaaggatacaaaggcaaagagaggaagcgttgcgcagaaagaaaatggaggaggaagaagagagagccaacaagctgagattgctggggaaaaaccggggttgagaactgtcatctttatatacacagcggtctatgtgccgtggttgcccccatttgacttgttagttgttgccttaccagtgcgagaacttttgtttgatgtacgaacatgaaaatggtcatgtatgacatctatgaatggaacctgtagcttattctttgagtacgttttaagacaggttatttggattcctcaatgttttgctctgccatgcttaagaattttttaaatgcctagtctggtgcacaagg

SEQ ID NO: 127949 - DNA, 3090 bp, Zea Mays
atgtttggctcgcccttccccgtgacctcttcccacagcagcgagcaggatccagacttccagtcgcgagggacagctagctccatcgtcgtcgccgtcgaccgggacaagaacagccctggggcggtggatcggctcctgaccaggggcggcatgcttccagctcgtccatgtcagggtttccataaccgcaaaaccccaaccccggcacgactccaggaatctccgccgattcttccatcccggcgactccgctcccctttccgacgactcttccaacccctcgccgctcgctgtcgatccagtcgcaagcggcatttgagcggcgcgccctcggtgtccccaatcctcgctccaacattcgcgccgctgcgtccggcgaccggcgaaaaccctaccttctccggcgacgcttctgctccttcgctctccgccgacccgactgcttccacggtctccgccatcctcaacattcgccgccgtcaacggatgattacagctaatacattatttggttacagcaagcaagtcgaccgtcctccaaataaccccaagcgtataacaatccagtcaagccaggagtgcttcagtgttgacattccctctgcagaacagcctagtccatgtccagaagttgaaaatcctccaaatgctgacagtcaaaatgtgaccaatgaaacagttcagattgattctgatgaagatgacttcatgccagctctgaagaagcgtaatgtttctgaaagccacacaagagtgttaagaaaagtcgtgacaaagaggattaaacatgaggagctaccccgacagaggcttaatgtgaggtgcaaccctcaagatgtcattgcaagcattaacattttgaatgaaagacaacgtgaggctataagacgtaaaggtttctcttccattcttgatatgacagtagatgcgctgtgcagtagatcacacctccaatggttgatggacaagctagaccccaaggatatgacaatacgtcctggtccaggaaaggaactcaagatcacaaaggacattgttcatcttattcttggcgtgccaaatcatggaggtggcaaacctttgggtattgatgaagcagttgcagcaagcaacttgagggcagagcttggtgtggccaaagatgagttcaatgtggcatttctacaagatcgtttaaggaaaggcgaggatgatgacctttcaatcagatgtttcttcctcattctattcaaccatttgctgtttccaactgctagctggggcatcacatatcatgaggtgcttctcacagaagaaatgcaccgtttccatgagatcgactggtgccagttgatttttaatgatctatgtgaagctgccaagaagtggcacaaccggatcaccacaaatgtctccacgactatatatggatgctccattgttgtccttttgtattacttggatcacctgcatacagccgctgccccccataataagagtggcacacctcgcattaatttttttgataagaatagcataaaagctttgaccaaagctgacaagaggaaggttcgccatggcgctgaatctttcagacactgtgaaccggagtgcaggaccaatatttttgatgcaccgcgccctggccccatgcctcggccaacttttaacatcaaacttccatctatcaaagagatgatgtcaagtaagatcaacgatctcccacatcgtcatcgatctaaattcacagatattcttgctgcatatgacttggaggttgacaagtcatgcgtagccataaaagacagcattgacaaaattattgagaagcaatacgacatagcagacaagtttatagaattgatagacgaggtactacgtgccgagtctgaaaatttggaaaacgagactgatgagccacagcaaccggggaattcggctgattcagcaggacacactgttgatgccacccagcccacacccgatatgccatcccaagcttcgcagcttgagacccaactgggtggtactcagtttgaagaaattcatgaaagacaacagcatatccgtagagtccttgagacctttcccgatgaatcagatgtggtttcagatcaacagagaggtgcaatggcaacagaggaaatggaacacaatgacagtgggccagtttttgaccagaccccaactcctcatgatgatacactcaaaggtactacaaactctggatctgatccaccccttacagagcaagagtgtattcgttctctgtgggatttaatttgttccaaggacattgaccaaagcagggttgttattgattacggtgaatacagtgcaaactgtatggatatttatgaatctttcgctgagggcaaatgtcttgagaatgtcttcatgcagtgtttcattgagtgtgttcgtgatgattctaaaaatcatcgtcgaactctgacatctaacagattaatacttgatgtcaacgttggggctctgttaaattttgaagaacaggaacgtcacagcaagaatcctcagccgtttgatcaaaatgtcctacataattgcttgcacaacacattgcctgctttggtgaatctggataaatgcaagtcgataatggtacctatgcttagcagaggtcattggacactgtatgtgatcaatcttcaccaccgggttatacacattttagattcgaatccctatggtatacaacttggtggcactgaatggaaggactatcattatgatcccatttatttaggtggcaggaaattcccatgggctagggtgataatgagtaggctgagcaaagcgttacaacacgtttgccccaacgcagaatttcctaagtttggtaattttccattggatatgccatctaactgcccaacaatgaggacatggtcaaatgactgtggattttttgtgatgagttacatgaagtcttatgatcacaatgcaggtgtcatatcttctttcaatcaaccagacaattcccgagacctacgtgctcatgcccttcatcaactcacattccatcgcatcaacaaggcgttgccacttccattagatatccagagatttatgtttgcgcgcaattag

SEQ ID NO: 127950 - DNA, 111 bp, Zea Mays
ctcaaccatacccatgcctctctcctttcctcattcatgccctcccacgccgtttccgtcacttaccgtcgactgacgtgtggacccaaatttatctcggtcgtcttcctc

SEQ ID NO: 127951 - DNA, 2942 bp, Zea Mays
acccccgtcctcagtcacgccgcacctaacccttcgtcagtttcagtttggcacctccgaagcttccgtccgaatctctgctgcctccttcctcggccaggcttgcgggcgatggcggcggagcagaccgccgagcagttccggggccaggcgcggctgccccacttcgcgtccccgcggcgctacgacctgcgcctcacgcccgacctccccgcctgcgtcttcactggctcggtggcggtttccatcggcgtggccgcgcccacccgcttcctcgtactcaacgcagccgagctcgacgtcgcgaccgggggcgtcagcttcgcgcctcagggctccgaccaggtgcttgcccttgcctcgcttccgcccgtcggtgtgcgcgggtgtcggggtgtgtttgatctgatcgtatgcacacggtttgatacttacagatgcatatggtacttacaggtgctacaacctttggaggttaccaacgtgccagaagatgagatcctgattattcgcttcaatgaggtgctttctatcggggagggaactttgacgattgcattcaaggggactttgaatgataagatgcatggattctacagaagtgtgtatgagcttaatggagagaagaaaaacatggctgtaacacagtttgaaccagctgatgcaaggcgctgcttcccttgttgggatgagcctgctttcaaggctgttttcaaaattactctagaagttccttctgagacgattgctctgtcaaatatgccagtaattgaagagaaggtactagggtattttgctgtgccataccccctccccaaaatggacatggttgctattccagattttgcagctggagccatggagaactatggcttggttacataccgtgaaacagcattgctatttgatgagatgcactctgcagctgccaataagcaacgggttgcagttgttgtagctcatgaattagctcatcaatggtttggaaatcttgtcacaatggaatggtggacacatctgtggcttaatgagggctttgcgacttgggtgtcttacttagctgcagatcagttctttcctgaatggaatgtttggactcagtttctagaggaatctacagtaggtttcaagttggatgctcttgcaggttcacatccaattgaggtggacataaatcatgttgatgaaatagatgagatatttgatgctataagctataggaaaggagcttctgtcattcgtatgctgcaaaactatcttggggctgaggtctttcagaattctttggctgcatacatcaaaagatttgcgtattcaaatgcaaagactgaggacttatgggctgcccttgaagaggggtctggtgaaccagttagaacattaatgcattcatggaccaaacagcaaggttatcctgtcattaatgtgaaactcaaggatggaaagttccaactggagcagacacaatttctttcaagtggatctacaggagttgggcaatgggttgttcccatcacactatgttgttgttcctactcgcgccaagcgaagttcctttttcatgggaaacaagaagattttgatttgtcagcgtccgggtttacggactgccaaaagaaagatggcttctggattaaacttaatgtcaaccagactagcttctatagggtgagctatgatgaggaacttgcagcccgacttcgatatgcaattgaaaccaacaaactgggtgcagcagacagatatggcgtacttgatgatgcctatgccctctgtatggctggcaaacaaaagctagtctccttgctgcatttgatttctgtgtacaaggatgagactgagtatactgtgcttgcacacataatcacgacaagtctgcacattgccgagatgatggttattgctgctccagaggagttggttcatctgaagaagttcctaattgatttcctggagccatttgcgctgaaacttggctgggatgctaagagtgacgagggccatctgaacgctttgttaagaggtacactcttaaccgctcttgcagaacttggccatgaggctaccataaatgaagctgttcgtcgatttaatgtctttctggaagacagagagacaccactcctccctcccgatgttcgaaaggcagcatatgttgctttgatgcagacagtgagcaaatcaaacaaaactggctatgaatcactactgaggatatatagggaaaccgatctaagccaggagaaagttcgttctttggcatcatcccctgaccatgatgttgtccgtgaagtattgaatttcatattgtcacctgaggtgaggaatcaggacgcaatatttttgctaagaggggtgagttcaggggcacacgaggtagcatggcaatggctgaagtttcaggaaaactgggattacatattgggagcctactctggaactctgctcacctatttcgtcaacataactgtctcgccactggccaccgatgaacatggtgatgaggcggaggagtttttcaagagcagaaccaaggcgaacatcgcgaggactgtgaggcagagcatcgagagggtgaggatcaatgcccaatgggtcaagaacatcaaggccgaggctgacctcggcaatgttctcaagaagctggcttacaagcactgatcagagacggtccactttcatttctgtgttaatcctagtaccgagatgtaactttgttctctggaataagtggattaataaagggcactttcgtttgtgtgtcgtcctgagctgccttgtccgtagattcttacaaactgttctgtgcgaaagctaccatgatagatatgcgtcgaattgattgattctatatcctgataattgattgtgtatcgcccatgtcgcacaggagaacggtaaatttgttccaatgattgtctgactgcgagttggcttccaaa

SEQ ID NO: 127952 - DNA, 1394 bp, Zea Mays
ccccttaggccttggagatcttgaatttggcctcaacttcatccttgacgttgccagggttcttgttgggtgccacttcatgtccagccggtgttacgacttcttgaggtcctcctccatcgcgccgtggcgtttcggctcaccttgagcgcattgtagtagtctgtccccatctccaacgctcatgccaagaacagtaggagcagcaacaccaccttccaaaccccaacacaaaaatcccttcctcgatccacacgaattccccaagaactacgctagaggaacaatgcatttgggacaggaggataaaccatttcttttgaccctgcgtgtcgaccactccacacaaggaagagccttcggcgcactctcaaacatgtccaacgatcagactgagtggagcacccttctcgcccgtgccagactgctaggcgtcgacgacctgcttcacggtgagtggcatggtgccggacgcgccgcgcatcttggaagggtgtggtggagtcggcgacgacattctaggaggaggtgaactgcgacggcgagaagtcaagtgtcgtcgtcctccggcacgcgcaacacgtggagccaacacaccacctcatgccgcgggaggtcaaacatggaaagggaggtgtgtgcgcgcggtggtggcatgactggacatcgcggggacaggcgcaggggttggccgacgtcgaagcggccctggtctgcggcttaggggatgatgaagtcgctagccttggacatcctcactctctccggcctctgcagcggcgaggaggaggcctccctgtccgggcccaggctcgggccgctgctcccctcgtcctccatcgcgcgccacttgaacgattccgtgcggcgatgcttccttatccacgctcggagagggggtgggggcggctatcttgtgggtcgagaggcaggcgaggggcatgacgtcagacgcttggggcggcggctatctcagggttcgggcacgatgggagcgccggagcggggtggggctcacggaggcgagggcgtgcgagcgaggatggcgttgccagatggagccgaaggggcaggggcacacaggagacgtgggagagggcgagaggcgggggcgtggaggtgtcggcgaggagctcagcaacctcggcctcgtcggcggaggaaggcacgcgcttggacctgcgcgagggggagcacggacgcggggcgtggatcctgtgattgcgtctatggaaggttgccgaaggaaggtgtgctaggggcgatgatggcggtgcggcttgagcacgacgttcctgagattgcgcgagggggaggacgggcagaaccacaatgcacttgtggacgcctacaatagagtcttatagagtagtaatagatttgcaaaaagactt

SEQ ID NO: 127953 - DNA, 348 bp, Zea Mays
atgccaagaacagtaggagcagcaacaccaccttccaaaccccaacacaaaaatcccttcctcgatccacacgaattccccaagaactacgctagaggaacaatgcatttgggacaggaggataaaccatttcttttgaccctgcgtgtcgaccactccacacaaggaagagccttcggcgcactctcaaacatgtccaacgatcagactgagtggagcacccttctcgcccgtgccagactgctaggcgtcgacgacctgcttcacggtgagtggcatggtgccggacgcgccgcgcatcttggaagggtgtggtggagtcggcgacgacattctaggaggaggtga

SEQ ID NO: 127954 - DNA, 1545 bp, Zea Mays
acacctggaaagtggtgttccctcgtctgaagccgaggaaaaaatctcgcattcgcaaagcagacaaaacagcgtccccctccctctactaaaaaaaaaatggaggcatgagctccgcctcctcctcgtctctcgccgatctccccaaaccctagccccgacctgaccgccggcgggcccgccggccggagaaggagtcgctcccacccacccaacttctgcggcggaaggggagcgggcggcggacgagatgccgtcgcacggggatctggaccggcagatcgcgcagctgcgcgactgcaagtacctgcccgaggcggaggtcaaggcgctctgcgagcaggccaaggccatccttatggaggagtggaacgtgcagcccgtgcgctgtcctgtcaccgtctgtggcgacatccacggccagttctatgacctcatcgagctcttccgcatcggcggcgacgctcccgacaccaactacctcttcatgggcgactacgtcgatcgtggctactattcagtcgaaacagtttctctgttagtggctttgaaagtccgttacagagatagaattacaatacttagaggaaatcatgagagcagacaaatcactcaagtatatggcttctatgatgaatgcttaagaaaatatggaaatgcaaatgtctggaagtattttacagacttgtttgattttttgcctctcacagctcttatagaaaatcaggtcttctgtcttcatggtggcctctctccgtcattggacacgttggataatattcgttctcttgatcgcgtacaggaggttcctcatgaaggacccatgtgtgatcttttgtggtctgacccagatgaccgatgtggatggggaatttcaccaagaggagcaggttacacatttgggcaagacattgcgcagcagttcaaccatacaaatggtctttctctcatttcaagggcccatcaacttgtaatggaaggatttaattggtgccaggataagaatgtagtcacagtcttcagtgcgcctaactattgttaccgctgtggtaacatggctgctattcttgaaatcggggaaaacatggaccagaacttccttcaattcgacccggcacctcggcaaattgagccagacacaactcggaaaaccccagactactttttgtaattgtggtggtgacattaacttactggtgttgatgctcctcttttccgcagcatcagggtctgtagatcatctgtccttagatatgggttccatgagcccgacctgtacgtctcccaattcttttgtttggagattttgttgccgcttaacgatctttatacaatatgttaaaaagttaaatgccattggatttttcttctttctgttgtacgtcgactttgtattatttgtagacggtgaatggaagtcgcagcaggaaagccagcccctgctatggttttgttttgatgtgcatcatatcatccgcgtggctgagtaaattatgtccagacgggtaggttttggtttgggtttgcagcatcccgatctgatgt

SEQ ID NO: 127955 - DNA, 957 bp, Zea Mays
gatccaagacatgttcaatcctattcagaagcttgataacattgagataattgcaagacagccatacaaaaatgacagcgttgtcagcgtagaaagatacccagtgcttctagtgtttttctctcattcctcttttcttttggggtgggggatggggagcttgaggctgacatttcaccattagtgaagtgaccaaccagtagtcatttgcaatgaggttcctcatgaaggacccatgtgtgatcttttgtggtctgacccagatgaccgatgtggatggggaatttcaccaagaggagcaggttacacatttgggcaagacattgcgcagcagttcaaccatacaaatggtctttctctcatttcaagggcccatcaacttgtaatggaaggatttaattggtgccaggataagaatgtagtcacagtcttcagtgcgcctaactattgttaccgctgtggtaacatggctgctattcttgaaatcggggaaaacatggaccagaacttccttcaattcgacccggcacctcggcaaattgagccagacacaactcggaaaaccccagactactttttgtaattgtggtggtgacattaacttactggtgttgatgctcctcttttccgcagcatcagggtctgtagatcatctgtccttagatatgggttccatgagcccgacctgtacgtctcccaattcttttgtttggagattttgttgccgcttaacgatctttatacaatatgttaaaaagttaaatgccattggatttttcttctttctgttgtacgtcgactttgtattatttgtagacggtgaatggaagtcgcagcaggaaagccagcccctgctatggttttgttttgatgtgcatcatatcatccgcgtggctgagtaaattatgtccagacgggtaggttttggtttgggtttgcagcatcccgatctgatgt

SEQ ID NO: 127956 - DNA, 950 bp, Zea Mays
gtggattgttatgcatgtaactgtaaatacttgggctgatagtgctccttgccttgaattttgaggtgatgcttatgaacgctaggaaatggtgcccaatgtgctgggtcttgaattgatagcttgctaattcttgtgctgtattaattgaatgcattatacttctaatctttttaatcctcaactcgtatgcctaaaaaatgtgtgcaggttcctcatgaaggacccatgtgtgatcttttgtggtctgacccagatgaccgatgtggatggggaatttcaccaagaggagcaggttacacatttgggcaagacattgcgcagcagttcaaccatacaaatggtctttctctcatttcaagggcccatcaacttgtaatggaaggatttaattggtgccaggataagaatgtagtcacagtcttcagtgcgcctaactattgttaccgctgtggtaacatggctgctattcttgaaatcggggaaaacatggaccagaacttccttcaattcgacccggcacctcggcaaattgagccagacacaactcggaaaaccccagactactttttgtaattgtggtggtgacattaacttactggtgttgatgctcctcttttccgcagcatcagggtctgtagatcatctgtccttagatatgggttccatgagcccgacctgtacgtctcccaattcttttgtttggagattttgttgccgcttaacgatctttatacaatatgttaaaaagttaaatgccattggatttttcttctttctgttgtacgtcgactttgtattatttgtagacggtgaatggaagtcgcagcaggaaagccagcccctgctatggttttgttttgatgtgcatcatatcatccgcgtggctgagtaaattatgtccagacgggtaggttttggtttgggtttgcagcatcccgatctgatgt

SEQ ID NO: 127957 - DNA, 952 bp, Zea Mays
gacacgatttctctgcttccgcgtaactcaccgacggtggtgtccatataaactgcacacacgaaccaggctcccagcgcaacgtcatccaaggtcacactagcaataatgcctaataacggcgtccgcgccgtggcgacgcccgtcgcgcgagaagagccgctcctacggcgggaagacgacgcagcaccgccgaaggccgccggtggcgatgggcagccgctcgacgcgggcgcccgtgacgccggcagcttcccgtggctgccagccgcgggcgtcgtgtacctcacgctcagctccgcgatggccctgcaccgctgctggcccgaccccggcgacgtcgcgttcgtcgtgtcggcgtacgtcgacctcgtcctgctcttctgctgcctccggaggtacgagcgcgcggagcctgggtcgccgctcagggagcggctcaagctggcggtgtggctgctcacgtccgcgctgacgctcctcttctcctataaggtcgccgccgtcatgccggccgccgttgctgccatcgtctggctcatgggtctcaccaccatctgcggtggcttcctcgctttcttctgcttccagaagaaggcgtgactttcgctctatggacagagagagaaaaatgtcggaggttgacgatggacaagattaccgggttatcaaaattttattggtgataagcaaaattttttgcacgaatttatagaaatgactcagtttgtctataatatcttgtagctattatctagacatttaagaaatgaaaacaacacatgagtcagccaatcgaggaatggagggaaaaaaaattagtgcagagagcaactccaataattcttaaacaagaacttgctaaaatcatatttaacgagttgctaaatagctaccgggacttcgggagtaaaaaaaatcttagtcttcaatagttacttatatttaagaa

SEQ ID NO: 127958 - DNA, 1725 bp, Zea Mays
atgaaaaaactaccctcccaaggctggcggctggcctgccctgccgaagcgcgccgtgccgtgtctccgtgtgccccttcctcccagaaccagaagaagttctcgaagcttctcgaaacatcgctccgtctcctccttcagccaaaacccagatcccgaaaccccagacgagcactgctccgcatggaccatcattggcgcttccctgcggtcgccggcgccgatttctgcccggtctgttccgtgcgtcacttccccttctgcccaccgccgcctctcccgccgcatcccttcccctacgacctccagccgccgccaccccctcccccgccgaaccccttcccatacgacttccacccgccgcccccaccgccgctgatgtgggcccctccacctcctgggccgcacgacccgcgttcctacgatctccccggctgggaggggcctcacaagcggatgcgcctgggcgaggcgccaccgttcgatccgtacgactttgtgcctccaccgccgccaggaagggcttctgtggagggcgatcggctgctcggcctgatccgggaccatggccgcaatccacttcccggttgtctacctgacggcggctttggttacggaggaggtagattatatccccggcaaggatgtgattttgcggatttcgaccaaaagttgccacctcccatgctgaatgataatggcttcggacaaggttttgtgccagacgaaggccctcaccgaaagtattttgacggtgccaatcaccatttccatcagttccacccagagccattgcctggtgcgccgctgcaccctccactgcctcgctaccctgatccccatggttcacatgcttggcatgttgaggcaggtgctgtgccacggccagcagagcctccattcccctctaaccatgattaccgtgctgcaccgccacggttgactgcaaattcatcattgtttcctgtcctttctggttcgccaacaacggaaaattttccatcaaccgctggtaccttgcctccagcccatcccatgccaaacaaaaaccgtcatgacggacacatcaacgatgaggggccaggtttcatttatcgaccacaatcagagcagaacttgatagatggaaggatgaccagtgcacattattctctggaaaattccaatgtcacggtcatcaatgcttgtgatttgttcaagcagccgcttcgtggttcacgccctgaccatattgttgtcatcctcagagggcttccaggtagtggaaagagttatctggcaaaggcattgcgcgatcttgaagttgataatggtgcaaatgcgcctaggatacactccatggatgattatttcatgattgaagttgagaagaaagtggaagacactgaaggccctaaatcttctagtgcatcaaaagggaggaggcagttgactaagaaagtaattgagtattgttatgagccagaaatggaggagacttacaggtcaagcatgttgaaggcattttcaaagacccttgatgaaggaaattttacatttgtgattggtatggagttatttagagcagcttatatcaatcattactgtccaattcccatatgtaatattttcttctcatggttgtttcttcaatattgtggaggtgccttcaaaatttatgggttaacgaaacactttaccatgctttattttttctttctttcacatcatcagtgctacatatga

SEQ ID NO: 127959 - DNA, 2785 bp, Zea Mays
atgaaaaaactaccctcccaaggctggcggctggcctgccctgccgaagcgcgccgtgccgtgtctccgtgtgccccttcctcccagaaccagaagaagttctcgaagcttctcgaaacatcgctccgtctcctccttcagccaaaacccagatcccgaaaccccagacgagcactgctccgcatggaccatcattggcgcttccctgcggtcgccggcgccgatttctgcccggtctgttccgtgcgtcacttccccttctgcccaccgccgcctctcccgccgcatcccttcccctacgacctccagccgccgccaccccctcccccgccgaaccccttcccatacgacttccacccgccgcccccaccgccgctgatgtgggcccctccacctcctgggccgcacgacccgcgttcctacgatctccccggctgggaggggcctcacaagcggatgcgcctgggcgaggcgccaccgttcgatccgtacgactttgtgcctccaccgccgccaggaagggcttctgtggagggcgatcggctgctcggcctgatccgggaccatggccgcaatccacttcccggttgtctacctgacggcggctttggttacggaggaggtagattatatccccggcaaggatgtgattttgcggatttcgaccaaaagttgccacctcccatgctgaatgataatggcttcggacaaggttttgtgccagacgaaggccctcaccgaaagtattttgacggtgccaatcaccatttccatcagttccacccagagccattgcctggtgcgccgctgcaccctccactgcctcgctaccctgatccccatggttcacatgcttggcatgttgaggcaggtgctgtgccacggccagcagagcctccattcccctctaaccatgattaccgtgctgcaccgccacggttgactgcaaattcatcattgtttcctgtcctttctggttcgccaacaacggaaaattttccatcaaccgctggtaccttgcctccagcccatcccatgccaaacaaaaaccgtcatgacggacacatcaacgatgaggggccaggtttcatttatcgaccacaatcagagcagaacttgatagatggaaggatgaccagtgcacattattctctggaaaattccaatgtcacggtcatcaatgcttgtgatttgttcaagcagccgcttcgtggttcacgccctgaccatattgttgtcatcctcagagggcttccaggtagtggaaagagttatctggcaaaggcattgcgcgatcttgaagttgataatggtgcaaatgcgcctaggatacactccatggatgattatttcatgattgaagttgagaagaaagtggaagacactgaaggccctaaatcttctagtgcatcaaaagggaggaggcagttgactaagaaagtaattgagtattgttatgagccagaaatggaggagacttacaggtcaagcatgttgaaggcattttcaaagacccttgatgaaggaaattttacatttgtgattgtggatgaccgcaatctgcgggtagctgattttgctcaattttgggcaactgcgaagaaatcaggctatgaggtgtacttgctggaggcaccatacaaggatccaacgggctgtgctgcaaggaatgtgcatggatttacattggatgagataaaaaagatggcagcggactgggaggaggctccaccattatatctgcagctagatatacattcattattccatgatgataaccttcgtggccattctatacaagaggtagatatggacactgaggatgttgatgatgctaatgacgcaactagcatcattgctgagagctcgcagaaggctgtacaggatccaccaaacgaaggcttctcaaagccaggggaggagtggaactcagaagtagaagatggcctggatagtttaaaagaactaggacagagtaaatggtcaaaagattttgaggatgaaaccacaaagtccgagaatacagaggaaaacacacatgctctttctggcctggcccggacatatagcacaggacgcaaaaatgtcagttggggtgatcggcttgaaaagggtgggttttccatttatgcaactaaaagaaaacttacttcgtcactaatcatagggcctggatcagggtacaatttggtatccaaccccttggctgaagatagttccacaggtacaaaagggaagacgaataacgagaccaaaaaacggttcagtgaacaacttcgtgacgaaggtgaatccttcagggcagtttttgacaagacaaagcagcacattggagtttttgagaatggagatgaggaataatccttgactagaggttcttttagttgtttgcccttaagcgttttggatgctcaggatgatacttcacacttacggaggggactagtgcagacagcttggagtcactttttcccccttccgcttgtcatcctgcagcaagtcacaatattgagccattcagtgaatcgtgggatcaatattctttagtccaatcgccttcatcaagcgcaatgagcaatagttccaatgtgccgttcaatgaaagcaatgcggatttttttggttcatgggcttgttgtccttgtaaaggcaactcacacatgccacaaagatgtactgtacctatgtatcaggcacgcacactgaatagtggccatcagtttttacatgtttctgttatatatgtgttgttgttaccacgagaaactattcggctctcgtctct

SEQ ID NO: 127960 - DNA, 2663 bp, Zea Mays
atgaaaaaactaccctcccaaggctggcggctggcctgccctgccgaagcgcgccgtgccgtgtctccgtgtgccccttcctcccagaaccagaagaagttctcgaagcttctcgaaacatcgctccgtctcctccttcagccaaaacccagatcccgaaaccccagacgagcactgctccgcatggaccatcattggcgcttccctgcggtcgccggcgccgatttctgcccggtctgttccgtgcgtcacttccccttctgcccaccgccgcctctcccgccgcatcccttcccctacgacctccagccgccgccaccccctcccccgccgaaccccttcccatacgacttccacccgccgcccccaccgccgctgatgtgggcccctccacctcctgggccgcacgacccgcgttcctacgatctccccggctgggaggggcctcacaagcggatgcgcctgggcgaggcgccaccgttcgatccgtacgactttgtgcctccaccgccgccaggaagggcttctgtggagggcgatcggctgctcggcctgatccgggaccatggccgcaatccacttcccggttgtctacctgacggcggctttggttacggaggaggtagattatatccccggcaaggatgtgattttgcggatttcgaccaaaagttgccacctcccatgctgaatgataatggcttcggacaaggttttgtgccagacgaaggccctcaccgaaagtattttgacggtgccaatcaccatttccatcagttccacccagagccattgcctggtgcgccgctgcaccctccactgcctcgctaccctgatccccatggttcacatgcttggcatgttgaggcaggtgctgtgccacggccagcagagcctccattcccctctaaccatgattaccgtgctgcaccgccacggttgactgcaaattcatcattgtttcctgtcctttctggttcgccaacaacggaaaattttccatcaaccgctggtaccttgcctccagcccatcccatgccaaacaaaaaccgtcatgacggacacatcaacgatgaggggccaggtttcatttatcgaccacaatcagagcagaacttgatagatggaaggatgaccagtgcacattattctctggaaaattccaatgtcacggtcatcaatgcttgtgatttgttcaagcagccgcttcgtggttcacgccctgaccatattgttgtcatcctcagagggcttccaggtagtggaaagagttatctggcaaaggcattgcgcgatcttgaagttgataatggtgcaaatgcgcctaggatacactccatggatgattatttcatgattgaagttgagaagaaagtggaagacactgaaggccctaaatcttctagtgcatcaaaagggaggaggcagttgactaagaaagtaattgagtattgttatgagccagaaatggaggagacttacaggtcaagcatgttgaaggcattttcaaagacccttgatgaaggaaattttacatttgtgattgtggatgaccgcaatctgcgggtagctgattttgctcaattttgggcaactgcgaagaaatcaggctatgaggtgtacttgctggaggcaccatacaaggatccaacgggctgtgctgcaaggaatgtgcatggatttacattggatgagataaaaaagatggcagcggactgggaggaggctccaccattatatctgcagctagatatacattcattattccatgatgataaccttcgtggccattctatacaagaggtagatatggacactgaggatgttgatgatgctaatgacgcaactagcatcattgctgagagctcgcagaaggctgtacaggatccaccaaacgaagcttgaaaagggtgggttttccatttatgcaactaaaagaaaacttacttcgtcactaatcatagggcctggatcagggtacaatttggtatccaaccccttggctgaagatagttccacaggtacaaaagggaagacgaataacgagaccaaaaaacggttcagtgaacaacttcgtgacgaaggtgaatccttcagggcagtttttgacaagacaaagcagcacattggagtttttgagaatggagatgaggaataatccttgactagaggttcttttagttgtttgcccttaagcgttttggatgctcaggatgatacttcacacttacggaggggactagtgcagacagcttggagtcactttttcccccttccgcttgtcatcctgcagcaagtcacaatattgagccattcagtgaatcgtgggatcaatattctttagtccaatcgccttcatcaagcgcaatgagcaatagttccaatgtgccgttcaatgaaagcaatgcggatttttttggttcatgggcttgttgtccttgtaaaggcaactcacacatgccacaaagatgtactgtacctatgtatcaggcacgcacactgaatagtggccatcagtttttacatgtttctgttatatatgtgttgttgttaccacgagaaactattcggctctcgtctcttactactgtgacgagtaaactgtctgaatctgaacaattgttttcttaaagagttgtacttaagtaggattggaaacaaaa

SEQ ID NO: 127961 - DNA, 1619 bp, Zea Mays
tgctattgagctgctgttggcttctgttcgtgttctctttgattggtgcgaccatagttctacttggcctgaatcaactattgcactgctgaagaaagcaatgattgctggtttcgtggtctgaaatgtatttgttttgcatttttagtataacttgttgagtgttatttttgtgaaagctcttcagattataatatttcagtagattaatcttgtttttgtcagacaatattgatttttcaggagctactcttgcatgctatttagaatttgatttcattttaattaatgtctcatctcatttcatagtgaaatcatcctgatagtgttctgattgctagtttctctttttcagaaatcaggctatgaggtgtacttgctggaggcaccatacaaggatccaacgggctgtgctgcaaggaatgtgcatggatttacattggatgagataaaaaagatggcagcggactgggaggaggctccaccattatatctgcagctagatatacattcattattccatgatgataaccttcgtggccattctatacaagaggtagatatggacactgaggatgttgatgatgctaatgacgcaactagcatcattgctgagagctcgcagaaggctgtacaggatccaccaaacgaaggcttctcaaagccaggggaggagtggaactcagaagtagaagatggcctggatagtttaaaagaactaggacagagtaaatggtcaaaagattttgaggatgaaaccacaaagtccgagaatacagaggaaaacacacatgctctttctggcctggcccggacatatagcacaggacgcaaaaatgtcagttggggtgatcggcttgaaaagggtgggttttccatttatgcaactaaaagaaaacttacttcgtcactaatcatagggcctggatcagggtacaatttggtatccaaccccttggctgaagatagttccacaggtacaaaagggaagacgaataacgagaccaaaaaacggttcagtgaacaacttcgtgacgaaggtgaatccttcagggcagtttttgacaagacaaagcagcacattggagtttttgagaatggagatgaggaataatccttgactagaggttcttttagttgtttgcccttaagcgttttggatgctcaggatgatacttcacacttacggaggggactagtgcagacagcttggagtcactttttcccccttccgcttgtcatcctgcagcaagtcacaatattgagccattcagtgaatcgtgggatcaatattctttagtccaatcgccttcatcaagcgcaatgagcaatagttccaatgtgccgttcaatgaaagcaatgcggatttttttggttcatgggcttgttgtccttgtaaaggcaactcacacatgccacaaagatgtactgtacctatgtatcaggcacgcacactgaatagtggccatcagtttttacatgtttctgttatatatgtgttgttgttaccacgagaaactattcggctctcgtctcttactactgtgacgagtaaactgtctgaatctgaacaattgttttcttaaagagttgtacttaagtaggattggaaacaaaa

SEQ ID NO: 127962 - DNA, 273 bp, Zea Mays
atgacgtctagctgtggcgcggccaggcttgggttggaaacaagggggaacacacgaacaacacgtaggcacccccacctcctggacctcaattggatcgcgtcgcgctctcctggagtttggaggatcagccgtggagttggggagaagcaagcaggaatccatgcgaggtcaggcgaggtaaatgggggcggactgaggaacagagcagcggcaccggatgaggagggtgtggtggagatcctcggccaccttcctgctatccgtgattga

SEQ ID NO: 127963 - DNA, 945 bp, Zea Mays
atattttttattttaaacgtctcctcaaccttatctttctctcacctttctcactcccgtctctctcgtctctctctctctccctggatcccgcccgccactggccgcccccactcgcccgccaccgccaccccggccccgaccccatccaccacggctgcccccgcccccggccgccactcccgccggcgcggccgcccaagcccacacccgccatgggagtcgggagctcagatcgggagggacggggtaggtagggttcacgagcgagcgagggtgctgccgtcgggcgccggtgtccaagtagcaagaggagagatggacgcgttcctacagagactcaagcggttggacgcgtaccccaaggtgaacgaggacttctacaagtggacgctctttggcggcatcgtcacgctcgtcgccgccgtcgtcatgttgcttctcttcatctccgagaccaggtcatatttttattcagcaacagagactaagttagttgtggacacatcaagaagagaaaggctacgagtaaatgttagtactttttaaacgaaataaactgtctgtaggctattggctgatcttggtgtttcttggggaaaagagtacgagcactctcaataatgtaactcagcaaatgtcatttgtacatatatattagacacctccagctaccttgccaacgcaagaacgagaagacgagttagactttgtcaaaaccctcttcactagtggaggtatcgaccatcactcgtcactgtaacccgatggtgatcggcaaccatgagcttccatgttattgtgttctgatacttgagacgtttattatgattatgtatgagatattgtctcttattagtactggatgatgagatgtgtcttattatgactacggatgagacttttgtgatgtaattgatgagactatggatttaaaaattgtta

SEQ ID NO: 127964 - DNA, 288 bp, Zea Mays
atggaacccattcttctccaaatcctcgagccgaccttgggtgaaggagcgcaagggaaagacgtccatgagttcaagtggggatggccaagaaggatgaaaaacaggaaggtgcaggaaggcttccggggaagggaggagacatgcgcttgggtgcgagaatgcgatacagggaacccaagcgatgtcagaaaggtgccccccgcaaactacacaggaggatcctccgcctcagaacaccaccacctcgggcgccggggcgggaggctcatattttttgtcttctaa

SEQ ID NO: 127965 - DNA, 115 bp, Zea Mays
aagtcatcccctcctaaatggaaccaatccaaacaacaacaaattgggagctgagtggctccattccaccatacttcggaaccaaaccctacctaagtggctagcgcgatcaaag

SEQ ID NO: 127966 - DNA, 2257 bp, Zea Mays
atggcgtgcgaggactgggtggtggaccacaacgtggatgccgcgacggtggccgacatggcgcacctcgcacacgactacttcacgcttccacccgaggacaagcctccgcttggcccctacatcgacacggctccatctccagcttcctttatcccacagttggtggataccgaggaggaggatgaggttttccacacctcgcccagcacgtgttcgacgatggtccccaaccgcgatgccaccaccagcatgctcgccatggtcgaggccacctggagcgacaacgagtatgcgctcgtggacctgcagtccatctgctactactccacgtccaaaggcatctgtgagtacccagaccttgtcaggcactacctgggcagcgtcgtactgccaggcgacaactactatgtcgccctcaattcagtggtgttcagcgacgggtcctttagcttcgttcccaaggacacagtctgccccatggaaatctcgacctactttaggatcaacgacaaggagaccaaccagtttgagaggactctgattgtggccgatgagagatgcacctatgtcttgctcattgagttgtgtcttcaggttgatggtgttaaagtttggcttccgccttggccaccacctgtttggacattctggctactttatgatgtgtgcagcggcatgcattacaactgcagagactgtgcctggttcaagggtatatggtagccactatttttggtgaccccattttatattcgacggctgaagcttggttgggacgtttttctgggaaaggaaattggagagccgcggggactgaagtggttggctgttagttcgtggaatatggctgagaagatgcaaaaagggggcaagtatgattatgcctctgaatttttggagtttgcagatgaatttttcagttcaatgttctctgtggttctgtccaccagatgtttgctaaattgtttcatcgtcctacacacttgtttttcgactgcaatttcaataccgaagctcggtgatgcggataacggttttgctggagctattcttgaagatcagatattcattgataccctgacctccagaaaagaaatgaaaggacaggtgcacaaaatagcttgtcacttgctatatactatgttgggacatgtgcacaagactgcatccaatggagataagcgggcctcattacatagtgataggagaacctggggtctatgtgacagatgtctggagaagtggtcttatggtcagaaatgtactcattctgttcagcttcatgtcgtggatggggtcttggaattagtcagcacagacagtgagactcgccaccacggaatcgagggtccacaactcaggatgactttatcccaggcagcttgttcaggctcggacagacgccaaacgttgaagttcagaggatcccttcagtctatccctttgttgattttggtgggctcaggaagttcctacactttcgtcatcaatcgatttccgtccagtttaccaggagtttcagacatgatcagcactgaatctgtgcaagtggacaacagggaaatcatgtcttgtcaacattaccggctgactatggaatggttcatacaggattacaagtttgtgtccaacatctcattattgcccttgtccaaatataatttagttgtcaacaggaattggttggaagcatacagtcatatgtcaacaggagatggatataccaatacaagggaactacggtgttgctacatggattacctcccgcagcacctactggcacttctgttgaagtcttgctattgtcagattcttcagttagcactcaacattctctctgatacaacaccggtgcaccctgactacaattttgtgaagcttgtcatttttgcgaagctatctgactacagttctaggcagatggagctgcaatacttccataagaatgtcatcacctgcaaccagttccgtatcatgctggctacactatcagcggcttgggggcaagccgcatttcgaggagtggggaatgtcagcaacacgtatccaggagatggctgagaaggcagcaacagatggagaaagctgtcagcaagctgagtagaaggaaacgtgggccaatgtgggccaaatgtgtgggctgcgatccagtatagatttctataaaaagaatgtcttgtaataggagagggaccaagaagagaatattgaaatccactgtcgtgtctatcggctcattcttccccttttccaa

SEQ ID NO: 127967 - DNA, 594 bp, Zea Mays
cgagttgtttggggggagcactgcatgagccctcctccgacggacaccctctccgttctctagcgatcgagatgtgcgaaattctgatgtgcgagatcgagggccaccacctcacgtcggcagccatcgtcgaccatgaaggcgccgcctgggctcagagcactgcattccccgaggtcaccgctaccttcatgcgaaccattcctctgccgtaaagtccgacggcagccacgtggtaccaggccacagctggcccacacgtcatccacccggctaccacaacgttcacggatgttacgggatagattttgctgtgacgtcatccacccaattcaagcctgagatggccaacatcatgaaggatttcgatgagcgggggcaccgtaccttgcctcgaccggcctgttcctgggagccaccaagtacactgtcatccaaggcaagcttggtgctgttattcgtggcaagaagggatccggtctgtgaggccaatagtatcctttatttatatttttcatgtgagatcctaaatgaaaattcactactggatttgactttgctggtttcacaaacctatacgttttgagacagtca

SEQ ID NO: 127968 - DNA, 115 bp, Zea Mays
aagtcatcccctcctaaatggaaccaatccaaacaacaacaaattgggagctgagcggctccattccaccatacttcggaaccaaaccctacctaagtggctagcgcgatcaaag

SEQ ID NO: 127969 - DNA, 1374 bp, Zea Mays
atgtcatggtcggggccagaactggcgaagtggtcgcgtgacggccaggaagcggagcaggagcccgagtcggtgcctcgtcgcaagtcatggtcggcgccagaactggcgcagtggtcgcgtgccggcaaggaaaaggagcaggaggagcccgagtcgtcggaacctcagcgcaagtgggtggccctcgtctccgttgtcgtcctccccagcaacgaggacgagcgggcccatgagatcatccccggcaccgacatgctgatgctcgacctcaacgacccgccgctgccctcctacctcgtgcttcacccccgcgtcgcccccaatcccaggcgcaccaacgagccactgtccgcctacatcctcgccgccgaccgctccggctgcatcctcctccaggtcgtcgaaggcaaccgcccggacttcttcctctgcaacacccacactcgtaccgtcaccatcctccccccggtgtcctcctatacccaggccaacgacgtgggtctaatctacctccacctcagcatgggtctaatcgccgacccgcagcacagcggccactacatgtgtctgctgcgacccttcacgccagtccccgagagcccgcgctgcgcttcatccgctcccggccggctcgagatggccggccacgtcgccttcgaccgcgtcatcaagcccctcgtccgaaagcgccgctgcgtgaggcccagtgagggcaagctgcgcttcgtcgagatccgcggcctctcctacaaagtgcccgtcgacgagtctaaccccaccgtatggatgtggacgctcgttgacccggaggtcccgaacccctggacattcgagtacgaggtggccttcgcggaaatctgggaggacgagacctacgccgccgccggcctgcagccgggcgaggtgcccgacgtcgccctcgtcgaccccaacgaccactacgttgtctacttcttccagggctcgaagctcttcggcctggacctgcgcgagaagaaggtcgtcggctgcgaggaatggctgatagaccgcgatcgactcgagtaccaatcctcccgccccatcgtcgatgcctgggagctgtcgccaccaccgccatcgccacccattctttcgggcgatgacgactattcgacagacgataaagatcagtcggaactgccttgcaccgaggaaaagaagcgccaggtggctgagtctgttgaatcttggctaaaccaggcccggttggcgtggacgagggacgcggacgtggacgcgtccaactggaggacatggaagatggcgcctccacaatctgatgaatcatctgttgacgctggtggccaaactgaagatgagccggagatacagttacccccttccccgtaa

SEQ ID NO: 127970 - DNA, 1616 bp, Zea Mays
aaccaacaaagaaagtcgcggcggagcaatgtgctgcaacgcgaaggtctcgccactgccggttgagatggacacctccgcctccaaagtgctcaccaacgacgatctccttcacgacatccttctccgcctaggatgcccgagctgcctcgtcagtgccgcgctcaccagcaagtgctggctgcgtggcgcctccgatcaggtcttcgcgcgcgacttctgcgcggaccaccagccgcgcctacttgggatctacgtctccagcggcggcatctctgggtcggagttcatcccattcaggcaacctgctggtggctctaggccggaggtgagtactgtcctcaaccatgccgatttcggtttgggcgacctgccggcgccgagcgtttgggactgccggaacggcatggtcctcttccagttcggtggcgagacctttaaccccgctggtctcgctgcgcgttccccgctgctgtatcctaacatgcacgagagcgtggtgctcccgccgtcgccgcagccgtcctacttcccggagtaccctcacgcgatgctcctccctaccgacaaaggcgacgacgccttgtgctaccgcgtcgacgtccgcatctgggagtcgcacaacaaggccgcggcactggtgtgggtcctgcggtccggctcctggcacatccgctgcatagccgcgggtgttctcgccaagtcgccggcccagatcctgccgactaccgtgctcgacggcggcaagatctacatggcgacccaggcggggtacatcctgggactggacctcgccacggcgagattcttcatcgtcgatctccctcggggtgtggagcttgaccagtacccaggcaaccttgtccactgccgcggggacgactctgtcctctacctcttccatgtggacggggacaacaggctcaacgtctggctccgcaggatggaagacgaccagaaggggcacggcggccctggtgctgctggcggcagcgccggcgccaccaaggggtgggtgctcagggacaccatttccgtgcgtgagacctgtggccatctcgtggagcagggttgggagaaggcaggtgacggggacgaggacgctgctgcagtgatgatagtgggcgccggggacaacgccgagttcgtgttcttggagctcggtgtgactggcgtcgttgcgtacatgcacgtcaagaccagagaggtgaagcaggtgtaccagaggcagccagacgacgaccacttcatcagtgttcgtccgttcatgctcgtcaagcctcctgttttcccagtactggaggatgctcatgaaggcgaggccgcagccgcactgcatcaggagtaatcatcccagcagtgccagcagtatcttctctagtatttatttacttatattaaactgcataaggtttgttaaatgttatagattccaggagacagaaatcgagcgttcgatcggcgcgtcctgtgatttctgtcattctgagctatgaacatgtttgctttaatcatgttatcggattcagatgcattaattaatcagtttggtatatcggtttgtatttcataattcggtcagcacatctcaacttcaatgttgcagttctgtttgt

SEQ ID NO: 127971 - DNA, 1356 bp, Zea Mays
aacaaagaaagtcgcggcggagcaatgtgctgcaacgcgaaggtctcgccactgccggttgagatggacacctccgcctccaaagtgctcaccaacgacgatctccttcacgacatccttctccgcctaggatgcccgagctgcctcgtcagtgccgcgctcaccagcaagtgctggctgcgtggcgcctccgatcaggtcttcgcgcgcgacttctgcgcggaccaccagccgcgcctacttgggatctacgtctccagcggcggcatctctgggtcggagttcatcccattcaggcaacctgctggtggctctaggccggagccgtcctacttcccggagtaccctcacgcgatgctcctccctaccgacaaaggcgacgacgccttgtgctaccgcgtcgacgtccgcatctgggagtcgcacaacaaggccgcggcactggtgtgggtcctgcggtccggctcctggcacatccgctgcatagccgcgggtgttctcgccaagtcgccggcccagatcctgccgactaccgtgctcgacggcggcaagatctacatggcgacccaggcggggtacatcctgggactggacctcgccacggcgagattcttcatcgtcgatctccctcggggtgtggagcttgaccagtacccaggcaaccttgtccactgccgcggggacgactctgtcctctacctcttccatgtggacggggacaacaggctcaacgtctggctccgcaggatggaagacgaccagaaggggcacggcggccctggtgctgctggcggcagcgccggcgccaccaaggggtgggtgctcagggacaccatttccgtgcgtgagacctgtggccatctcgtggagcagggttgggagaaggcaggtgacggggacgaggacgctgctgcagtgatgatagtgggcgccggggacaacgccgagttcgtgttcttggagctcggtgtgactggcgtcgttgcgtacatgcacgtcaagaccagagaggtgaagcaggtgtaccagaggcagccagacgacgaccacttcatcagtgttcgtccgttcatgctcgtcaagcctcctgttttcccagtactggaggatgctcatgaaggcgaggccgcagccgcactgcatcaggagtaatcatcccagcagtgccagcagtatcttctctagtatttatttacttatattaaactgcataaggtttgttaaatgttatagattccaggagacagaaatcgagcgttcgatcggcgcgtcctgtgatttctgtcattctgagctatgaacatgtttgctttaatcatgttatcggattcagatgcattaattaatcagtttggt

SEQ ID NO: 127972 - DNA, 108 bp, Zea Mays
atgttaccgtttcactcttctttaacaggatcaacagaatcaggattcaggaatagggtcaatgaacaatttcatggaatgaatgatttagaacatttgaaaatttaa

SEQ ID NO: 127973 - DNA, 461 bp, Zea Mays
catacattgaggagagatgaatgccaagaggctgacgccggttctgctcgccgttctattgccatgcctatgccttatgttcgttgcaaactgtagcgacgtgggcataccggcggcggctggcggtctccggcggctaccggacggagagaagagcaacaagatacacatcatactgtgtgtgaagtcccattgctacggtcccgtcaagacatgttactgctgcaacacactcgttaatgtaacgtgctacacagatcagcaatactgctggagcgtgtgtcccagtagactccaagggatgatccctgcacccgcgccagcgccattgccatcgccaacgggtcgtcgcggcaggttctctcgagcctcgacttctccgacgagtaacaacaattcgtgaaattatgtcatgcctgacagcgtgagcgtaggatgatgatatatatgcagcaacttta

SEQ ID NO: 127974 - DNA, 630 bp, Zea Mays
cttccatcgccggccctttttccgtgcacaaaggcgtgtgtgtgcgtatatatatacacatacacacactgctccatgccaccgttgtagcaagttctcccatctagcaacaccataatcgcaggagaatcgctgctccaccagactcggtttcctcttgcttcagcgtcaaaatcatggccgcagctggcaagtcgtcgtcggccatggaggagacggttgcggcgacggccgccgcgcgggggcggcgcgggattgaccggcaggccgtcgacaggggcatcgcctacctgctcatggtggccgccctcgtcgccacctacgcgcttcactagattttgatctgctccggcgcgggcagacctcacaggaaggaaggcttttgtgcgcttctgcttcccgccggcctcagcctcttcagagttcccctgcaccaaacttcattcgttcgtcttccaaccttgtattgtatggagaattggagatggagatgcatgtgtctgtgtgctacatctccatacactgcacaagttgttttcttatactctttccgtgtgattaatctgtacagaatagtcatttgttgccaaaacgatcagtgttaccatgtgttcggcttgcttgtgtcta

SEQ ID NO: 127975 - DNA, 3297 bp, Zea Mays
cacgttcaaaaaggaaccaaagcacacacggccagacggcctccagtccagatcaaatccacgctacctcggagacccgttagcccgtttgctgtatcactcccctctccaccgcgtctctcctgcatgctcgtattcgcaaatctcctcccctctccccgcgcggcgcgcctgcacctcccggtccggcgagaggccaccgcccgcgcggccgcgctcctcgcactccccccactccggaagccctaggagcgccgtctccaccgctgcacctccgccagtcgcgctcctcgcctcgcctcgccgctgcctccgtagccgtcgcgggcgccgccatgccgctccggttggatatcaagaggaagctcgcacagaggtcggagagggtgaagtccgtggatctgcatccgacggagccatggattttgtcgagtctgtactcgggaagcgtatgtgtatggaactaccagactcagacaatggtgaaatcatttgaagtcacggatttaccagttcgttcggctaaatttattgcacgtaagcaatgggttgttgctggtgccgatgatatgttcatccgtgtgtacaactataacacaatggacaaggtcaaggtttttgaagctcacactgactacattaggtgtgtggctgttcatccaacccagccctttgtgttatcatcgtccgatgacatgctgattaagctgtgggattgggataaaggctgggtgtgtactcaaatatttgaagggcattctcactatgtgatgcaagttacatttaacccaaaagatacaaacacctttgctagtgcttccctggatcgcacaataaagatatggagtcttggttctcctgacccaaatttcacactagatggccattccaaaggtgtgaactgtgttgattacttcactggtggtgatcgaccatacctaattactggctctgatgatcagactgcaaaggtttgggactaccagacaaagagctgtgttcaaacacttgaaggacatgcacataatgtgtccgctgtatgtttccatccagagctacctataattattactggttcagaggatgggacagttcgaatgtggcattctactacctacaggcttgagaacactcttaactatggccttgagcgagtttgggctttaggatatatgaaagggtcaagaagggttgtgattggatatgatgaagggacaataatgataaaaattggtcgtgaagttcctgttgctagcatggatagcagtggaaaaattatatgggcaaagcataatgaaatccaaactgttaacatcaagagtgttggtgcagacaatgagatcgcagatggtgatcggttaccattggccgtgaaggagttgggaagctgtgatctttatccacaaagcttaagacacaatccgaatgggagatttgttgttgtatgtggagatggagaatacataatatacacagcattagcatggagaaatagatcatttgggtctgcacttgaatttgtttggtcaactgatggagaatatgccatcagagaaagcacctcaaggataaagatttacagtaaaaatttccaggagaggaaaagtataagaccatcattttcggttgaacggatatttggtggtgtgttacttgctatgtgtacaaatgacttcatttgcttttatgattgggtggaatgcagattgatacgtcgaattgatgtcaatgtgaagaatctttactgggctgacagtggtgatttagtaacaattgcaagtgatacgtcattctacattttgaaatataatagggatgtagtttcatctcatttagacggagggggttcagctgctgaggaaggtgtggaagatgcctttgaactgcttcatgagatcaatgaacgtgtccggactgggctatgggttggcgattgttttatctacaacaattcttcgtggcggcttaattactgcgtaggaggagaggttacaaccttatttcacttggatcggccaatgtatttactaggatatcttgcaaaccaaagccgtgtctatcttattgataagcaatttaatgttgtggggtatactttactccttagtttgatcgagtataaaacacttgtaatgcgtggggattttgatcgtgcaaatgatgttttatcatctataccaaaggaacaatatgacagtgtggcacgtttcttggaatcacgtggaatgttggaggaagccctcgagatagcaactgacactaattacagatttgacctggctgtgcagcttggtcgacttgaaatagcgaaggtgattgctactgaggtgcaaagtgaatccaagtggaagcaattaggggagttagctatgtcaaatggaaagcttgaaatggcagaggagtgtcttctacatgcaatggacctcagtggtttgttgcttttgtattcttcccttggggatgccgaaggcattaacaaattggcatctgtagccaaagaacaaggaaagaacaatgtttctttcctttgtttcttcatgctaggaaagctggaagagtgtcttcaattgctaatagaaagcaatcgtattccggaagcagcattgatggccagatcttatcttcctagcaaagtccctgagattgtagcgttgtggaaaaaggatctccagaaggtaaacccaaaagcagcggagtccctggctgatcctaatgagtacccaaacttatttgaagactggcagattgctctgaatgtagaagctgctgttgctccgaaaagggttatctatccaccggctgaggagtacatgattcatgctgaaaggtcaaatgagaatttagtggaagcttttaaaaacatgcatgtacaggaagagatggtgccagatgataatgaagagtatgttcacgaggttattgaagatggtggagtagaagagagtcaagaagatgctgttgaggttgatgcagaggatgatggagtagaagaaagtcaggatgaagctgttgaggttgaggctgaggattcaactgatggtgctgtccttgtgaatggaaacaatagtgaggaacagtggggtatgaaaaatgaagaaccatcagcataaaagctgtagttgagcaagtgtacagtcctaaataccttatttttcctggtcttacctcccagtgcacgatattaggaaagctgggtgatatccttaagttgcccttgtctttagcggtatggcagttcagggagttttgaccaacctaggattcataaattttattaaaagcttagtgaaacgtttt

SEQ ID NO: 127976 - DNA, 3543 bp, Zea Mays
cacgttcaaaaaggaaccaaagcacacacggccagacggcctccagtccagatcaaatccacgctacctcggagacccgttagcccgtttgctgtatcactcccctctccaccgcgtctctcctgcatgctcgtattcgcaaatctcctcccctctccccgcgcggcgcgcctgcacctcccggtccggcgagaggccaccgcccgcgcggccgcgctcctcgcactccccccactccggaagccctaggagcgccgtctccaccgctgcacctccgccagtcgcgctcctcgcctcgcctcgccgctgcctccgtagccgtcgcgggcgccgccatgccgctccggttggatatcaagaggaagctcgcacagaggtcggagagggtgaagtccgtggatctgcatccgacggagccatggattttgtcgagtctgtactcgggaagcgtatgtgtatggaactaccagactcagacaatggtgaaatcatttgaagtcacggatttaccagttcgttcggctaaatttattgcacgtaagcaatgggttgttgctggtgccgatgatatgttcatccgtgtgtacaactataacacaatggacaaggtcaaggtttttgaagctcacactgactacattaggtgtgtggctgttcatccaacccagccctttgtgttatcatcgtccgatgacatgctgattaagctgtgggattgggataaaggctgggtgtgtactcaaatatttgaagggcattctcactatgtgatgcaagttacatttaacccaaaagatacaaacacctttgctagtgcttccctggatcgcacaataaagatatggagtcttggttctcctgacccaaatttcacactagatggccattccaaaggtgtgaactgtgttgattacttcactggtggtgatcgaccatacctaattactggctctgatgatcagactgcaaaggtttgggactaccagacaaagagctgtgttcaaacacttgaaggacatgcacataatgtgtccgctgtatgtttccatccagagctacctataattattactggttcagaggatgggacagttcgaatgtggcattctactacctacaggcttgagaacactcttaactatggccttgagcgagtttgggctttaggatatatgaaagggtcaagaagggttgtgattggatatgatgaagggacaataatgataaaaattggtcgtgaagttcctgttgctagcatggatagcagtggaaaaattatatgggcaaagcataatgaaatccaaactgttaacatcaagagtgttggtgcagacaatgagatcgcagatggtgatcggttaccattggccgtgaaggagttgggaagctgtgatctttatccacaaagcttaagacacaatccgaatgggagatttgttgttgtatgtggagatggagaatacataatatacacagcattagcatggagaaatagatcatttgggtctgcacttgaatttgtttggtcaactgatggagaatatgccatcagagaaagcacctcaaggataaagatttacagtaaaaatttccaggagaggaaaagtataagaccatcattttcggttgaacggatatttggtggtgtgttacttgctatgtgtacaaatgacttcatttgcttttatgattgggtggaatgcagattgatacgtcgaattgatgtcaatgtgaagaatctttactgggctgacagtggtgatttagtaacaattgcaagtgatacgtcattctacattttgaaatataatagggatgtagtttcatctcatttagacggagggggttcagctgctgaggaaggtgtggaagatgcctttgaactgcttcatgagatcaatgaacgtgtccggactgggctatgggttggcgattgttttatctacaacaattcttcgtggcggcttaattactgcgtaggaggagaggttacaaccttatttcacttggatcggccaatgtatttactaggatatcttgcaaaccaaagccgtgtctatcttattgataagcaatttaatgttgtggggtatactttactccttagtttgatcgagtataaaacacttgtaatgcgtggggattttgatcgtgcaaatgatgttttatcatctataccaaaggaacaatatgacagtgtggcacgtttcttggaatcacgtggaatgttggaggaagccctcgagatagcaactgacactaattacagatttgacctggctgtgcagcttggtcgacttgaaatagcgaaggtgattgctactgaggtgcaaagtgaatccaagtggaagcaattaggggagttagctatgtcaaatggaaagcttgaaatggcagaggagtgtcttctacatgcaatggacctcagtggtttgttgcttttgtattcttcccttggggatgccgaaggcattaacaaattggcatctgtagccaaagaacaaggaaagaacaatgtttctttcctttgtttcttcatgctaggaaagctggaagagtgtcttcaattgctaatagaaagcaatcgtattccggaagcagcattgatggccagatcttatcttcctagcaaagtccctgagattgtagcgttgtggaaaaaggatctccagaaggtaaacccaaaagcagcggagtccctggctgatcctaatgagtacccaaacttatttgaagactggcagattgctctgaatgtagaagctgctgttgctccgaaaagggttatctatccaccggctgaggagtacatgattcatgctgaaaggtcaaatgagaatttagtggaagcttttaaaaacatgcatgtacaggaagagatggtgccagatgataatgaagagtatgttcacgaggttattgaagatggtggagtagaagagagtcaagaagatgctgttgaggttgatgcagaggatgatggagtagaagaaagtcaggatgaagctgttgaggttgaggctgaggattcaactgatggtgctgtccttgtgaatggaaacaatagtgaggaacagtgggtgctgactcctgagcaatagtggatcaacgggacagcaactttgcaagtggttaagtttgtaaaggttgctgactgctttctagagtacgaagtccattttctccagcagtattaagcatgagacgtgctctaggattggcttatccacatacgaagttggaccacaattaatcaaaacttcatcattgtgctcgataggaaattttgtgcttccttttttacatatagatcaggtctttaggtctcagaaaacttcatcaaaagtactcttgtttcaccgagatggaaatatgggatgtgattggtgatcggagtggtatttttacaaggtacatagagtagtagcttgtggaattgaggatgttttacatgtgatgtacatcggacttgggagctttgtatcaacagcatacgttttcaacagtctgtgtttagtttagtgaataatttgtgttgagcta

SEQ ID NO: 127977 - DNA, 3688 bp, Zea Mays
cacgttcaaaaaggaaccaaagcacacacggccagacggcctccagtccagatcaaatccacgctacctcggagacccgttagcccgtttgctgtatcactcccctctccaccgcgtctctcctgcatgctcgtattcgcaaatctcctcccctctccccgcgcggcgcgcctgcacctcccggtccggcgagaggccaccgcccgcgcggccgcgctcctcgcactccccccactccggaagccctaggagcgccgtctccaccgctgcacctccgccagtcgcgctcctcgcctcgcctcgccgctgcctccgtagccgtcgcgggcgccgccatgccgctccggttggatatcaagaggaagctcgcacagaggtcggagagggtgaagtccgtggatctgcatccgacggagccatggattttgtcgagtctgtactcgggaagcgtatgtgtatggaactaccagactcagacaatggtgaaatcatttgaagtcacggatttaccagttcgttcggctaaatttattgcacgtaagcaatgggttgttgctggtgccgatgatatgttcatccgtgtgtacaactataacacaatggacaaggtcaaggtttttgaagctcacactgactacattaggtgtgtggctgttcatccaacccagccctttgtgttatcatcgtccgatgacatgctgattaagctgtgggattgggataaaggctgggtgtgtactcaaatatttgaagggcattctcactatgtgatgcaagttacatttaacccaaaagatacaaacacctttgctagtgcttccctggatcgcacaataaagatatggagtcttggttctcctgacccaaatttcacactagatggccattccaaaggtgtgaactgtgttgattacttcactggtggtgatcgaccatacctaattactggctctgatgatcagactgcaaaggtttgggactaccagacaaagagctgtgttcaaacacttgaaggacatgcacataatgtgtccgctgtatgtttccatccagagctacctataattattactggttcagaggatgggacagttcgaatgtggcattctactacctacaggcttgagaacactcttaactatggccttgagcgagtttgggctttaggatatatgaaagggtcaagaagggttgtgattggatatgatgaagggacaataatgataaaaattggtcgtgaagttcctgttgctagcatggatagcagtggaaaaattatatgggcaaagcataatgaaatccaaactgttaacatcaagagtgttggtgcagacaatgagatcgcagatggtgatcggttaccattggccgtgaaggagttgggaagctgtgatctttatccacaaagcttaagacacaatccgaatgggagatttgttgttgtatgtggagatggagaatacataatatacacagcattagcatggagaaatagatcatttgggtctgcacttgaatttgtttggtcaactgatggagaatatgccatcagagaaagcacctcaaggataaagatttacagtaaaaatttccaggagaggaaaagtataagaccatcattttcggttgaacggatatttggtggtgtgttacttgctatgtgtacaaatgacttcatttgcttttatgattgggtggaatgcagattgatacgtcgaattgatgtcaatgtgaagaatctttactgggctgacagtggtgatttagtaacaattgcaagtgatacgtcattctacattttgaaatataatagggatgtagtttcatctcatttagacggagggggttcagctgctgaggaaggtgtggaagatgcctttgaactgcttcatgagatcaatgaacgtgtccggactgggctatgggttggcgattgttttatctacaacaattcttcgtggcggcttaattactgcgtaggaggagaggttacaaccttatttcacttggatcggccaatgtatttactaggatatcttgcaaaccaaagccgtgtctatcttattgataagcaatttaatgttgtggggtatactttactccttagtttgatcgagtataaaacacttgtaatgcgtggggattttgatcgtgcaaatgatgttttatcatctataccaaaggaacaatatgacagtgtggcacgtttcttggaatcacgtggaatgttggaggaagccctcgagatagcaactgacactaattacagatttgacctggctgtgcagcttggtcgacttgaaatagcgaaggtgattgctactgaggtgcaaagtgaatccaagtggaagcaattaggggagttagctatgtcaaatggaaagcttgaaatggcagaggagtgtcttctacatgcaatggacctcagtggtttgttgcttttgtattcttcccttggggatgccgaaggcattaacaaattggcatctgtagccaaagaacaaggaaagaacaatgtttctttcctttgtttcttcatgctaggaaagctggaagagtgtcttcaattgctaatagaaagcaatcgtattccggaagcagcattgatggccagatcttatcttcctagcaaagtccctgagattgtagcgttgtggaaaaaggatctccagaaggtaaacccaaaagcagcggagtccctggctgatcctaatgagtacccaaacttatttgaagactggcagattgctctgaatgtagaagctgctgttgctccgaaaagggttatctatccaccggctgaggagtacatgattcatgctgaaaggtcaaatgagaatttagtggaagcttttaaaaacatgcatgtacaggaagagatggtgccagatgataatgaagagtatgttcacgaggttattgaagatggtggagtagaagagagtcaagaagatgctgttgaggttgatgcagaggatgatggagtagaagaaagtcaggatgaagctgttgaggttgaggctgaggattcaactgatggtgctgtccttgtgaatggaaacaatagtgaggaacagtggggtatgaaaaatgaagaaccatcagcataaaagctgtagttgagcaagtgtacagtcctaaataccttatttttcctggtcttacctcccagtgcacgatattaggaaagctgggtgatatccttaagttgcccttgtctttagcgtgctgactcctgagcaatagtggatcaacgggacagcaactttgcaagtggttaagtttgtaaaggttgctgactgctttctagagtacgaagtccattttctccagcagtattaagcatgagacgtgctctaggattggcttatccacatacgaagttggaccacaattaatcaaaacttcatcattgtgctcgataggaaattttgtgcttccttttttacatatagatcaggtctttaggtctcagaaaacttcatcaaaagtactcttgtttcaccgagatggaaatatgggatgtgattggtgatcggagtggtatttttacaaggtacatagagtagtagcttgtggaattgaggatgttttacatgtgatgtacatcggacttgggagctttgtatcaacagcatacgttttcaacagtctgtgtttagtttagtgaataatttgtgttgagcta

SEQ ID NO: 127978 - DNA, 3600 bp, Zea Mays
cacgttcaaaaaggaaccaaagcacacacggccagacggcctccagtccagatcaaatccacgctacctcggagacccgttagcccgtttgctgtatcactcccctctccaccgcgtctctcctgcatgctcgtattcgcaaatctcctcccctctccccgcgcggcgcgcctgcacctcccggtccggcgagaggccaccgcccgcgcggccgcgctcctcgcactccccccactccggaagccctaggagcgccgtctccaccgctgcacctccgccagtcgcgctcctcgcctcgcctcgccgctgcctccgtagccgtcgcgggcgccgccatgccgctccggttggatatcaagaggaagctcgcacagaggtcggagagggtgaagtccgtggatctgcatccgacggagccatggattttgtcgagtctgtactcgggaagcgtatgtgtatggaactaccagactcagacaatggtgaaatcatttgaagtcacggatttaccagttcgttcggctaaatttattgcacgtaagcaatgggttgttgctggtgccgatgatatgttcatccgtgtgtacaactataacacaatggacaaggtcaaggtttttgaagctcacactgactacattaggtgtgtggctgttcatccaacccagccctttgtgttatcatcgtccgatgacatgctgattaagctgtgggattgggataaaggctgggtgtgtactcaaatatttgaagggcattctcactatgtgatgcaagttacatttaacccaaaagatacaaacacctttgctagtgcttccctggatcgcacaataaagatatggagtcttggttctcctgacccaaatttcacactagatggccattccaaaggtgtgaactgtgttgattacttcactggtggtgatcgaccatacctaattactggctctgatgatcagactgcaaaggtttgggactaccagacaaagagctgtgttcaaacacttgaaggacatgcacataatgtgtccgctgtatgtttccatccagagctacctataattattactggttcagaggatgggacagttcgaatgtggcattctactacctacaggcttgagaacactcttaactatggccttgagcgagtttgggctttaggatatatgaaagggtcaagaagggttgtgattggatatgatgaagggacaataatgataaaaattggtcgtgaagttcctgttgctagcatggatagcagtggaaaaattatatgggcaaagcataatgaaatccaaactgttaacatcaagagtgttggtgcagacaatgagatcgcagatggtgatcggttaccattggccgtgaaggagttgggaagctgtgatctttatccacaaagcttaagacacaatccgaatgggagatttgttgttgtatgtggagatggagaatacataatatacacagcattagcatggagaaatagatcatttgggtctgcacttgaatttgtttggtcaactgatggagaatatgccatcagagaaagcacctcaaggataaagatttacagtaaaaatttccaggagaggaaaagtataagaccatcattttcggttgaacggatatttggtggtgtgttacttgctatgtgtacaaatgacttcatttgcttttatgattgggtggaatgcagattgatacgtcgaattgatgtcaatgtgaagaatctttactgggctgacagtggtgatttagtaacaattgcaagtgatacgtcattctacattttgaaatataatagggatgtagtttcatctcatttagacggagggggttcagctgctgaggaaggtgtggaagatgcctttgaactgcttcatgagatcaatgaacgtgtccggactgggctatgggttggcgattgttttatctacaacaattcttcgtggcggcttaattactgcgtaggaggagaggttacaaccttatttcacttggatcggccaatgtatttactaggatatcttgcaaaccaaagccgtgtctatcttattgataagcaatttaatgttgtggggtatactttactccttagtttgatcgagtataaaacacttgtaatgcgtggggattttgatcgtgcaaatgatgttttatcatctataccaaaggaacaatatgacagtgtggcacgtttcttggaatcacgtggaatgttggaggaagccctcgagatagcaactgacactaattacagatttgacctggctgtgcagcttggtcgacttgaaatagcgaaggtgattgctactgaggtgcaaagtgaatccaagtggaagcaattaggggagttagctatgtcaaatggaaagcttgaaatggcagaggagtgtcttctacatgcaatggacctcagtggtttgttgcttttgtattcttcccttggggatgccgaaggcattaacaaattggcatctgtagccaaagaacaaggaaagaacaatgtttctttcctttgtttcttcatgctaggaaagctggaagagtgtcttcaattgctaatagaaagcaatcgtattccggaagcagcattgatggccagatcttatcttcctagcaaagtccctgagattgtagcgttgtggaaaaaggatctccagaaggtaaacccaaaagcagcggagtccctggctgatcctaatgagtacccaaacttatttgaagactggcagattgctctgaatgtagaagctgctgttgctccgaaaagggttatctatccaccggctgaggagtacatgattcatgctgaaaggtcaaatgagaatttagtggaagcttttaaaaacatgcatgtacaggaagagatggtgccagatgataatgaagagtatgttcacgaggttattgaagatggtggagtagaagagagtcaagaagatgctgttgaggttgatgcagaggatgatggagtagaagaaagtcaggatgaagctgttgaggttgaggctgaggattcaactgatggtgctgtccttgtgaatggaaacaatagtgaggaacagtggggtatgaaaaatgaagaaccatcagcataaaagctgtagttgagcaagttgctgactcctgagcaatagtggatcaacgggacagcaactttgcaagtggttaagtttgtaaaggttgctgactgctttctagagtacgaagtccattttctccagcagtattaagcatgagacgtgctctaggattggcttatccacatacgaagttggaccacaattaatcaaaacttcatcattgtgctcgataggaaattttgtgcttccttttttacatatagatcaggtctttaggtctcagaaaacttcatcaaaagtactcttgtttcaccgagatggaaatatgggatgtgattggtgatcggagtggtatttttacaaggtacatagagtagtagcttgtggaattgaggatgttttacatgtgatgtacatcggacttgggagctttgtatcaacagcatacgttttcaacagtctgtgtttagtttagtgaataatttgtgttgagctatgtttttga

SEQ ID NO: 127979 - DNA, 1124 bp, Zea Mays
ctcggcacttctgcagaaccgtccacgccccgcatgcccgcatcctccacctcttcccgtccaactccgctcccacctggcctagaactgcaagcggccaagactggcgatgcttctcagatccatgctcatcaccgctcgctcacctcccagtacctcctccttccgtaataacctggcgtgcagcgtggtgctcctcggcaccgccgccacctaccccaacagcgggcgctctgacaacggcgaccgtggcggtgcgggtgtaggggctggggagtttgtgccctaccggatccagttgatcgcagaggtttccctcgctaagctcttcgcagacttcgccagcccagtcgacacgtctgcgctgatgcagcagaactcgcctcccaacttgtccaagtcgcccgtgccggagacggagaccatcccgccgcaagagacgctaggcggcggcgacgacaacatagatctcgtcgatccgcgtgagagtgttacaggctccgaggaacccggcttgccagaagctgccgttatgaggaaggacatggcggcggtttccaacaaggatggcttgcccaccaggaaggacgacgacgaggatgcagcgtccgagcccaccaccaagccatgtgactggcataacaaatcaataacttgagatacatttcacaagcttagtcccataggttgtaacagataatgtgctaatgtccagcatgatgagtttctatgagcactagctgtgctgagttcatgtatgaggggcaccctcctcgagatcggcatgtcctactctagggcctccagtgtgcagctccttggaaaggttggttactgactgcacttgtttgtgaatacttggagtgaccacaactaagtcacacaatgaaactttactttccagagtgtaacctggtaactggtgaccattcataatatttcatttttatattttggatatcaatatccattaatatgtttccccgttttgtttgtaaatcagccggacttctgatagaatgaactgaaagacttctctaacaaaagtgaagctgaggggagcaagagtgctaaaagtagtccaatgtttttagatgttctcgaatgttatctgaaatatgagg

SEQ ID NO: 127980 - DNA, 692 bp, Zea Mays
gggtggtgcaagaacaagatacaccttccttcggttaactagctacctaattaccagctgccagccatcttgtgtcagcacactgcagtgttcgtttctgtcgggaagagagagaagaggcagcgacgatggatgagcctccgccacagagcgacgacgaccggaagctgtcggccatggagcacgtcaagaaacgccacgaggagaagggattcctctatgcctgcgccttcatgttctgctgctgcttctgctgctacgaggcctgcgagcactgcctggagtgcttctgctgctgcggcaagaaggacgagtgattaaggccggtccaaccagttccgcccgcccaccaatgatgaatgatcggtttgtaattcgtcgtggatttgatttgtttcggttgtgatttgtgaagaactgcgatcaatctggaactgttcgtcgtgatagaacatgcatgttgatgctgtaaataaatgcgattggtttggagcgttaactctacgttaaccgtacgtactcgtagtgagctagcttaggtaccccagtacgtatctgtgactcgtgagcgagttcagtgagacgctgtgcttgtaactgtaaatctgtgaattgtgattgcatgccaacgcactggtactacatgtattacagcccttaattgtgtatatataagtttcttgtgaattgtg

SEQ ID NO: 127981 - DNA, 163 bp, Zea Mays
attttacaaaaaacgtatatacatatatacaatttatattcaatattaaaaacatctatgcatgatgttctactggttagatagcttcacccagtgtctcccgccctttttctatcaggacatgagttcgaaccccacctcctgcaccatttttaatatttta

SEQ ID NO: 127982 - DNA, 3056 bp, Zea Mays
atgtcggcgggaagtgcggccgccgtgcctggcacgaactcggcggcgcacttcgtgctggtcccgatgatggccgcgggccacaccggcccgatgctcgacatggcccgcaccctctccgggcgaggcgcgctcgtcacgttcgtcacgacgcccctcaacctgccccgcctcggccgcgcccctagcgacggcgcgctccccatccgcttcctgccgctccgcttcccctgcgccgaggcaggcctccccgagggctgcgagagcctcgacgcgctcccgggcctcggcctcctccgcaacttcaacgacgcctgcgccatgctccgcgggccgctcgtcgcgctcctcagggacagggagggcgacgccccgccggcgagctgcgtcgtctccgacgcatgccacccgtggaccggcggggtggcgagggagctcggcgtgccgcgcttctcgttcgacgggttctgcgccttctcctccttgtgcatgcgccagatgaatctccacaggatcttcgagggcgtcgacgacgacacgcgccccgtgcgcgtccctgctttccccatcgacgtcgagatatcgagggcgcggtcgcccggaaacttcacgggtcccggcatgaaggagttcggcgaggagatcatggccgagagcgcgagagccgacggcctggtggtgaacagcttcgcggagatggagcccatgtttgttgacgcctatgaggcggccctcggcaagaaggtatggaccatcgggcctctcttcctggcccccaccatgccgctggcggcgacagcagaggacgccaacgccgtccggtgcgtgagttggctcgactccaagaagccccgaaccgtggtgttcgtaagcttcggcagcctggtgcgctcgtcgctgccgcagctcgtcgaaatcgggcacggcctcgaggcgaccaagcgcccgttcatctgggtggtcaagccgagcaacctcgccgagttcgagcggtggctgtccgaggacggcttcgagtcccgcgtcggggagacgggcctggtgatcagggactgggcaccgcagaaggcgatcctgtcgcacccggcaacgggagcctttgtcacgcactgcggctggaactccgtgctcgagtgcgtcgcggcgggcctgccgatggtgtcctgcccgcacttcgccgagcagttcatgaacgagaagctcgtggtggatgtgctgcgggtcggcgtgcctgtcggcgtcaagggtgccgcgcagtggggcgtggaggcggagggtgtgctggcgacgaggcaggacgtggagagggcggtggctgcggtgatggactgcggggaggagggctccgcgcgccgggcaagggccgccgagctcggcaggaaggctcgggaagccgtggtacacggtggctcgtcgttccggaacgtggcgctgctcatacaacacgtccagcatcgagccagcactagaaatccatggattgaaaagaagccgaacgaccgtagataaatgtgcactaacgcgagtaccacattaataactgtattacccaattgataaaaacattatgtattatttcaaatattcttatcctcctcacatagtcacacggtggccttcatctgctcaacgaagtccaccagaagcgacatgttccgatccgacgagccgccacgcgccacggcgtcccacgctttcctgccgagctcggcggccctcgcctgccgcgctgcccccaccaccccgccgtccatcaccgcctccaaggccctctctacatcctcccgtgtcgccaccacgccctccgtctccacgccccactgcgtcgcgtctttcacgccaacgggcacccccacccgcagcacgtccaccacgagcttctcgttcatgaactgatccccgaagtgcggccacgtcgtcatcggcagccccgccgcgacgcactccagcacggagttccagccgcagtgcgtcacgaaggcgcccgtggccgggtgcgacaggattgccttctgcggcgcccagcccgtgaccacgagccccctgtccccaacgcggcgctcgaagccgtcgtcggacagccaccgctcgaactcggcgaggctggcgggcttcacaacccagatgaacgggcggttgctcgcctccagcccgtgggcgatctccacgagctgcggctgcgacgagcgggccaggctgccgaagctcacgagcaccgcggaccggggcttcttctgctcgagccagctcccgcagcggacagcggtcgcgtcatcagagccagacgtcgcagacaacggcatgttgcgctggaggaagagaggccccacggcccatatcttcttgccgagcgccgcctcataggcatcaacgaagaggggctcgagctctgcgaagctattgacaaccaggccatcggctctcgcgttttcagccatgacctcgtcggcgaacaccttgccgaaacccgagaagttttccggcgaccgcgccctcgacatctcgacgtgtatggggaagccagggacgcgcacggggcgcttgtggtcactgattccctcgaagacgctgtggatgctcatctggcgcatgcagaacgaggagaaagcgcagaaggtctccaacccgagccgcggcacgccgagctcccgcgccaccgcgccagtccacgggtggcaggtatcggaaacgaggccgctcgccggggggtgggcctccctaaggtgcgcaacgagcggcgcgcggagcatggcgcacgcgtcgtggaagttccttaggaagtcgatgcctgggagcgcgtcggcactctcgcagccctcgggtagaccggcctcggtgcacgggaagcggagcgggaggaagcggatggggagctcgccatcgccgggagcgcggccgaggcggagcaggttcagcggcgtggtgacgaacgtgaccagcgcgcctcggcttgccagagcgcgggccatgtcgagcatcggaccagcgtggcccgcggccagcataggcaccagcacgaagtgcggcatcgcgaatccgtgaggacaacacctaga

SEQ ID NO: 127983 - DNA, 1613 bp, Zea Mays
ctctatttcctacaccattcatgcggtgcccgcccgaggtccttggcaggcagctagcttaattagcacgcacgtcgtccatggcgcccacggatgaatcggctgctgatacgccagcgccaccaccgccgccacctcacttcgttatcgtccccctcgtggcgcagggccacaccatccccatggtcgacctcgccctcctcctggcggagcgcggtgcgcgcgcgagcctggtgacgacaccgctgaacggcgcacggctgcgtggcgtcgccgagcaggccgcgcgcgccaagctgcccctcgagatcgtggagctcccgttcccgacggacgtggacggcctgcccccgggcatcgagaacatggaccaggtcacggacaacggccacttcgtccccctgttcgacgctctgcagaagctcgccggcccgctggaagcgtacctgcgagcgcaggcgccgcgcccgagctgcatcgtctccgactggtgcaacccgtgtgcggccggcgcggccagaagcctcgggatccatcgcctcttcttccacgggccgccgtgtttctactcgctctgcgacctcaacgccaccgaccacgggttacgcgagctggccgcggcggcggcggcggctgacgtcgacgacgggcaggagaggttcgtggtgccgggcatgccggtgcacgtagaggtgaccaaggccacggcgccgggcttcttcaactcgccggggtgggaggcgctccggggcgagtgcgtggaggccatgcgcgcggccgacggcgcggtggtgaacacgttcgtgggcctcgagggccagttcgtgtcgtgctacgaggcggcgctcggcaaacccgtgtggacgctggggccgctctgcctccgcaaccgggacgccgacaccatgtcgtcgcggggggcggacggcggcgtcggcgtccgcgtccagcagcacagcgcggtagccgcctggctcgactccaaggataccggctccgtcgtgttcgtcagcttcggcagcctcgcgcggaagctcccgaagcagctgttcgaggtggggcatggcctggaggactccggcaggccgttcctgtgggtggtgaagcaggccgaggcgtccccgccggaggtgcgggagtggctgggggccctggaggcgcgcgcggcggggcggggtctcgtggtgcgtgggtgggcgccgcagctcgccatcctgtcccaccgcgccgtggggggcttcgtcacccactgcggatggaactcgctgctggagtccgtcgcgcacggcatcccggtggtcacgtggtcccacttcgccgaccagttcctgaacgagcggctggcggtggacgtgctcggcgtgggcgtgcccatcggcgtgacggcgcccgtgatggtgttcgacgacgagagcgtggtggtggcgcgtggggacgtcgcgcgggcggtgtcggcgctgatgggccaaggggaagagaccggcgagaggaggcggagagccagggagtacggggagaaagctcacggcgccatggagaaaggaggctcctcgtatgagaacctgacgcagctgatcgagagcttcgggcaagtggaggcaagaaaaggttag

SEQ ID NO: 127984 - DNA, 189 bp, Zea Mays
atgtcttcctcatattaccaacttagtttgctaagaaattatctgtggccttgcaagttggtgtacttcgcacaaaatttagtctgcaaggaatctctatcaggaaagggcgaaggaaagatcatcaaggttggtgacccagtttatgttatggaggtgttcgattcttctaatgaagccccagtctga

SEQ ID NO: 127985 - DNA, 932 bp, Zea Mays
aaaaaaagcgccctcacatggccatataaattatgtgcacctcgacacttatacagttctactcacaggccacacactctatttcctagaccattcatgcggtgcccgcccgaagtccttggcaggcagctagcttagcacgcacgtcgtccatggtgcccaccgaggaatcggctgctgatacgccagcgccaccgccgccgccacctcacttcgttatcgtccccctcgtggcgcagggccacaccatccccatggtcgacctcgccctcctcctggcggagcgcggcgcgcgcgcgagcctggtgacgacaccgctgaacggcgcacggctgcgtggcgtcgccgagcaggccgcgcgcgccaagctgcccctcgagatcgtggagctcccgttcccgacggacgtggacggcctgcccccgggcatcgagaacatggaccaggtcacggacaacggccacttcgtccccctgttcgacgctctgcggaagctcgccggcccgctggaagcgtacctgcgagcgcaggcgccgcggccgagctgcatcgtctccgactggtgcaacccgtgggcggccggcgcggccagaagcctcgggatccgtcgcctcttcttccacgggccgccgtgcttctactcgctctgcgacctcaacgccaccgaccacgggttacgcgagctggccgcgggcgcggcggcggctgacgtcgacgacgggcaggagaggttcgtggtgccgagcatgccggtgcacgtagaggtgaccaaggccacggcgccgggcttcttcaactcgccggggtgggaggcgctctagggcgagtgcgtggaggccatgcgcgcggccgacggcgcggtggtgaacacgttcgtgggcctcgagggccagttcgtgtcgtgctacgaggcggcgctcggcaaacccgtg

SEQ ID NO: 127986 - DNA, 1955 bp, Zea Mays
caccgatggggcggctcctgcaaaacggcttgacatctccaacccaaatttttccaaggaatgcactgggcatccttgccttctggtgttcggtgctcgtggatgagcatagagaggctgagattgtgcatcgtagaagagatcaaaatataggtttacccatatgttctattctagaaaaaaccaagcttacaaaaatatgtcctcacaagtgacaacatcagccaaaatgtttggcaaattttgactgaaaaccctagaaggaaaaaggaacctacttgcggaaagaaagaaaaaaacgccctcccatggctatataaattatgtgcacctcgacacttctactcaggccacacactctatttcctacaccattcatgcggtgcggcccgcccgaagtccttggcaggcagctagcttagcacgcacgtcgtccatggcgcccacggaggaatcggctgctgatacgccagcgccaccaccgccgccacctcacttcgttatcgtccccctcgtggcgcagggccacactccccatggtcgacctcgccctcctcctggcggagcgcggcgcgcgcgcgagcctggtgacgacaccgctgaacggggcacggctgcgtggcgtcgccgagcaggccgcgcgcgccaagctgcccctcgagatcgtggagctcccgttcccgacggacgtcgacggcctgcccccgggcatcgagaacatggaccaggtcacggacaacggccacttcgtccccctgttcgacgctctgcagaagctcgccggcccgctggaagcgtacctgcgagcgcaggcgccgcggccgagctgcatcgtctccgactggtgcaacccgtgggcggccggcgcggccagaagcctcgggatccgccgcctcttcttccacgggccgccgtgcttctactcgctctgcgacctcaacgccaccgaccacgggttacgcgagctggccgcgggcgcggcggcggctgacgtcgacgacggggggcaggagaggttcgtggtgccgggcatgccggtgcacgtagaggtgaccaaggccacggcgccgggcttcttcaactcgccggggtgggaggcggtccggggcgagtgcgtggaggccatgcgcgcggccgacggcgcagtggtgaacacgttcgtgggcctcgagggccagttcgtgtcgtgctacgaggcggcgctcggcaaacccgtgtggacgctggggccgctctgcctccgcgagcgggacgccgacgccatgtcgtcgcggggggcggacggcggccagcagcacagcgcggtagccgcctggctcgactccaaggagaccggctccgtcgtgttcgtcagcttcggcagcctcgcgcggaagctcccgaagcagctgttcgaggtggggcatggcctggaggactccggcaggccgttcctgtgggtggtgaagctggccgaggcgtccccgccggaggtgcgggagtggctgggagccctggaggcgcgcgcggcggggcggggtctcgtggtgcgtgggtgggcgccgcagctcgccatcctgtcccaccgcgccgtggggggcttcgtcacccactgcggatggaactcgctgctggagtccgtcgcgcacggcgtcccggtggtcacgtggccccacttcgccgaccagttcctgaacgagcggctggcggtggacgtgctcggcgtgggcgtgcccatcggcgtgacggcgcccgtgatggtgttcgacgacgagagcgtggtggtggcgcgtggggacgtcgcgcgggcggtgtcggcgctgatgggcgaagggaaagaggccggcgagaggaggcggagggccagggagtacggagagaaagctcacggcgccatggagaaaggaggctcctcgtatgagaacctgacgcagctcatcgagagcttcgggcaagtggaggcaagaaaaggttag

SEQ ID NO: 127987 - DNA, 196 bp, Zea Mays
ccgttttcgtaataacacatcctgtttctgtcccgttttccgtatatcccgaaaaatatgaaaacggtcggaaaaatctagtaaacggtaccgagaatttaccgaattttaccgaccatttacatccttacccacagcaaggccatccgctcgatcattttgcattattgcccaccagttccaccaccaccaccac

SEQ ID NO: 127988 - DNA, 93 bp, Zea Mays
cattttcactattgcagcagcatctctactactatttgtttttttgcattataaatgtattttatcatattgatactgtagcaacgcacgggc

SEQ ID NO: 127989 - DNA, 2009 bp, Zea Mays
cggcggggcggggcggggcgaatccctgactttcttctccacgccgtgctctgcttcgagtgaggcctggttcagattttacaggggttcggttcgatctggtgtccgacggaggcggcggcggcggctcctctgctgttcgattgagggagaggggccatggaaaacccggcgccgccgaccaacccggcctccgccacgccgtcgccgtcgcggcagctgccggacttccagcagtcggttcgtctcaagtacgtgaagctggggtaccattacctcatcacccacggcatgtacctgctgctcaccccgctgatggtgctcgtggccgtgtacctctccacgctctccccgcgcgacgtcgccgacctgtgggcgcacctccgcctcaacctcatctccgtgctcgcctgctccacgctcctcgtcttcctcggcacggcctacttcctcacccgcccgcggcccgtgtacctggtcgacttcgcctgctacaagcccgggccggagcgccggtgcacgcgcgacaccttcatgcgctgctccaggctcaccggctgcttcaccgacgccagcctcgagttccagcgcaagatcctggagcgctcggggctgggcgaggacacgtaccttccccccgccgtcacgcgggtgccgcccaacccgtccatggacgaggcgcgcgcggaggcgcgggaggtcatgttcggcgccgttgacgagctgctcgccaagacgggggtcaagcccaaagacatcgggatcctcgtggtgaactgcagcctgttcaacccgacgccgtcgctgtcggccatggtggtcaaccactacaagctgcgcgggaacgtggtgagctacaacctcggcgggatggggtgcagcgccgggctgctgtccgtggacctcgccaaggacctgctgcagacgcacccggggtcgtacgcgctggtcatcagcacggagaacatcacgctcaactggtactcggggaacgaccgctccaagctggtgtccaactgcctgttccggatgggcggcgccgcggtgctgctctcgaatcggcggtccgaccggcggcgggccaagtacgagctggtgcacacggtgcgcacgcacaagggcgcggacgaccggtgcttcggctgcgtgacgcaggaggaggacggcgagggcgtcgtgggcgtgtcgctgtcgagggacctgatggcggtggcgggcgacgcgctcaagacgaacataacaacgctgggcccgctggtgctgccgctgtcggagcagctgctgttcatggcgacgctggtcgccaagaagctgctcaagatgaagaaggtgaagccgtacatcccggatttcaaactggcgttcgagcacttctgcatccacgccggcggccgtgccgtgctggacgagctggagagcaacctggcgctcacggattggcacatggagccgtcgcggatgacgctgcaccggttcgggaacacgtccagcagctcgctctggtacgagctggcctacagcgaggccaaggggaggatccggcgccgccaccgggtgtggcagatcgcgttcgggtcagggttcaagtgcaacagcgccgtgtggagggcgctccggtcggtgaacccggcggaggagacgaacccgtggatggacgagatcgacaggtttcccgtggatgttcccaaggtctctaaggtttcaagcgactgaaatgcattgctagttgcgtgaatgatggagcttgcaattgtttggatagaagatctggttggaatttttcatagttcattactatatagttgtaggagataggaaaggcgatcgacttctctaatcttgaattatacatctgttaatgttgtttctgtatggcactcggtccctggcctatctatatagttgactgctcggtgttctgacagttctactatatctgttcattctccaactgttgatcactgttcttccacaaatgaaccatctgaacgatttgttggcccttcggc

SEQ ID NO: 127990 - DNA, 1863 bp, Zea Mays
gaacacggtttaacaaacaccctacccaaaggggcggaaaccaagccgccctgaccgccagacccaagccaacaagcaagagcattactactgcttccgaccgaaacctttcttggaacgcaagaaggatccccaccccgaccgacctaccctaatcggcgatggcgacggtggcgatggacatctcgaagcccactccagtggcgtccggcgacgaggccgcggcggcggccaaggggaggagcggcggagggggcgaggggctgcggcagtactacctgcagcacatccacgacctgcagctccagatccggcagaagacccacaacctcaaccgtctcgaggcccagcgcaatgacctcaactcccgagttagaatgctcagggaagagttgcagttgcttcaagagcctggctcatatgttggtgaggtggtgaaggtcatggggaaatcaaaggttctggtgaaggtacaccccgaaggcaaatatgttgttgatatagataagagcattgatatcacaaagatcacaccttcaacaagagtcgctcttcgtaatgatagctatatgctccatctgatcctaccaagcaaagttgatccattggtcaatctcatgaaagttgagaaggttcctgattctacatatgatatgattggaggccttgaccagcaaattaaagagatcaaagaggtcattgagcttccaatcaaacatccggaactatttgagagccttggaattgcccaaccaaagggtgtcctcctttatggacctccaggcacaggaaagacattgctggcacgtgcggttgctcatcacactgactgcaccttcatcagggtgtctggttctgaattggttcagaagtatattggtgaaggttcccggatggttcgggaactctttgttatggccagggaacatgcgccatccattatatttatggatgaaattgactctatcggatctgctagaatggagtctggaactggcaacggtgatagtgaagtgcagcgtaccatgcttgaacttctaaaccagcttgatggttttgaagcttcaaacaaaattaaggttttgatggcaacaaacagaatagacattttggatcaagcccttttgaggcctggccgcatagacaggaagattgagtttccaaatcctaacgaggactcacgtttcgatattctgaagatccattcaaggaaaatgaacttgatgcgtggtatcgatctgaaaaagatcgcagaaaagatgaatggggcctcaggagctgagctcaaggccgtctgtacagaggctggaatgtttgctctccgtgagagaagggtgcacgttacacaggaggacttcgagatggcagtggccaaggtgatgaagaaagacacggagaagaacatgtccctgcgcaagctctggaagtgaggctcatgccttgatgtacccaccgccacctttcacggcctctccctgaacggtgtaacggcatgctacggaccttttgcgacgtgccttgcatgcctgtgtttaaaggtttccttataacggttctaatatgttgttgccaagttgaattcatcagatcagctaggttacggtgaaccctgcataatagttactgctctcgtgtgtagcatgcattgcgatgtcgtggcccacacccaaattctcgtgtgtagcgaggggatggtgatagattttgccatcgagtggagccttgccgacaacgcgaatagaggaaaaagagagcgcgcaccggtagctcaggttttgaacggtgaacagttgctcgacctttgcttgaatgattgatagcaaaaagatagatgatttgaaatgtatggaaactcagtttgac

SEQ ID NO: 127991 - DNA, 1404 bp, Zea Mays
gacctaccctaatcggcgatggcgacggtggcgatggacatctcgaagcccactccagtggcgtccggcgacgaggccgcggcggcggccaaggggaggagcggcggagggggcgaggggctgcggcagtactacctgcagcacatccacgacctgcagctccagatccggcagaagacccacaacctcaaccgtctcgaggcccagcgcaatgacctcaactcccgagttagaatgctcagggaagagttgcagttgcttcaagagcctggctcatatgttggtgaggtggtgaaggtcatggggaaatcaaaggttctggtgaaggtacaccccgaaggcaaatatgttgttgatatagataagagcattgatatcacaaagatcacaccttcaacaagagtcgctcttcgtaatgatagctatatgctccatctgatcctaccaagcaaagttgatccattggtcaatctcatgaaagttgagaaggttcctgattctacatatgatatgattggaggccttgaccagcaaattaaagagatcaaagaggtcattgagcttccaatcaaacatccggaactatttgagagccttggaattgcccaaccaaagggtgtcctcctttatggacctccaggcacaggaaagacattgctggcacgtgcggttgctcatcacactgactgcaccttcatcagggtgtctggttctgaattggttcagaagtatattggtgaaggttcccggatggttcgggaactctttgttatggccagggaacatgcgccatccattatatttatggatgaaattgactctatcggatctgctagaatggagtctggaactggcaacggtgatagtgaagtgcagcgtaccatgcttgaacttctaaaccagcttgatggttttgaagcttcaaacaaaattaaggttttgatggcaacaaacagaatagacattttggatcaagcccttttgaggcctggccgcatagacaggaagattgagtttccaaatcctaacgaggactcacgtttcgatattctgaagatccattcaaggaaaatgaacttgatgcgtggtatcgatctgaaaaagatcgcagaaaagatgaatggggcctcaggagctgagctcaaggccgtctgtacagaggctggaatgtttgctctccgtgagagaagggtgcacgttacacaggaggacttcgagatggcagtggccaaggtgatgaagaaagacacggagaagaacatgtccctgcgcaagctctggaagtgaggctcatgccttgatgtacccaccgccacctttcacggcctctccctgaacggtagggcctcaaagtgccttattttttgttatcactacaacccacacatatccaatgcatacgct

SEQ ID NO: 127992 - DNA, 2046 bp, Zea Mays
tgccagtgccagtgccacccgccccgcagccctaacttgctggcggccgcctataaaatgctggaacactcgcctcgccgtcgccggggaccaaaccaactcgagtcatcgagttccacagctctcgcgtcgcgcgcagccaatccctctccctccggcctacacagcccacaactcccttctccatctctctctctctctctcgcccgtgtcgccccctgtttgtgtacaaccccatggcgacccacgccggcgagaacggcagcgggcacgagaacggcggcgggcacgcggagtggcggttcgcgcgggcggcgaaggagggcgcgctggccgttgcgggggacaagatgagcatccgggcggtgcggttcaagatcagcgcgagcctggacgcgcgcgacccgcggcccgtgctgccgctggcgcacggggacccctcggtgttcccggccttccgcaccgccgccgaggccgaggacgccgtggccgccgcgctccggaccggcaagttcaactgctaccccgccggcgtcggcctccccgaagcccgccgtgctctggcggagcacctgtcgagcgaccttccatacaagctgtcgagcgacgacatcttcgtcaccgccggaggcacgcaagccatcgaggtggtggtctcagtcctcgcgcagccgggcaccaacatactgctcccgaggccgggctatccgaactacgaggcgcgcgcagggctgcacaacctggaagttcgccggttcaatctgatccccgagagagggtgggagattgacatcgacggtctggagtcgatcgccgacaagaacaccaccgccatggtcatcataaaccccaacaacccttgcgggagtgtctacacccgagagcatttggccaaggtcgcggaggtggcaaggaagcttggaatactggtcatcgctgatgaggtgtacggaaatctggtgtttggggacacccctttcgtccccatgggtgtctttggccacattgcccctgtgttgaccataggatcactgtccaagagatggatagtgcctgggtggcgacttggttgggtggccgtatgtgatcccaacaaggttctgcaagaaaccaagatcattgcatcgatcacaaacttccttaacgtttcaacagatccggcaacttttgttcagggagcgcttccccatattcttaagaacacaaaggaagattttttcaagaggatcattggtctgctagcggaaacatcagagatatgtttcagcggaataaaggacatcaagtgcatcacatgccctcacaagccagaaggttccatgtttgtcatggtgaaactaaatttgtatcttttggagagcatccatgatgatattgatttttgttgcaagctggcaaaagaagagtccgtgattttgtgtccagggagtgttttgggaatggaaaactggatccgtatcactttcgccattgattcatcttctcttcttgatggtcttgagaggctgaaatctttctgccaaaggcataagaagaagaatttgcttaatggccattaactatattcgacttcaaagttgttacccacttccatcgttttccactgtatcatcaacaaaagtgtaacattgaaatccctcagaagtaataaagttaatgtttacatatgaggatatgcatgtcagtgtacatttttagtcaccttaatcctctgttttgaaatctttcgattttgcatttgtttcagttttccattacaatgttcttttcttttaatttgacatcacttataagtgtggtgatggtgacacctgttccaatgtactaaaggttacaattggggacaaattattatgtagtatgtcggttgtgaagtttgaagacagccgaaagttctatttttgtgttgagagaaaatttacatctccaatatttgatgacataattaaggatgaattcttatttggcaaatttaaattgcttagagagatcaaatgtattgataaatggactggactcataagtcgttataagaaaataccaaaa

SEQ ID NO: 127993 - DNA, 468 bp, Zea Mays
tcgaatagaaacgaaatatttttaatccgcttttcggttggtggtgcctggcatctaccgtgcggagggggaagagggagaggccaggagaggaaagcctgcagccaccatggattccgacctctggatctcgcgtctcacggccgccaagcggcagtttgcgctgcagcgcgcgcagcgccagcacgccgccccggcatcccatcacgatcgatttgggtatgatgatatcgaacctgaggatgatttgcactcagacttcccatgcccttactgttatgaagatcatgatgttgcttctctctgcgcccatttggaggacgagcaccctttcgagtctaaaattgtgtcttgcccagtttgctcagctaggatttcgaaggacttggtggatcatataacccttcagcatggctacctatttaaaatatccttcttagatgattatatctttttagacatgtttta

SEQ ID NO: 127994 - DNA, 1231 bp, Zea Mays
gaatagaaacgaaatatttttaatccgcttttcggttggtggtgcctggcatctaccgtgcggagggggaagagggagaggccaggagaggaaagcctgcagccaccatggattccgacctctggatctcgcgtctcacggccgccaagcggcagtttgcgctgcagcgcgcgcagcgccagcacgccgccccggcatcccatcacgatcgatttgggtatgatgatatcgaacctgaggatgatttgcactcagacttcccatgcccttactgttatgaagatcatgatgttgcttctctctgcgcccatttggaggacgagcaccctttcgagtctaaaattgtgaaacatcaaagagtacgcagagttactggtaatggcaaccacaatctctcctatgcagggagagatcttcaactgcaagagacctacttaaaggtgcttcttggaaatagcagtcgaagcagcagtaccaatgcatcaagtacagtcaccgattcactgctaccctcactagttttaaatttatcatcaccagaagtagaagacgcatcaaagttttcagctcctgctgtggtggaaaataattggtttaaacgatcactgccttcaaaaacttggaaattaagaactgttgattccacccttagtcatgaagagagggagcgtaggaggaggagagctgctgtgagatcagcttttgtccagcatctccttgtcaccaccatttttgaagactagcagatcaagcacagctcatgcaaaggaatcttgtgggcgggccttttgcccactcatttatctggatggataaggcactaattatcttggataccatcacgctgttcatccggtctgctgggtaaccatgacaggaaaaatgaagcagcgggcgtcttaccttatatatgttctctggaagcagctgacatttgttttctggatcatattcataattctatgtaggctgtgacaggaatctctatagtagagccatgatttttttttggttgggtttcagcctgcgttggagaatatgcccaatttttttttttggagaatatgccttatctggatggataaggcactaaacatttgaagattatatttcggagggtggagaatatgacaatttgatttatatcactaaacatttgaagattatgtttcggagtttggtacttgtttcttcttaatattcttaatataatgatgtgtgtttctttggt

SEQ ID NO: 127995 - DNA, 1295 bp, Zea Mays
ttttaatccgcttttcggttggtggtgcctggcatctaccgtgcggagggggaagagggagaggccaggagaggaaagcctgcagccaccatggattccgacctctggatctcgcgtctcacggccgccaagcggcagtttgcgctgcagcgcgcgcagcgccagcacgccgccccggcatcccatcacgatcgatttgggtatgatgatatcgaacctgaggatgatttgcactcagacttcccatgcccttactgttatgaagatcatgatgttgcttctctctgcgcccatttggaggacgagcaccctttcgagtctaaaattgtgtcttgcccagtttgctcagctaggatttcgaaggacttggtggatcatataacccttcagcatggctacctatttaaattgcagaaacatcaaagagtacgcagagttactggtaatggcaaccacaatctctcctatgcagggagagatcttcaactgcaagagacctacttaaaggtgcttcttggaaatagcagtcgaagcagcagtaccaatgcatcaagtacagtcaccgattcactgctaccctcactagttttaaatttatcatcaccagaagtagaagacgcatcaaagttttcagctcctgctgtggtggaaaataattggtttaaacgatcactgccttcaaaaacttggaaattaagaactgttgattccacccttagtcatgaagagagggagcgtaggaggaggagagctgctgtgagatcagcttttgtccagcatctccttgtcaccaccatttttgaagactagcagatcaagcacagctcatgcaaaggaatcttgtgggcgggccttttgcccactcatttatctggatggataaggcactaattatcttggataccatcacgctgttcatccggtctgctgggtaaccatgacaggaaaaatgaagcagcgggcgtcttaccttatatatgttctctggaagcagctgacatttgttttctggatcatattcataattctatgtaggctgtgacaggaatctctatagtagagccatgatttttttttggttgggtttcagcctgcgttggagaatatgcccaatttttttttttggagaatatgccttatctggatggataaggcactaaacatttgaagattatatttcggagggtggagaatatgacaatttgatttatatcactaaacatttgaagattatgtttcggagtttggtacttgtttcttcttaatattcttaatataatgatgtgtgtttcttt

SEQ ID NO: 127996 - DNA, 739 bp, Zea Mays
atagagtgttgttgtttctccgctatctgttcgcacgctcgagtttgtctcctagcacggcgcgctgctgctggcgacctcgcgttcgccactacgtccgtgcgcttggccaacagcatcccccttcgtcgacgggacaacttcgacgatgctggtatagcggcgttgtagctggcgatcatgcgctcgcctccgcgtccaccactaccacgacctccacgcgctcggccagcaacatccacttcggcggcgggagaactccgacaatgttggtatggcagacatgggataggcatccttgcccgccaagagctgctgggcaggattgtcaaacaacgacgacatcgtgtactgctctgttcttgcctcctgtactcgtatcctgactgcagcgtcagtcatcttctgtgctcttccggcgaacctccgttgcttgaaccaccatggcgcttattagccatgggcgtaaaaaagcaactccccaagcaatgtagtccacccgttcgacgaaatgtttgagaaggaaaatagagatgagaacatcaaatatatatgtccgtgtgtaatacgcatttatttttacaaattatagtcgaataacattttcatcagtaaagaaggattagtaatgttgattacataatataattattttaatccgtccataattcaatttcgacatcacattaatgtttttttttggtttgcatggccgacaaggaaaaaaattaataaaaaa

SEQ ID NO: 127997 - DNA, 1302 bp, Zea Mays
gtagatatgataggggtggcttttgcatttgcacgcaaaaacactgaccagcggtagctagcttagctagctagtacgtagagttcttcatccacagtcgtccacaccccacccgcgggccagcacttcaatggcggcggcgcctcctgccgcagaggcagctcttcttctcctcctagcattactggcactcgccgcggtggctctgagacgcggcgatgcgctgagcctggatttgtacgacgtgacctgcccggaggtggaggcggcggtgacggcggccgtgcggcaggccatggccaacgaccgcacagtggcggccggactcctccgaatgcatttccacgactgcttcgtgaggggctgcgacggctccgttctcctggactccacggccaccgtgacggcggagaaggacggcccgcccaacgcgtcgctgcacgccttctacgtcatcgacaacgccaagcgtgccgtggaggccctctgccccggcgtcgtctcctgcgccgacatcctcgccctcgccgcaagggacgccgtcgcgctgtccggtggtccgtggtgggtggtgcccgtggggcggcgggacgggcgcgtgtccctggccaacgagaccacggcggcgctgccggggccgacggccagcttcgaccagctgaagcaggcgttccacggccgcgggctgtccaccaaggacctggtggcgctgtcgggcgcccacacgctgggcttcgcgcactgctcctccttccagaaccgcatcctccgagcccagcagggcgtcgccgccgccgacgacccttccctcagcccctccttcgccgccgcccttcgccgtgcgtgccccgccaacaacaccgtccgcgccgccggctccgccctggacgccacctccgcggccttcgacaacacctactaccggatgctgcaggccggccggggcctgctctcctccgacgaggcgctgctcacgcaccccaagacgcgcgcctttgtcgcgctctacgccgcgtcgcaggaggcattcttcagggcctttacaaaatccatgctgcggatggccggcctcaacggaggccaagaggtgcgagccaactgcaggcgagttaacccatcatgatccatcctatccatgatgccatcatcattccattccattctcgtcctccgatcctcctcgtctatacactactactagtatattaattgtactattgtactgtacgtactgcctcctctgcctgtaccattatattatacagtattcgtcgtccgcacgtatttgcatcgcatccagtg

SEQ ID NO: 127998 - DNA, 1571 bp, Zea Mays
aaacaacaactacttcctagtataaagtgacagtagcgggggagaagggaaccgaaaccaagcaacccaatccaaaccagacaagcaaggaatcccccgatggctcatcgcgttctcctcctcctctctctcgcgtcggccgccgcggttgccgccgccgtcgacgcggaggacccgctgatccggcaggtggttcccggtggagatgacaacgatctggagctgaacgcggagtcccacttcctgagcttcgtgcagcggttcggcaagtcctacaaggacgccgacgagcacgcgtaccggctgtccgttttcaaggccaacctgcgccgcgcgcgccggcaccagctgctggacccgtcggcggagcacggcgtcactaagttctccgacctcacgccggcagagttccgccggacctacctcggcctccgcaagtcccggcgcgctctcctcagagaactcggggagtcggcgcacgaggcgcccgtgctccccaccgatggtctccccgacgatttcgactggagggaccacggcgccgtcggccccgtcaagaaccagggttcgtgcgggtcgtgctggtcgttcagcgcgtctggagcgctggagggtgcgcactacctcgcaactggcaagctggaggtgctttcggagcagcagttcgtcgactgtgaccacgagtgtgattcatcggagcctgattcatgtgattcgggttgcaatggtgggctaatgacgacggcattcagttatctccagaaggccggtggccttgagagtgagaaggattacccttacactgggagtgatggcaaatgcaagtttgacaagtccaagattgttgcttcagttcagaacttcagtgttgtgtctgtggacgaggctcaaatttctgctaacctcatcaaacatgggccattggcaatcggcatcaatgctgcctacatgcagacatacatcggaggcgtgtcatgcccatacatctgtggcaggcaccttgaccatggtgttctccttgttggatatggtgcttctggtttcgcccccattcgcctgaaggacaagccttactggatcatcaagaactcgtggggcgagaactggggggagaacggatactacaagatatgcaggggttccaacgttcgcaacaagtgcggcgtcgattccatggtctctaccgtgtccgcagtccacgcctcgaaggagtagactctggtcagcggtgataatcgtgattccatatattgtagaactataatccctgctagtaatccatttgtgctgtttatgtatcgaaggcagcaaagatgtgtgaagcggcaatgggatgcttgctgtaaggtaatatgtttggcttgctaggcatgctacacgctatttggatgtagcaacgttatcaccagctgtatacgctttttaatcgacaacatttgaataatatgtacataacattatgttgtgctctgttctctgtctgtttgatgtgcttatgggttttgatctgtagcttacataacctgattgtgaaaactcaaacatactgccgagcccgatagatcctacgg

SEQ ID NO: 127999 - DNA, 1788 bp, Zea Mays
gtaggccctaaaaagcggggcacttcgtagccgcaagcattcttccttccttctccattccatcggtgaccatggattgaagacattgatcggcttctctggagaagagctcataggcaatggcaaccgcaaggaaggatcctcagcaggttgataaagtcaacctgaaacccagcgagtctggcaaaggggtagtacggcgtgcaaggtctgtcccgacctctccggatcgcagatcgtccccatccccggccccagtctcagacaacgccagccgaccggcatcatcactcaacactcgcacgacctcgtcccggtccacaacaacatctagctcggcggcctcttcaagccacgggaagacgatgcgctccgcttcgtcgtccgtgggtggtgcaagtgcaagcgcaaggcagacaaacgcggcgagaaggagagcagagaagcccggtgccacatccgtgtggcctgcggccggcggcgcggttacgaacgcctcgtcgtctaaggatgtggccagcagggcagcaaaatcgccatccaccgccgcgcagaagacgaggcctgctggtgtcgagaaggcagcagcgtcttcttctgtaaagctgaagacgaagcctcagaaaacaacggcaggagctggaaaaactcaagctgcacctcccgcccgtgctcctcctggcacggtaatagcaaagaagagtacgggagccgagaactatgtccccatccagaggacgacgagcgtgccggcggcgagaccaacagagacgctcaagaacgaggaacaggaggtcgacgagctgctgatgcagttcgacgagaaggagagcataagcacctcctccattgaggagcacctgcaagaacggctccctgaccctgtcgatctgaaatccgtggatctcgacagcagcaagacgacgtcctcctcctccagtcaggaggagtgcaaggatcaagaagagaacacgggggacattctggaggagaagcgtgacgggaaggacagcgaagacctgagcagcacaggcgacaaggcttgtgtcgggctcgggagcagtgatataaacatcccgatggaagaagcggttgatgaacctgttaaaccggcggaagctgtggacgaagctgggctgaagagagatgtctgctgttcaccagctgagccaaacgaagccgttggtcagaacgagctcaatgaggctgctgtcgtcggtgaaacgacgactgaaccgaaggaggctgaggatgaagccaagataataaagcaagtcgactgcgaaactgcatcaaaagaagttgctagtactggggccgagtcaagggacgatgccgctactatggaacgcgagccgctggtagtagcagcagcagcagcagcagcaccacaagaagagaaggccaaagctgaggagaagacgacgcagccaactaaggccgtggaatctgccaagtggaggacgaaggatgaagggaggagcaacgaagccacagaggagggcaggggcaagtctaccactactgctgccacccaggagaggaagaacaaggtgatggccttggttgggaggtttgagactgccatgtctggctgagaagagatcagaacgaggtgatgtcaaaagactgctctggctcatgaaaatgtgtacgagtactactcaactgtgcaggcgtggagggttcgtatgtttcgtttcattaattaatgtggctgttgttgttctggaagcgagtgaagattgctgatgcatattgatggcgcttctcctgtttctcttttta

SEQ ID NO: 128000 - DNA, 1847 bp, Zea Mays
gtaggccctaaaaagcggggcacttcgtagccgcaagcattcttccttccttctccattccatcggtgaccatggattgaagacattgatcggcttctctggaggtgcgtgtgagcagctcggaggtcagccgccgagaagagctcataggcaatggcaaccgcaaggaaggatcctcagcaggttgataaagtcaacctgaaacccagcgagtctggcaaaggggtagtacggcgtgcaaggtctgtcccgacctctccggatcgcagatcgtccccatccccggccccagtctcagacaacgccagccgaccggcatcatcactcaacactcgcacgacctcgtcccggtccacaacaacatctagctcggcggcctcttcaagccacgggaagacgatgcgctccgcttcgtcgtccgtgggtggtgcaagtgcaagcgcaaggcagacaaacgcggcgagaaggagagcagagaagcccggtgccacatccgtgtggcctgcggccggcggcgcggttacgaacgcctcgtcgtctaaggatgtggccagcagggcagcaaaatcgccatccaccgccgcgcagaagacgaggcctgctggtgtcgagaaggcagcagcgtcttcttctgtaaagctgaagacgaagcctcagaaaacaacggcaggagctggaaaaactcaagctgcacctcccgcccgtgctcctcctggcacggtaatagcaaagaagagtacgggagccgagaactatgtccccatccagaggacgacgagcgtgccggcggcgagaccaacagagacgctcaagaacgaggaacaggaggtcgacgagctgctgatgcagttcgacgagaaggagagcataagcacctcctccattgaggagcacctgcaagaacggctccctgaccctgtcgatctgaaatccgtggatctcgacagcagcaagacgacgtcctcctcctccagtcaggaggagtgcaaggatcaagaagagaacacgggggacattctggaggagaagcgtgacgggaaggacagcgaagacctgagcagcacaggcgacaaggcttgtgtcgggctcgggagcagtgatataaacatcccgatggaagaagcggttgatgaacctgttaaaccggcggaagctgtggacgaagctgggctgaagagagatgtctgctgttcaccagctgagccaaacgaagccgttggtcagaacgagctcaatgaggctgctgtcgtcggtgaaacgacgactgaaccgaaggaggctgaggatgaagccaagataataaagcaagtcgactgcgaaactgcatcaaaagaagttgctagtactggggccgagtcaagggacgatgccgctactatggaacgcgagccgctggtagtagcagcagcagcagcagcagcaccacaagaagagaaggccaaagctgaggagaagacgacgcagccaactaaggccgtggaatctgccaagtggaggacgaaggatgaagggaggagcaacgaagccacagaggagggcaggggcaagtctaccactactgctgccacccaggagaggaagaacaaggtgatggccttggttgggaggtttgagactgccatgtctggctgagaagagatcagaacgaggtgatgtcaaaagactgctctggctcatgaaaatgtgtacgagtactactcaactgtgcaggcgtggagggttcgtatgtttcgtttcattaattaatgtggctgttgttgttctggaagcgagtgaagattgctgatgcatattgatggcgcttctcctgtttctctttttaatgaagtgactctcctgcatggtcc

SEQ ID NO: 128001 - DNA, 456 bp, Zea Mays
atggacaaatcttggatcaatgcaacactatttagcaagccacacctagaaggagttagtgagttcatgaagcttgtaatagagcgatttaatgcgaatgaagagatactttgtccatgccgcaagtgtttgaatcggcttagtggacatagaggacaggtggaggaccacttatatcttcatgggatggctagtacatacactaggtggatgtatcatggagaagccatggatgacataattaatgaaaatggtgaccacgaggatgaacatgtgagtttcaatgatgatgttggtatgaatcaagatgaagaagaacctgatgataggattaatggtatggtagaggagttatacacagccgaagatcaagataaaaggaaatctatgtttggagatatactaaaggagatgaaacaagaactttatcctggtgcaacttatacaagattttct

SEQ ID NO: 128002 - DNA, 883 bp, Zea Mays
atatgatggatattttagaagcataaaccatagtagttgttggtacaaaaacgatacttttattctagcagcacaagcaactaaggtattttatttgcaagacatcaagaattctggaagctggaagattgttcaaaaatttacacataggcacttgtggtgtgtggctgaaaatgacattgatgaaagacctagttcctcaggactatcataccaagatgatacatgtgttggttctgaagtgcaagttaatgaaggagatatggagataactggacatcaggatgctgacgaatctattaatgtcagtgcaagtgtggttgatgaatttcgggtgcaacgagaagaggaagtggaagagtatgagacaagcgacaatgaagatgaaactggatggcaatatgctagtgacaacgaagaatcaataactattgtcaatgacgatgatgatttcagcgataacgagtagcatgttttttgtttgatctgagagaagttaactctatgtcgtattttgtttgatttttaagaagtgaactggctactgttatttgagagaagtgaactgtatgctacaatttgtttgatttttaagaagtgaactagctactgttatttgagagaagtgaactatatgctgcaatttgtttgatttttaagaagtgaactctaactgatgtaatactactgctacaccgaatacacatttcagatttcagaacatacacatttcataacgcatttctatgcaactcagatttcagaaaacacacatttcagaacacatttgtgtgcaccacatatttcacatttcagattgtagaatacatttcaggtttcagaacatagatccagccatgcatcagtagtgcacagcctgttt

SEQ ID NO: 128003 - DNA, 1086 bp, Zea Mays
atccaaccgcctggacgccaccgccccgccccaccttggcgccgccgctccatccaactgcctggacgccaccgccctgccccaccttggcgccactgctccatccaactgcctcgacgggtgtctgctcctcactacctggccgtgttcaagatgccccctggaaggatggatggggcaaggacacgcaaagaccttggtgaggtgccaattactgagtatgaaaaggagagggctttaaatgtgatgaggaacaacaaaatgttgagtagtcttggtataactggattaacatcacttattcgatcaagtagtacaaggaagaactctatcgctcgtgaagactttgatccattgtatgaacctgatcatagtgaggacaatgatcatcatgtggctgttcaggccatgcaggatgaacctttctgcattgaaagaaggaccaccaacatgtctactggttttggaggaacaaaaggatccaagagagtggtagcacctaatgtagaagaccaagttggtagagtaactaggcagaagacaaaggaactatccttagttgagaaagatatacatggtcaaatagatgtcatgacagataaatggataaggggaaaaagtatgggcaaacaattggaaaggataagtcgaggcttaaacactaagatcccattggtcatcactgaagggaatagacgtcctgaggttcctatgcaagctgcaatgcttgcatcagaaggaggaattgtaattaggcaacatatgccgatcctaacacactggaaggagtacaagaatgacaaatcctatttggaagacttcgtcggtagaattggtggtcaatttgccatagacaccaaaaacaaagatgtcaaatatgcatgtgctgatttgatgaggtgtaatcagcgacaaatgagatataagctcaagaaggcttactttaatggtgtggcagctgacaaagtgagaacaacatcaccgttgagtactatgacagatgagcaatggatgcaactcgtcaatatgtggtctaccccaaagcacaagggtatagaattactagttgcaatttgtgttttctag

SEQ ID NO: 128004 - DNA, 1053 bp, Zea Mays
atccaaccgcctggacgccaccgccccgccccaccttggcgccgccgctccatccaactgcctggacgccaccgccctgccccaccttggcgccactgctccatccaactgcctcgacgggtgtctgctcctcactacctggccgtgttcaagatgccccctggaaggatggatggggcaaggacacgcaaagaccttggtgaggtgccaattactgagtatgaaaaggagagggctttaaatgtgatgaggaacaacaaaatgttgagtagtcttggtataactggattaacatcacttattcgatcaagtagtacaaggaagaactctatcgctcgtgaagactttgatccattgtatgaacctgatcatagtgaggacaatgatcatcatgtggctgttcaggatgaacctttctgcattgaaagaaggaccaccaacatgtctactggttttggaggaacaaaaggatccaagagagtggtagcacctaatgtagaagaccaagttggtagagtaactaggcagaagacaaaggaactatccttagttgagaaagatatacatggttcgactgcaaatacagatgagcacacattgatttctgccaatttttctgcacaccatgatgacgagattcagatgtgtgatgaagggaatagacgtcctgaggttcctatgcaagctgcaatgcttgcatcagaaggaggaattgtaattaggcaacatatgccgatcctaacacactggaaggagtacaagaatgacaaatcctatttggaagacttcgtcggtagaattggtggtcaatttgccatagacaccaaaaacaaagatgtcaaatatgcatgtgctgatttgatgaggtgtaatcagcgacaaatgagatataagctcaagaaggcttactttaatggtgtggcagctgacaaagtgagaacaacatcaccgttgagtactatgacagatgagcaatggatgcaactcgtcaatatgtggtctaccccaaagcacaagggtatagaattactagttgcaatttgtgttttctag

SEQ ID NO: 128005 - DNA, 195 bp, Zea Mays
atgcagtttaatcaacaattgagaaccaaatatgtaccttatggatacttcagcaaagacacaattaaggtaataaggcctactggagtttctgcatactcaagggttcatgggtatcccaggatcccagcagtggaatctacaagacaattttactgtgggactgaccagaaagcaaaagctctaagatcttaa

SEQ ID NO: 128006 - DNA, 1241 bp, Zea Mays
cgtgagtcggggactcgggaaccggagcacacaccaaaacccccagtgccgccggcggacgccctccagtttccggtcttcactaactccccgttttccgtactgctgcggcgcctcggcagtcggcaccacagccggcaagatgccccccttccgaatgccttcccacttcctcgcgcttccgctcctactcttgctgctcctccaggcgccgtccccggaggcggccgagtctacgccggggacccggacgcgcaagatcggcagctcgggggcgtcctcggtgttctcgctctttaacctcaaggacaagagcaagttctggactgagtcgatcatccgtaaagagttcgatgacttggaaggttctgcgtcgcgggactctagcaaaaacggcctgctcaacttcacaagagctggtaatattgcaaactatttgagcctggcagaggttgattccatatatcttccgatccctgtgaacttcatctttattggatttgatggaaatggacggcatgagtttaagttggggcctgaagaactggagcgctggtttacaaaaatagatcacatatttgagcacacaagaatccctccagttggtgaagttcttaccccgttctataagactactgttaagaaacttcagcattatgatcttcctttagtcagccatgtgaaccacaatttctctgtgcatgccatacacatgggagaagatgtcttatctgtttttgagcatgctataaaagttctatcctgtaaagatgatctcgtggattccagagaaaatgaagagatttttttgcaagtggatagtgctcaaatggaacatatattttcaactcttgttgatcaccttcagatacaagaggcttacaatatctttgttctgaaccccaagcctattggcaagaggattaattatggttatcggtgagtttgaacacttctgttacaatgaaccatgtgtaactgatgcaacatggcagaaagggcagaccttagtcacaaggttcccggaacgttgggaatgaggaacgggaacgaggaacacggtatgtctgttaaagcaacatggaacggagatgggtatacagctgatccacgttcattcgataagtggaacatgttcccaacgatttaggaacgtagttagggaacgattgtaatggaacagggaacgatgagtatattggctctgtgatagcaattatattttcagcctccatccaaaa

SEQ ID NO: 128007 - DNA, 1498 bp, Zea Mays
cgtgagtcggggactcgggaaccggagcacacaccaaaacccccagtgccgccggcggacgccctccagtttccggtcttcactaactccccgttttccgtactgctgcggcgcctcggcagtcggcaccacagccggcaagatgccccccttccgaatgccttcccacttcctcgcgcttccgctcctactcttgctgctcctccaggcgccgtccccggaggcggccgagtctacgccggggacccggacgcgcaagatcggcagctcgggggcgtcctcggtgttctcgctctttaacctcaaggacaagagcaagttctggactgagtcgatcatccgtaaagagttcgatgacttggaaggttctgcgtcgcgggactctagcaaaaacggcctgctcaacttcacaagagctggtaatattgcaaactatttgagcctggcagaggttgattccatatatcttccgatccctgtgaacttcatctttattggatttgatggaaatggacggcatgagtttaagttggggcctgaagaactggagcgctggtttacaaaaatagatcacatatttgagcacacaagaatccctccagttggtgaagttcttaccccgttctataagactactgttaagaaacttcagcattatgatcttcctttagtcagccatgtgaaccacaatttctctgtgcatgccatacacatgggagaagatgtcttatctgtttttgagcatgctataaaagttctatcctgtaaagatgatctcgtggattccagagaaaatgaagagatttttttgcaagtggatagtgctcaaatggaacatatattttcaactcttgttgatcaccttcagatacaagaggcttacaatatctttgttctgaaccccaagcctattggcaagaggattaattatggttatcggaaaggcttctctgagtctgagatcaatttgctcagggagaacaagaccctgcaagctcggatactccagtctaaaagtgacaacaaactcttccttgatatcgagaagggagtcaatagaaggccgttatatgaaagtcatcctctatcatcattttcatggacccgaactgacagtatggatatgggggattggtcaaagaaatgcaaggaagcattaagcaagtttgagctgctgaaggaagggaagagtaaagaggacattgtttatgaaaaggctgttcagatattacacggtacaaaggatgaggtgcatgacattgttcaaagtgctcttaagtccagtgatttgaagggtctccatgcccaatgtcttacagatatatggataggcagagagaggtttgcttttgttgatctgagtgcagggccatttgcctgggggccttctgttggtggtgatggtgtccgtacagaacttagtctgccaaatgttgcaaagactgtcggggctgttgcaggtattacaaataattttgatctccttagtttcccttag

SEQ ID NO: 128008 - DNA, 2312 bp, Zea Mays
tctcattcaagtgctgtaaacatataacccaaatatgatcatttttttgtgttctcattatttcttttctaagaagtaagacccaaccagggttttttgtccatcattaagtgattgttgctgattgaatacagaagttacagaagaagaagctgaagaaaaattgcaagacacaataagggagaggttttcgtcctttggtgaggattaccatgctgttgatattctattagcagagattgatgtgtatgaactttttgctttcaagcattgtgtgggaagaaggatacagcttgccctttgtaaagaacttgatgagaggatgcatgacctgaaaaaggaactggagggttacaatactggagattttgatgaaactaacaagaagaaagctcttgatgcactgaagagaatggaaagctggaacttattcagagatacttcagtggaacatcatagttacacagtggctcatgattcatttcttgcacaacttggatctatgttatggggctctatgaggcatgtaattgctccttctgcctctcatagagtgtaccattactatgagaagttatcgtttcagttgtattttgtgacacgagagaaagtcaggagtataaagcagttacctgttaatgtaaaatccatcagggagagcctgaattctgtgctattacatcatcaaaactccatgtttagccaaaacatgctgtcattgtcagaggatccatcattgatgatggcattttcaatggcacgtcgtgcagctgcggtgccgcttctattagtcaatggcacctataagtcaactgttagcacataccttgattctgctattctccaacatcagctacagaagctaaatgagcacaattcactgaaaggaaggcattcaaatcacaggtcaacattagaggtcccaatattctggttcatacataatgaacccatattattggacaaacattatcaagccaaggctctctcaaatatggtcgtagtagttcagtcagatgatgattcctgggaaagccatttgcagtgcaatggaagacccatcttatgggatttgaggaaaccggttaaagctgctattgctgcaactgctgagtatgtatctggtctacttcctccacatctggtttatagccatgctcatgaaactgcaattgaggactggacctggtctgtgggttgtaatccctcagctgtgacttctgaaggttcacaactttcagagttccagcaagatgtgattgctcgtaactatattattacttcagtggaggaatccattcaagtaatcaattcagcaattcagcaattggtaatagagcggactactgaaaaaggcttcaaaattttcaaggctcacgaaagtaagatggttgagaagtacaatgccgttgttagcttgtggagaagagtatcggctatgtccaagggattgcgatatggtgatgcagtaaaacttatgtcaatgcttgaggatgcttcaaatgggttttctagtgctgtgaactccaccatttcaagtctgcaccctgtccaatgcacccgcgaaaggaaggtcgacgtgcagctagacttgacaacacttcctgcttttctagctgtatttttgttgctttggtttcttctacgtccaaggagaccgaagcctaagatcaactgaacaccgagccaatgagcagcataggccatagagtttttgtgaatacgcgcatggattacagatggcgctggagcatggcccgggaattccaaaggtccaaaacaccgggtggcagggaacaaggtttcagaagattgcaatcctgacacatccccaagttgtagcagagttggaatgtcatgaaaactttaattcattcagtcctgtcctcgttccgggtttagccaattcttcctcgttccgggtaaggccttgttcgtttgtgtcggattggtgggtcggaacaattcccggccggattgcttctctaatttatataaactttgattagccggaacgattccgggtgcaatccgacgcaaacgaacaagccctaactgagattaatttgtccttgctgtaatgtttagccagtcctgccccgatccggggaactgagagattgtctttatcgcaacattaacggctagcggttagtatcatcttccagtcacctggaatgttactagtacaatccaattgtctgtttcctgccgcttacatgtaaaagtccatactcaagttttacagaaagaaacatgttctgtcatttattacaaaataaagccaaatagtaaaatgttatgtgtacgta

SEQ ID NO: 128009 - DNA, 3039 bp, Zea Mays
gcgagcatgggcattccaagaatggtctccccttcttcctcgcagacgccgccgccgcccaccgcagctgccgcccaccgactgccccgccaccaccgactctccgcggttgttgctgcttcaacaaggagggaaggctatcggagcaggactacggcacccgggcggcgcggtgacggcggagtgggctccatctgggtaaacccgagcgctccgccgcgccccggcgtggccagccgcactctccgccgcctcgttgagctcgacaacctcgacgccgcgctgcgtctcctcctcggcggtccctcctcaacgcccgcgacatcggactcggcgccggagccgccggctgtcatcagctgcaacatcctcatcaaaaagctctgcgcccgccgccgcctcgccgacgcggagcgcgtgcttgaggcgctcaaggcctctggtgctgccgacgccgtctcccataacaccctcgtcgcgggttactgccgcgacggcagcctcggggacgcggagcgcgtggtcgaggcggctagggcatctggcaccgcgaacgtagttacctacacagccctcatcgacgggtactgccgctccgggcgcctcgccgatgccctgcgcctcatcgcctccatgcctgtggcgcccgacacctacacctacaacaccgtgttgaagggcttgtgctgtgctaagcagtgggagcaggccgaggaactcatgcgggagatgatccggaacagttgccatccgaatgaggtgaccttcgccacacagatccgtgctttctgccaaaatgggttgcttgaccgagctgtggagcttcttgagcaaatgccaaagtatgggtgcacgcctgatgttatcatatacagtacgctggttaatggattctcagagcatgggcgtgtagatgaggcactcaagctattgaacaccatgttatgcaggcctaatacggtttgttataatgctgcattgaagggtttatgtattgctgggcgatgggaggaagttggagagctcatagctgaaatggttaggaaagattgcccgccaaatgatgcaacatttagtacgctgatcaattccttatgccaaaacaggttggttgaatatgcggttgaagttcttgagcaaatgcagaagtatggatatatgcctgatgttgtcagttacaacacaatcatcagctgtttttctgaccaagcgcgtgcagatgatgccctcaagttactaaagagcatgctatgcaagcctgacacgattagcttcaatgctgtgttgaaatgtttatgtaaagccaaacgatggtatgatgctgtggagcttgtggctaagatgttaaagaaggattgccgtataaatgaaatgacttttaacatactcatcgattcactatgccaaaatggacaagtcaaggatgccattgaggtgtttgagctcatgccaaaatatagatgtatgcctgatattgtcacatacagtagccttattaatggcttttctgaacaaggccttgatgaaatggcctttgatttgttcagaagcatgccatgcagggctgatatatttagctacaatgctacattgaagggtttgtgtatggctgcacgatgggatgatgctggagagcttatagctgatatggtcacagaagattgtctcccaaatgaagtgacattcaatatactaatcagttccttgtgccaaaagggactggtcaatcgtgcaattgatgtttatgagcaaatgcccaagtatggaattacaccggatattttcacatataatgctcttatcaacggctattctgaacaaggtcgtttggatgatgccctcaagttcttgagcaccatgccttgtgagcctgacaccatttcctataattctatactgaagggtttgtgtagggctgagcgctggaaagatgcagagaaacttgtcactgagatgcttagaaagaattgcactccaaatgaagtaacattcaagtatgctaatcaattatttattaaataagagtagttgaatgaataactaaattcctggagctaatgccaaagtttggatggctacgttctgaaatgtatgctgtcttcattgatggctttttgtggcagaggccaacgatcttctgagctaagaagcagcataattgtgcaagcctagcatagttttctattatgttgcattaatgacatttagatatgaacaacaggagaatttaaaaacttctagctgacagatgcaatgcgagcatcccaggagttcacatttgttatttagaggaattcatgctccaaaatgaagtactaattgctataattggaagaggcagttcaatcttcgacaatgtttgttgtcaaatggctggaaaaggtttatagatagtgtctggctgaaggattgtcaaaggtacatagcattactgagcaaatgtcaagaaacaaagaagcatatcataagatcatgtgtgatgatgccattaaggtagtgtttggatggatggatgaggaaggatgaagagagataaggtgggatcattctaacttgacccatgtttggtttggaggtccagagtcagggtcaaagaatattcttcaaaaatagtggatggggccatccctcaaaaaataagggacgaggtcaacccaggattgatcccgtcccatccctcgttgacaccgaaccaaacacataatgagcaccatgtaacctctactggagaaccgttggatccaatatatttggggtatgttatctgtcatggttgagttcatagatgtttggggcttggtgactattcaatttaatctgtctgtagtgttttgctgtctataccaccttttgtttacttttaattatataccactagatttttctgttttacatttgccaagatagagcctggatagtgcttcctttgtagtccaattggatgttttaaatttgtcaaaactgttgtgctggcctataattgttcattgcttttactgttaattatataccactagatttttctgttttacatttgcc

SEQ ID NO: 128010 - DNA, 101 bp, Zea Mays
aacatgagtgtactgatgcaatgtcgttctgttttgtcattttatttttgttatatcttggaggtgttgagctagatcaatattttgccattgaatttatg

SEQ ID NO: 128011 - DNA, 1038 bp, Zea Mays
cctttacgtgtccagcgagcgccggtggactcgttgacgtgcctcgccaccaccaccatgatcacggtcgatgatgatcaggtgaggagctgtggcggcgacagcggcggtattccagttcctactagcgacgacgccgccgccgggcggcagatgctgacgacgatgggcgagcaccaccagcagcagctgacggtgtccaggatccggacggccgtgtccatgctcacccgccgcacgggccacgcgcgtttccgccgcggccccgtcgcggagcgtcaccacgcatcgtcgtcggaccatcatcagctgcgcccgccggcggccggtggcggcgtggcgctggacctggacttactcgtcgccaagacgtgcgacgacgcggcggcggggtttagcgcgtcggcctcgtggaccagctcctcgctgccgtcgacgacgagcctcacggccggcgaagggagcgtgtccaaaggccgcgcccagcagcagggttgtggtgccctgttcttcgtccagccagtgagcggcggcggcggcgacggccactctgccggcaagccgctgcggctcgcgccgtcatcgatgcagcagcagcatgcctgccccggttactcatccccaggcaacgcgctggaagacggcaagtgccacgaccgcgcgcgctcggagaacgacgccgctgccgccgccggcaagacgcacggggaccgctgccactgctccaacaaacggaaatcgcgcgtgaagcgggtggtccgcgtgccggcgatcagctcccggaacgcggacatcccgccggacgaccactcgtggcgcaagtacggccagaagcccatcaagggctcgccgtacccgcgcggctactacaagtgcagcacggtgcgcgggtgcccggcgcggaagcacgtggagcgagaccccggcgagccgtcgatgctcatcgtcacctacgagggcgaccaccgccacgaggaccggccggccggcggcggcgcgcagacggaccaagaccgcacgacgacgtccagttgaatt

SEQ ID NO: 128012 - DNA, 718 bp, Zea Mays
ggacgcccgatctagcaactagcaagcgccgcatccctcgcctcttcccgacttcccccctcgattcgatccgagctcacttctagggttcttggccccgctccaccgtcgcccatggcagacgatgccaaccgagcggccttcatggagctgcagtcccggatgatagataccaccgcgaagatcaagcagttacaaacccaaatgcgttctaaagaaggggaaaagaagcgtgcctaccttactttggaggaacttcgccagttgccagatgataccaacacctacaagactgtcggaaaagtgtttattctggagccgaagtcagttctgttcaatgagcaggagcaaaagcttaatgacagtgagagtgcgatagcttcaatgcagacatccaaagactaccttgagaaacagcagggcgaagtggagaacaatattagggagctgcttcaacaggacccaggacttgcgcgtcagatcctctcaatgaccgttcaatgagagttgtttttctctccatttaattttttagataatttgtaatgtcgcagtttgatcagtcatgctgtggtcttgccttatctgtgagacatgtgcggtctgtaatttctgaggtgtttggctggtggaatgatgtggtccatcattatctcactctagtgctttgtttggtttgtggaatagattgagttaattcatcatcatcccattcctc

SEQ ID NO: 128013 - DNA, 495 bp, Zea Mays
actaattaattaaattttcatagcacatatatccgatgtcctaaatctttatagttttctctgtagttttagtcaaatttgagatacttaaacctctcgaaggaagttgaaatgacttgtaataatctagaatagaaggagtagccattaaccactcttacattggttttcaatgtcaacaacagaggtgatctcccagttggcctcggtactctattcggatttattaattattatgcaaagattttgcagcacaagagtacgacaagcgctatcagagagaagcagccccgtctatccacctttgataggcagcaaatacttcaaatggcagatagtccgatggaacatggccagccccctttattgtcgcaaacaatatattgttctcgtacctaattgagtacctgttcaagtagtcaaagcaaaaaaggttatgttagttttttagaaataattatctcagactaattacttatcgtatagattcttaag

SEQ ID NO: 128014 - DNA, 165 bp, Zea Mays
atggcgaacgacgatcacgtgcagggtatggtcgcacagacgcgcgacgataatgggaagagtgggatgaacgacaacggtggtggcgcgaggggaggggttgacggcggtgtggacgtgaggaggaaagggatgaaggatgatccaaataatattgtccattag

SEQ ID NO: 128015 - DNA, 2496 bp, Zea Mays
atgcgggcgggggcgtacacggtgcaccagtcgctcaccgcggaggcggccgcggcgctgcagctctcgctgggcctggcgcgccgccgcggccacgcgcaggtcacgccgctgcacgtcgcctacacgctgctcggcggctccgagccgcccccgtcgtcgtcgtcgcctcggctcttcaccaccatcgccgcgtccgcgccggcgtacggtctcctcgtgcgcgcctgcgccaggtcccgccgccagacgcacccggcgcagcagtgccgggcgctggagctctgcttcaacgtcgccctcaaccgcctgcccacgggcacggccaacgcggggggcttgggctcctcgccctcgcccgccacctccttcgcggcgtcgctcctccagcagcagcccgccagcccgacgctgtccaacgcgctcgtggccgcgctcaagcgcgcgcaggccaatcagcgccgcggctgcgtcgagctccagagccagccgtcgccgccgccgccaccgccaggccagcagccgcactccaccacctccccgagccaccagcagcagcagcctgtgctcacgatcaaggtcgagctggaccagctcatcgtctccatcctcgacgaccccagcgtgagccgggtcatgcgggaggccggcttctccagcgccgccgtcaaggccagcctcgaggaggagagcgccgccatgctggctgccctcggcaaccaccaggtccaccaccacggcgcctcctcgacgccgccgccgccgccgccgtcctcccatcatcctcccaccgcggccggattagtactaccgcctcgtcacttcttcctgctggacccttacggaggaggaggcttccctgcgcacgccggtgcctgcagcggcgcgccgtgggcagcgcccttcccgagcgtccacagccgccacccgcccgagcccgacgacgtgaactccgagcccccatgcgaggcggaggcggaagacgtgagagcgatcgtggaggtgatgacgcggcgccgggggagactccgacgagccaaccccgtcgtggtcgccgactccgcgcccgccgccgaggcgtgcgtcgccgagctcgtgcggcgggtggagcgaggaggagacgtccccgacgagctgcgcggcgcgcgcgtcctccgcctccacctctcccgcgcccgcgtccgcctcatgacccgcgccgacgcggacgcgtgggcggccggcctgcgccgaagcgtcgccggcagtaacagcaccggcgcaggcggcggcctcgtcatctacgtcggcgacatgcgctgggccgtcgacgacggcaccgacgacgacgaccacgcccgcggcctgcaggggccgtcgtcgtccggctcctacagccccgctgcgcacctggccgcggagctcgcccgcctcctcgccgacctccgcctccgcgccgcgtcgcgcgcctggctgctggcggccgccagctatgccaccttcatgcgctgccagcggtcgtccctggacgtgacgtggggcctgcaacccgtgtccgtccccgctggcgctggcggcggcggcggcctcggcctggagctcggccctcgcgctgccactgcaaggccggctgctcaacgacctgctcagctccctccgctggatcgtgcaccaagagaagaggatggcgtgccaacgccgaccctgtgcgctgaatgcgccgaacactacgagagggaagcatcggacgtgagagccaaggcagcaggcaccgatctcgcgctgaccttcttccctggctggccgcacgcggacgagccccagacgtcgcacaaggatgatctgatgaagctcaagtggaaatggagccgactctgccagcagcggaaccaaccggcccgtcgtccgtgcaatgcaaccacctctagcaacagcagcagcaacccaggcctgtgcttgagctttgaggaggctcccaccaccttccaatgcaggagcaacaagatcgagcaccagggcgtcaggaccaccctgagcctcctcccggacgccgacaagtcatccgacgaggtccaccgccacgggagcgagcccaggccggcggcgccgcagcaggaaccagacgtggcgggggcagctgaagctgaacccagtggcacgaagaaggtcggggtcccatggttgccgtccggcgatctcaagaggaaggcggaggagagtgtcgtccggaggccgagcgagtccaacaagcgccgctggaagggcagcggcggcggcggtggccttgacctgaacctacgcgctgacgacgacgaggaggagagtggtggcggtggcagcagtgacgacgacgagctcgttccggcgagcgacttgacgaacgacggtgaagaagcagcagcagccagcggtgatgcgactgacagctccggtagccgtcgccaggctgctgtgagtgtgaccgaccttcgacctcgatcgctaagtggttgcggtattgatggtgccaacgagtga

SEQ ID NO: 128016 - DNA, 424 bp, Zea Mays
ctcgcgtggcgcaccctcgaggcctcgaccctacctatagatgtccaaacggaccgggctcgccgggcggtccgaaacccggcacgaacccgacacgacacatagtgaaccgggcccgcgccggctcgacccggtcaccgggccatgcctgggtcgaaggcgtggcatggcgggctaggctcgacacgccccgatttaattttttttatattttttcatataaatacatatattatacttgaatatctatactatacttaaagcaccagtttcaacggtcgtcgtgcgtcatttttttttacaaataacccctcacagctatttcaaattaatctgatgcacgtctatagatgccaaacgacgcccgacacgggctagatgcacgcgggccacaactatgtcacagacacgtcatgtcggcctg

SEQ ID NO: 128017 - DNA, 332 bp, Zea Mays
aataatcgtgtcgggccgggccagcactacgggccgaggctacagcccaagcacgacacgacgttctttgctcttgcaagcattatgtcgtttctgagaccatattggagcaatggactacatggtgtttgaggttgctgaattggatggagcagcaatgatttgtcacactaacagcaaaataaaaggttatttgttggttttaaacgttagtaattgctacgaagtagcataatttatatggagcgcatccagtttttattgatgcctgactttagcaatcactccatattttgatctatcttttttataagtttgacttcatggaactt

SEQ ID NO: 128018 - DNA, 1965 bp, Zea Mays
cctacccgctccgcgctggcgcacgtgagcggcatgccgtctcagatcgggatcggcaacacccactccgtcactcccctacaaagatgttttctcagtcaagtcgcctccccctactgtaggccgctgctgctcctctcctcccatctcaccacacaccgcagccccagcaagatcgcgcggaggccatggcgaagcccaagccttcctccgccggcgccaagccgaccgcggctgcgccaccggttacagtgcactcggcgctggtcacctacacctccatgctcgcgctcctctccctctgcccgcccttcgtcatcctcctgtggtacacgatggtgcacgcggacggatcggtggtgcggacttacgagcacctcagggatcacggcgtgctcgaggggctcaaggccatctggcccatgcccaccctcgtcgcgtggaagatcatcttcggcttcgggctcttcgaggccgtcctacagctgctgctccctgggaagcgcttcgaagggcccatctcgcctgccgggaacgtgccggtctacaaggcaaatggcttacaagcatatgcagtgaccttgataacttaccttggtttgtggtggttcggtatatttaaccctgcaatagtgtatgatcacttgggggagatatactctgctcttgtttttggaagctttgtgttctgtatttttctctacataaagggccatgtatttccatcttcatctgactctggatcctctgggaatgtgataattgacttctactggggtatggagctgtaccctcggattggcaagtactttgatatcaaagtattcaccaactgtcgtttcggtatgatgtcctgggctgttcttgccgtaacctattgcataaagcagtatgaaatgaatggcagagttgctgattctatgcttgtgaatactgcacttatgttgatctatatcactaagttcttttggtgggaatctggatattggtgtactatggacattgctcatgatagagctggtttctatatctgctggggatgcttggtatgggttccatccatatatacttcccctggaatgtaccttgtaaaccaccctttgaatttgggcccccagctagcactctcaattcttctagctggaatgttgtgcatatacataaactatgattgtgaccgtcagcgccaagaatttcgacggacgaatgggaaatgctcggtctggggcaaggctccatctaagattgttgcctcttatcagactacaaagggagaaactaaaaccagtcttctcttgacttctggatggtggggcttgtcacgtcacttccactatgtcccagagatactatctgcatttttctggactgttccagctcttttcaatcacttcctaccatacttctacgtgatctttctgactatattattgtttgaccgagcaaagagggatgatgaccggtgctcatcaaagtacgggaagtactggaagatttactgcaacaaagtaccatacagagtcattcctggcatttactgagcatctcgagttctggacgactcttgatattaagctcaacagatgccacgatatccagtcttcataccgatttgctactgattgtgtaatgtcgctggtaggcttgggctgtacgcagtattaggtgtaggcaacttggcttttggcatttaccttgtatgtgtcgtgtatctagggctggggcttgctccttcagttgttagacagtagggggtaatctcaggggtgcaatgtactccctccgtcctaaaataaaagcatatctagtatttaaattttgtttcaaataaaaatgcacaatgaactatcatatcgtgtaacgatgtgtttgattgtgggacaaactagctggagatgggatggtggatttgaaggatatgaaaggatcatgatgctgaagaggaagggtgaattgagtttctct

SEQ ID NO: 128019 - DNA, 240 bp, Zea Mays
atggaggtggccatcaccgccgtcgacatggcaagctcgtctggtggcgcggttgttgcggccatgatgggcatctcgacgagttggcttaagccaaggaaggtggagcacaacatcgttgctgcggccgtgatgcacatctcgacaaggtggctcaaggcattagttgagctaacaaagcagctttgcttggtggaacaaaggttgagttgccacccggaggctttggacaatccataa

SEQ ID NO: 128020 - DNA, 1186 bp, Zea Mays
acacacacgggcggctacgactacgaattgcctccggctagagcgatagtccaccaagtcaatggcggcggagcagtgccagtcctcaggcggcagctcgccgcggcctcgcgccgcatacaccatcggctacgcgatgctgcccaacaagcacgataccttcgtccagccgtcgttcatcgacctggcagcgcagcacggcatccggctcgtggcgctcgacgcctccaggccgctcgcggagcagggcccccagctggacctcgtcgtgcacaagctgtacggccaggcgtggcgcgcgcggctggaggccttctcggcgctccacccggacgtcccaatcatcgacccgcccgccgccatcgaccgcatcctggaccgcttcaccatgctggacgtcgtctcggggctcgactgcgtggccgtgcccaggcaggtcatggtccacgacgccggggccctgcagcaggccgccgacgccgccgccgacgacgtgctcggcctcggcggcctccggttcccgctcgtcgccaagcccgtggaggtggacggcagcgcggcgtcgcacgacctctgcctggtgtaccgccgcgagggcctgcgcggcctgcgcggccgcccgccgctcgtgctgcaggagttcgccaaccacggcggcgtgctcttcaaggtgtacgtggtgggcgaccgcgccacgtgcgtggtgcggagcagcctgccggacgtgccgccggagcgcctccgggaccccgccgccgccgccgcggcccccttcgccaacatctccctcctcgcccccagcggcggcgacgagggctccgagaaggtggtaccgccgccccaggacttcgtcgacagggtcgcccgcgagatccggcgggcagtgggcctgcacctcatcaacttcgacctcatccggacgagggacgacgctgcaggcggcgacgccaataagtacctcgtcctcgacatcaactactgcccgggctactccaaaatgcccggctttgagcctgtcctcactgaattcttcctggagaggcttcgctctcgcagcagaagcatcgatgagcggcctgccccgggggcggaggcgaggcaggcagaggcagaggcagaggccgagcccagcagcgccaccatccccatcccgccgggagcggaggcgaggctggctcaggcctaa

SEQ ID NO: 128021 - DNA, 1916 bp, Zea Mays
aaaccaaggaaaggaataccgccacgtgttcccactgccgccaaccgaggcagccccggcggccaccgttatatataaccacgcgccaccacccaacaacagcacagcaacccagtgatcaattcaagcaacacaccgacgaagcaagcaaagccaagcggaagcggtcagcgtcagaatagtatggcggtgtccgcggccaagatggccgtcgccacggccgtctccttagccgtgcactggctcctccggtccttcctccaggcgcagcaccctgcgctgggcctgctcctcccgaccgtcgtcttcatcggcattgccgcgtctggcaatgccgcaggcgctgccaacgacgcgccgccggggccgccggccgtgccggtgttcggcaactggctgcaggtgggcaacgacctgaaccaccggttcctggcgcgcctgtccgcgcggtacgggcccgtctttcgcctccgcctcggcgtgcgcaacctggtggtcgtctccgacccgcgcctcgccacggaggtgctgcacacgcagggggtggagttcggctcccgcccccgcaacgtcgtcttcgacatcttcaccgccaacggcgccgacatggtgttcaccgagtacggcgaccactggcgccgcatgcgccgcgtcatgacgctgcccttcttcaccgcgcgcgtcgtgcagcagtacaggggcatgtgggaggccgagatggacgccgccgtctccgacgtcgcctccgcggcccagcgcgccgccggcctcgtcgtgcggcgcaggctgcagctcatgctctacaacatcatgtacgggatgatgttcgacgcgcgcttcggctccgtcgacgaccccatgttcgtggaggccaccaggttcaactccgagcgaagccgcctcgcgcagagcttcgactacaactacggcgacttcatccccgtcctgcgcccattcctgcgcggctacctcgccaggtgcaaggacctgcaggccaggcggctcgccttcttcaacagcaactacgtcgagaagaggaggaaggtcatggacgcgccgggggacaagggcaagctcaggtgcgccatcgaccacgtcctccaggcggagaagagcggcgagatcaccccggagaacgtcatctacatcgtcgagaacatcaacgtcgccgccatcgagaccacgctctggtccatcgagtgggcgctcgcggaggtcgtcaaccacccggcggtgcagcgcaaggtccgcgacgagatcaaggccgtcgtcgccgaccacgagcccatcacggagtccaccatccaccgcctcccctacctgcaggccgtcatcaaggagacgctgcgcctccactccccgatcccgctcctcgtcccgcacatgaacctcgaggaggccaagctcggcggctacaccatccccaagggctccaaggtggtggtcaacgcgtggtggctggccaacaatccggagctgtgggacaagcccgaggagttccggccggagcggttcctaggcgaggagaagagcgtggacgccaccgttggcgggaaggtggacttccgcttcctgccgttcggcgtgggccgccgcagctgccccgggatcatcctcgcgctgcccatcctcgcgctcatcgtcggcaagctcgtgcgcagcttcgagatggtaccaccgcccggcgtggagaagctcgacgtcagcgagaaaggaggacagttcagcctgcacattgccaaccactccgtcatcgccttccaccccgtctctgcatgatagattgattgatagccaaccacgaatgctgcgcgtcgttttctgcatatcaatgttaccctacatacccagtcatttttttcgcttttatttactagccatttctcaggtataagtatctccaacaacaacagtgt

SEQ ID NO: 128022 - DNA, 1423 bp, Zea Mays
agttttcgcggatctcagttccccttgcacctttttctgggtttctcccccatcacggaaagcgcaaagccgcggccacaccgcaacaaagccaacgagcccaacccggacgggtgagcgagcggctcgtgcggaggtacacagagacgcggaccgggtcgccggacgacgagacgcaccatggcaccgtcgcagctgcttggcagcaccgatctctggcggcccgttgccgccgcgcgcgggggcggctgggccacggccgccgtgctcctcctcctccttgcctctcacctcgcagtcctcctcgtccgcctccgccgccgcctccgcggcggaggccgaaacgcccatccggaggccgccgtggcacccgcgcctgcctccacgccccctggttccgcttccgcctcaggaatagagggattagtgacggagggcgatctgaggcagctggtaggcagtctgggcttgggcgcgcacgaaccagagagggagggctgggagcacgtcatctccaagagcagcgacgacgtctcctacaaggcctggtgcgacaagcccacggctggccctcctaaatatctgagtattacaacatacgagagatgctcggcagagcagctgagggacttctacatggataatgagtacagaatggagtgggataacactgtcaaaaaacatgagcagctgcagtatgacgagaacagtggggtggaggtagggcgaacaattaagaagtttccacttctaacaccaagagagtacatattggcatggcgagtctgggaagcaaacgacaagtctttctattgctttatcaaggttacccttccttcatttaactttacatactactgtgcataagaggtatcatatcttttcaccagaaagaaatccatatacagctatctccctctaatgtttgtcatattttcatgtgaaacttccgtggccttagcatcagctgtttcaaatgttctccaaatgaaaaagaaaaagaaaaatcttatgtcagtcatgaggtcataatagtttctggatctgatgcaaaatgaagtgaatgaaagtatgaaaccataactgctgcattggactgtaatctataatcctcatagctaattagctattgccgaaaaacttttcaactgatgtacatcctatttgctctcattataagcataacattactggaaatgagctaagctggcaggcttatttcatgtttgggttaccctatgtgtcgtacatggtgtcatggtgatgacatctgatcctactttccactctctaccagctttctgtttttttggtttgccttgcgtaagctgttaatcttgactggaatatttggtatattttcatgtgcaacttccatggccatagcatcagctgcttcaaatgttctccaaatgaaaaaaaa

SEQ ID NO: 128023 - DNA, 1711 bp, Zea Mays
agttttcgcggatctcagttccccttgcacctttttctgggtttctcccccatcacggaaagcgcaaagccgcggccacaccgcaacaaagccaacgagcccaacccggacgggtgagcgagcggctcgtgcggaggtacacagagacgcggaccgggtcgccggacgacgagacgcaccatggcaccgtcgcagctgcttggcagcaccgatctctggcggcccgttgccgccgcgcgcgggggcggctgggccacggccgccgtgctcctcctcctccttgcctctcacctcgcagtcctcctcgtccgcctccgccgccgcctccgcggcggaggccgaaacgcccatccggaggccgccgtggcacccgcgcctgcctccacgccccctggttccgcttccgcctcaggaatagagggattagtgacggagggcgatctgaggcagctggtaggcagtctgggcttgggcgcgcacgaaccagagagggagggctgggagcacgtcatctccaagagcagcgacgacgtctcctacaaggcctggtgcgacaagcccacggctggccctcctaaatatctgagtattacaacatacgagagatgctcggcagagcagctgagggacttctacatggataatgagtacagaatggagtgggataacactgtcaaaaaacatgagcagctgcagtatgacgagaacagtggggtggaggtagggcgaacaattaagaagtttccacttctaacaccaagagagtacatattggcatggcgagtctgggaagcaaacgacaagtctttctattgctttatcaaggaatgtgaacaccctcttgcggcacgacagagaaagtttgttagagtgcaacttctaagatcaggatggtgtattaggaaaatcccaggcagggatgcatgccaaatcacggtgctgcatcatgaggacaatggaatgaatatagagatggcaaagctagctttttccaagggcatctggagctacatatgtaaaatgaacaatgctctacgtcggtatcctcagcatggcagtccatcagtgtcaattctgaccatgcagaaacttatgaagaagtttccccaggatttggagactgccgacgcaagcctttctgcttctcagaacactgcagcatcggtcgttccttccacaccgacttccaggacttcaccatgcaagcttgaggggaggaagtctcgccaaatgatcgcgagcgggattctgctggttggaagcatcgtttgtctatctcgaggccgatccaacctcggggcgcagctcgcgatggccttcttcctgaaaaaggccttcaagcaagagaggcaatcaagctcctcatcgacatgaatggtgaaaacaaacgtgactagatgcaggcggtagccgtactggtttgagccgtgcagactccagacaacgtattattagcatttttaacctttctctgattacagaatacgtgactagataacctttgaccctgagccgtgcagacaagttgtaaagagttttttccggaactagttttgtaaataatcgttttcaaatctggaaacatagaattactttgagaatggaagaccgtgcatgcctgattttctaaggaaaattgcggacgaatgcagaatgtggtagggtggagcttcaaaagtgcaggagttcctggccgggtcgctatccagta

SEQ ID NO: 128024 - DNA, 3891 bp, Zea Mays
gcctctctcccgcacgcccccgccccgaagacctcgcgacgccaaaaaggaggagagaccgccacccccacgcccgcacggcccactcagcgctctccacccccgtcccctcgcggcggcggcggagcccgagcctgagtcctgcccccccgggctaggttggtctccgcctccgccctccagtctctttggcacaacctgcagccgctggcgcaggtggacatggatctgccaagcctcgccgtcgtgctgcgcgccgcgctcagtcacgttcctgaggagcgcaaagctgcagaggagagtctcaaccagttccagttcacaccacagcatttggtgagattgttacagatcattgtcgatggaagttgtgatatggctgtaagacaggttgcaagcattcatttcaagaattttattgcgaaaaactggtcacccaatgatccagatgagtctccgaaagttttggaaagtgacaaggccatggttcgtgaaaacgtacttggttttattgttcaagtgccccctttgttaagagcccagcttggagaaagtatcaaaacaattattcattctgattatcctgagcagtggccaagtctccttcactgggtttcacacaacatagacttacagaatcaaatttttggtgctttatatgtcctaagggttcttgccagaaaatatgagttcaagtctgaggatgagaggatacctttatatcacattgtagaggagacatttcctcgtctactaagcatttttagcaaattggttcagattgtcaatccaccaattgaagttgctgatttaatcaagttgatatgtaaaatattttggtcatcaatttatttggagattccgaagcaactatttgatccaaatgtcttcaatgcatggatggttttgtttataaacttgttggaaaggccagttcctgtggaaggccaaccaatggatcctgagattaggaaatcttgggcctggtggaaagttaagaaatggactatccatatcctgaaccgtctctacaccagattcggtgatctgaagcttcagaaaccagagagtaaagctttcgctcaaatgtttcagaagacttatgcaggaaaaatattggcatgccacatgcagctgctgaatgcaattcgtagtggtgattacttgccagatagggttatcaatcttgttcttcagtatctaactaacagtgttacaaagaacagtatgtatcagatgatgcagcctcagattgatatacttctttttgagataatttttcctcttatgtgcttcaatgacaatgaccaaaagttatgggaagaagatccccatgaatatgttcgcaagggctatgatatcatcgaagatttgtacagtccccgaacagctgctatggactttgtgagtgaattgattagaaagcgagggaaaaacaatctccaaaagttcatccatttcattgtggatatttttaggaggtatgatgaagcacctgctgatcttaagccatatcgccaaaaagatggtgctcttctcgctattgggacactctgtgataaactgaagcaaacagatccatataaaacagagcttgagagtatgctggtccgacatgtctttcctgaattcaacagtcgtgttggacacttgcgagcaaaggcagcatgggttgctgggcagtatgcccatatcaacttttcagaccagaacaattttcgtcaggctatgcactgtatgtctcaggaatgcgtgatccagatcttcctgtgagggttgattcggtctttgcacttcgttgttttgttgaagcttgcaaagatttaaatgagatccgacctatacttcctcagctccttgatgaattttttaagctgatgaatgaggttgagaatgaggatcttgtattcaccctagaaaccattgttgacaaatttggcgaagagatggcaccttatgcactaggtttgtgccagaatttggctgctgctttctggagatgtatggctagttcagaagctgatgatgaagctgatgattctggtgctttggcagctgttggttgcttacgagcaattagcacaattcttgagtccataagcagcctcccacatctttttctgcaaatagaacctacattgttacctataatgcgcaggatgttgacatctgatggccaagatgtttatgaagaagttcttgaaattgtttcctatatgacatttttctcacctacaatttcactggacatgtggagcttgtggccactgatgatggaagcgcttaatgactgggctatagatttctttgagaatattcttgttccactggacaactacatttctcggggaactgatatctttcttgcaagcaaagatccagattaccagcaaagcctgtgggatgcactacaatctataatgatggacgaaaacatggaagattctgatattgaacctgctcccaagctcattgaagttgtttttcaaaattgcaaaggcaacgtggatcagtgggttgagcactacctcaggattacaattgcacggttacgtagagcacagaaaccatacttgaaatgcctccttgtacaagtgatcgctaatgcgctctactacaatcctgcgctgacccttgaatctttaaataaacttggggttgcagctgacatttttaaccattggtttgctatgctacaacaagttaaaaaaagtggagcacgggttaatttcaagagggagcatgataagaaagtttgctgcttgggcctgacctctcttatcgcgcttccagctgataagattccagcagaagctttggatcggatcttcaaagcaacacttgagcttcttgttgcttacaaggaccaagttgcagaagctaagaaggaaaatgaagaggctgctgatgatatggatggttttgatgctgatgaagaagatgatgatgaagttgactccgataaggagatgggtgttgatgatgaagacggggatgaaataagcagtcttcagctgcaaaaattagctgcagaggctagaggcttccaaccagccgacgaggatgatgactcagatgatgatttcagtgacgatgaggagctacactcaccaatagatgaggtggatccgttcattttctttgtagaaactgttcaagctttgcaggcatctgatcctgccaggttccagaaccttatgcagacattggatttccgttatcaggcgcttgctagtggcataggacaacatgccgagcaaagaaaaattgaaattgagagagagaaatctgagaaggcaaatgcacagtgacataataaatcatttctggccgcccttgtttttgccattttgccagtataagccattggtgtctggtcaattccctgtgatttgcaggtcgctggtatgagttttgcagccttagccaacctttaagggtaggacaattttaggctcgcaaaattctatccttgtgaggaagcatcttggataatctgtcacgtcggccatgttcttcgtggcctgttgttgccgtcttggttgcgcaagaaagtttctctcgaggacagttgctccgtcttgttgaatttttttttgggggggggcttgtaagagcatttgttatagaaactcacctcaggtggtggggttgcattctccgagttgtcaaagtttattactggttcggagtagattgtatatggtttcggttggtaagacaacggttgtacgagctgcggtatatgtttttttttgtcaacaggacattgtaattgggttttgttctttggtcggcgagagcaagaaaaattggcattgttctgcggagttaccttgtttggtttcattgtccacttgcctgtgttgcaaaattatataatgttataga

SEQ ID NO: 128025 - DNA, 343 bp, Zea Mays
ggccgagcctctgctcgcggctctcctggacaccttcacgcccgtcttcgcagagccggccggtgggtaaacgtctggatcatcttccggcacagctttccggcggtgaacagcaacgagtggcgctggcacgagggtttaatggtcgacctgatgtgctgtttgccgacgaacccaccggcaaacttgaccgccagacgggcgataaaattgccgacctgctgttttccctcaaccgtgaacatggcaccacgttgattatggtgacccacgacctgcaactggcggcacgctgcgaccgctgctttacggctgttttaacgggcagttgcatgaggaagca

SEQ ID NO: 128026 - DNA, 85 bp, Zea Mays
cgtttctttcaaacagctcctcatagcacatgcatgcatcctatagctacattctctgtcagcttattaattagtacatatttcg

SEQ ID NO: 128027 - DNA, 2920 bp, Zea Mays
cgccgttgcggcggcgaaaaccgcgcaaaccacgcgcccgctgccgatcctccgatccgatccatccgcccggctcgttggttttcatttcgtgtcgtgtcggacccggcgaccccaaagccagtggcactggcaataggcaatagcggcattcttctcttggtttccttcccgctttcccctaccactgcgggccccacgtgccgcattcccaccgatccccgtcctcctccttcgtccgaccttttcatagtcaaaccttccctcttcatcttcttcttctgtcctatattccgttgaagtcgaagagaggcatgcgctcgggaggtggttggctgcttcatcatagtccgtagccgcctgcgaggcccttcatatcttagaagaggaggaggaggagaagaagagcagggagaggagccaggcgcgcctctgcagcgatggaagtggcggacgaggtggtgcgggtgctcggcgccgggttcgacctcacgtccgacttccgcctgcggttcgccaaggccagcgaggggcggcgcctggtggagctcggcgaggacacaagggacgtgccgctccccggcggcggcggggccacgctccgcggggtgccgcgcgacgtcggcgtcgacaagggcgaccgcatccgcttccgctccgacgtcctcgagttcaatcagatgtcagaattgcttaatcagaaatcttcagtccaagggaaagttccttcaggctattttaacgctctctttgaattaagtggagcttggttgactgatgccaaagacaccaagcatctagcatttgacggatatttcatttctttgtacaacatgcacctaaaggcttctccattagttcttcgagatgaagtaaaaaaggctgttccatccaagtgggatcctgttgcattatcatggtttatcaagacttatgggacacacatcattgttgaaatgggaattggaggtcaggatgtcatatgtgttaaacaaagtcattcttcaacagtttcaactgctgatcttaagttgcacctggaggatcttggcgatttcttattttctgatgggaagaaccactccccaatacatcgtaagacaaaggatggcaagagcacggtgcctgatgtttttgtcaggatagtgcagcattctaataacttgcacctttctagctactctgaaacatcaaccaaggatggactgacagttacctgttcgaagaggggaggagaagcatacctacccaaccactccaaatggctgcaaacagtgccaaagaaacctgatgccattatgtttaaatttgtccccatcacctctcttctaactggtattcctggcagtggttacctcagccatgccatcaatttatatcttcgctataaacctgatcttcaagacttgcaatatttcttggagtttcaagttcctctacaatgggcacctatgttcaatgagcttgtccttggacctcaaaggagaaaaggctcgtacccttcaatgcagttcagatttctcggccccaaactccacgtcagcacttctcaggtatctagctctcagaaaccggttgttggcctacggctatacctggagggcaggaagtgcaaccggttggccatccatgtccagcacctctccagtgttccaagcatgatcgcagactccgtggcgtcttcaatgtcagaatggcgcgagtcccaggacaacgacccagggtacatcgaggcaatccagtggaagaactactcgtgcgtctgcacctccgccatcaagtacaacccggagtggcacaagagagcccccggcggagtgtttatcgtcactggcgcccagctcgtctcgaagggggcctgggccaagaaggtcctccatctgcgcctcctctacacccacatccccaactgcaccatccagaggaccgagtggaggaacgctccggcggcgtctcagaaggggagcttcctgacgacgatcagcacgacactgagctcccctttcacgcagcgtgctgacacccaccaggcgaaacatgagccggcggtgcagctgaactcaggtgtctaccccgacggaccgccggtcccgctccggtccaggaagctcctcaagttcgtcgacatctcggaggtggtaaaagggccacacgacgtcccgggccactggctggtgatcgcggcgaagcttgtgaaggagggagggaagatcgggatccatgtgaagtttgcactgctgggctatgaagggcagtcgcagggtaacagtttcatgagctgaagtctctgtacataacaacggctggctctgatctttgtagatttcaggattttggaagaagcacatgattaggatttttaatactggattttttttgtgtgtggagtcgacaggaactgtgtggagggcagtcggaaaatagaccaatcacctctttgttaggaatgcctgtggaattcccgtggcagtataattagagcacgtagttgtaaattgctcctttacaaggtgtgttttatttcagtaggaaacacctcagttaagaattactgtaccgatattttcatttatatttatatgatgcaaaattacgaccacaactaagtatctttaaataaaaaactgcgtcgcccagcagcaggcacgccaggtcaatttgatatcaagttgtagtcaagataacaacatcaactgcaaggaggatggtggtggggaggcgtccgcgctttgtatttatagcggttcatgtcccccgccctcgatgtggtgcgggcgccgaggatttaggtcgctgtcgatggaaggtggcgtcgacgatggaatgggattcggccatttccttgaatggagtgagggctccgatggtagaggtagcaatggcccgtgggattgcgtgaatagcgggggcgaggctcacg

SEQ ID NO: 128028 - DNA, 555 bp, Zea Mays
atgcggagagacgagatcgggatgaatggtagacaggctagggtgacttaccagcagtcaacagtcgaggacgacaggatgcagcctcatcggagtcagatgacgaatctgtggcctgacagcgacacaagagacacatcaagggcgcgatgcgaggctagagaagggcatggcgtggatggtagggacctttcagcgaatcggtgcaacagagcaggaggtggtggtggtgggcggtgcggatgctgccgtcgcggtcgcagagaaagtgggagaggaggacctggcagtgttggagtgggattagggaaggagacggatgatgaagggtgcgagtcagagggcttgctcctccttcttcggctcctccttggttgtgcctctggcgcctccaggcgtgctgagggagctgccaacaacctcccccgcctcgcagcaagagcttgctcgtggatggggcgggcgcgtgcacggagggggaggtgggggcacagtgctgcctgttgtcctcttgggaggtggccggcacggggagcagcgtggacggcggcatga

SEQ ID NO: 128029 - DNA, 474 bp, Zea Mays
atccacgagatcaagggcttccttctcacagcgaggaggaatgatgcccattccgtgaagatcaagaggagcaaggatgttgtcaagttcaagtatccaatcgtttttccaggtccttcccccgcgacggcgccgagccgggcagagtgctccgtcgacctcaagctcggtgagctaggcgagtttgaggcagcggacggcacgaccacgaaggagccggcggctgcaaccgcagtgtcgtccgccagcccgatgaagcgcctgcactcggggcccggcagcgccggcggggcgcagtgcccgtcgtgcgcggtggacggctgcaaggcagacctaagcaagtgtcgcgacgaccaccaccgccacaaggtctgcgaggcgcaatccaagacacctgtcatcgtcgtcgccggccgcgagatgcgcttctgccagcagtgcagcaggatctatctgaactattcacacctctaa

SEQ ID NO: 128030 - DNA, 204 bp, Zea Mays
atggggagcaaatcagctgtgctcggaatggggaagcccgtcgatgtggagctcggtgtcggtggtggcgcgggaggtctcgagatcgctagagacggaagcggcggtggcggacgaatgttgccaatgcctgctcctttctccctgcagggcacagcgtaccggaccgacgtcgcgccgacgggtgacgacgaacggcggtga

SEQ ID NO: 128031 - DNA, 1644 bp, Zea Mays
ctaataggtatgactcacgctatgtgtccactggatatcttgatccactagccactgccatctccaagctgtctccttcagattgtgtatacattataaagtataaaatattatttttttcattctttttttatttgtcgtaaatgataaatatttgagaacatagataatattttatatcgtattgtactgtttatatagtaaaatttgaaatatggagtcgatggatgtgagaaagggagggttgttggagacagtctaaacccttctccatccgacggcggacaccagcttccctccgcccgcccacatccctgctgtgtgctgcgcctccccgcctgatcttgtcgcgcccgagagaccgcgcgccagggaacgtcggccgccggagcctggcctgcattccgggggcagcgagaggatgttgcgttgcgcatacacgcagcggcggtgggcgcaccgccgggggggcttcgtaaccggcagcaccggttggtccaagccgccaccgccgggcctcggccgcgccgcgggggttggtacgaagaagtcggagtggtggacggtggacggggagatgcacgagatcggggaaagcgtgccgcatcgcgagcgcttcgccatcccgcgggacaacctccctaaccgccgccgcaagcagatgcgggagcaattcatgcgccgcacccgcctcgttctcaaagactcggaacacgaaacatggtgcaaaaattacatggaattataccaagaacttagagaaaactgggaaaggttgtactgggacgaaggttattcaaaaaagattgccgaatctcatgctaattatgactctgccgaagaagatgatattgacttctcgccatacagcaggagaaggcagtccaatgtagaaccaaacaaggaccttggcttcggggtgaacaaacgaggtgaaacgtgggaaagggttactcaaattcgtgacaaatttgaatatgacagagaaaggagaatgagagaacgagcatttgctcccatgaacactgagaacaattatgctcggcgtgacccaagatttagaagccaggatgattcaagttttgctcatacgaacatgagtgatgattttggcttgcatgttcaaacttttggaaaccgttctgatcaaagttatgaaaatgagtcaaatttcaggaataagcgtgattcaagtttccaacatgaaccaagtgacagaaaccagcgtaatttaaatatccaaaacgaaccaagtttcagaaaccaccgatatccagatttccaaaaccaaggtggcacaagaagtcagacatttgatgagtagagggtgaaaaaaaagtggctactgatttgctggcaacgtgagcatgctggttttgctgatttctgtggtggctcgtatgagatgttgtaatttattctaaaatgattggtgtaagaaattatctcttgtggtagctggttgcaacaaaatagaaaggaagagatctgctgttataatcttgtaatatacgttggctacttactaagccaaaaaccgtaggcattggattttgggcttgcacgttgctgagcaagttaaaagttggaataatgaggctaatttccaaatctgcctttgcaaaaagaatgcaggttgctcct

SEQ ID NO: 128032 - DNA, 718 bp, Zea Mays
ccttttgacaactcatcaaaatatactgttatagatagttctgcatgttaagttcttgtaatatctccctgtttcttgcagcatttgctcccatgaacactgagaacaattatgctcggcgtgacccaagatttagaagccaggatgattcaagttttgctcatacgaacatgagtgatgattttggcttgcatgttcaaacttttggaaaccgttctgatcaaagttatgaaaatgagtcaaatttcaggaataagcgtgattcaagtttccaacatgaaccaagtgacagaaaccagcgtaatttaaatatccaaaacgaaccaagtttcagaaaccaccgatatccagatttccaaaaccaaggtggcacaagaagtcagacatttgatgagtagagggtgaaaaaaaagtggctactgatttgctggcaacgtgagcatgctggttttgctgatttctgtggtggctcgtatgagatgttgtaatttattctaaaatgattggtgtaagaaattatctcttgtggtagctggttgcaacaaaatagaaaggaagagatctgctgttataatcttgtaatatacgttggctacttactaagccaaaaaccgtaggcattggattttgggcttgcacgttgctgagcaagttaaaagttggaataatgaggctaatttccaaatctgcctttgcaaaaagaatgcaggttgctcct

SEQ ID NO: 128033 - DNA, 758 bp, Zea Mays
actgcgaagatataatgatgagccagcaggttggacggtcgagattctccaaatcctagtagccgactagccgtccgcgcaaaaccctccctgctcagactcgtctgctgcagctcctcctccgccgccgtatcaaacgcactctcctccgccgccgcccgaggcaagatggttctccagaacgacatcgaccttctgaacccgccggcagagctcgagaaactcaagcacaagaagaagcgcctcgtccaatcccccaactccttcttcatggatgtcaagtgccagggatgcttcagcataaccacggttttcagccactcccagactgttgttgtgtgcccaggctgccaaactgttctctgccagcccacgggaggaaaggcgaggctcacggagggatgctctttccgccggaagggagactagagtggagtctgttattagtactggatcggttgtcaatctccagtatgtggattcaaattttgctctgtgcccagacgttaaggtcatgaactaccttagctaaggctttccgcatgttgttctggtgctgctatgtatcgcacgttggttattgctgaacttatagcttgtttggttcggattatgataaaccaaatggatatttgaattatattatggggcacttgtcgtttggatggagggaagtcagagggcaggtcacttgtagttatgttggatacttgtagttatatttaggacttcgttttctatgccatactataaagagg

SEQ ID NO: 128034 - DNA, 707 bp, Zea Mays
actgcgaagatataatgatgagccagcaggttggacggtcgagattctccaaatcctagtagccgactagccgtccgcgcaaaaccctccctgctcagactcgtctgctgcagctcctcctccgccgccgtatcaaacgcactcctgaacccgccggcagagctcgagaaactcaagcacaagaagaagcgcctcgtccaatcccccaactccttcttcatggatgtcaagtgccagggatgcttcagcataaccacggttttcagccactcccagactgttgttgtgtgcccaggctgccaaactgttctctgccagcccacgggaggaaaggcgaggctcacggagggatgctctttccgccggaagggagactagagtggagtctgttattagtactggatcggttgtcaatctccagtatgtggattcaaattttgctctgtgcccagacgttaaggtcatgaactaccttagctaaggctttccgcatgttgttctggtgctgctatgtatcgcacgttggttattgctgaacttatagcttgtttggttcggattatgataaaccaaatggatatttgaattatattatggggcacttgtcgtttggatggagggaagtcagagggcaggtcacttgtagttatgttggatacttgtagttatatttaggacttcgttttctatgccatactataaagagg

SEQ ID NO: 128035 - DNA, 641 bp, Zea Mays
accatggcatcccaggcacccaatggcgacgcggaggcgccactacttgcggccaccggtgacgcgccgacgacgaccgtcatcggcaaggcccttaacagcaccgccgacctcgccaagcacctcccgacgggcgccgtgctcgccttcgaaatgctgtcgccgtccttcaccgcgtacggtacctgcaacgccgcgaaccgcgcgctcacgggctgcctcatcggcgcctgcgcgctctgctgcttcgtcctctgcttcaccgacagctaccgcgacaccgccacgggcgcgctgcggtacggcttcatcacacccagcggccgcctgctccccatcgagggtggcggctccagctccggccccggccccggcgcgccgccgccgcgggacgacaggtacaggctgaccgtgcgcgacgtcatgcacgggctgctgtcgttcgcggtgttcctggccgtggccatggtggaccgcaacgtggtggcgtgcttctaccccgtggagtccgcgtccaccaggcagctgctggcggccgtgcccgtggcggccggcgccgcggggagcttcctattcgccatgttcccgtccacgcggcgcgggatcggcttccccgcggccgtcgcggcggcgtcctgagt

SEQ ID NO: 128036 - DNA, 1530 bp, Zea Mays
acaattcgaaatacctcgactttttcagaacaggtccgagtcaaatagcaatgattcgaagcacttctttttccattacactatttcggaaacctaaggactcgatcgtatggatatggaaaatacaggatttccggtcctagcgggaaaaggagggaaacggatactcaatttaaagtgagtaaacagaattccatactcgatctcatagatccctatagaattctgtggaaagccgtattcgatgaaagtcgtatgtacggcttggagggagatctttcctatctttcgagatccaccctacaatatggggccaaaaagccaaaaaaataagtgattcgtttttagcccttataaaaagaaaacggattcttgaacctctttcacgctcatgtcacgtcgaggtactgcagaaaaaagaaccgcaaaatccgatccaatttttcgtaatcgattagttaacatggtggttaaccgtattatgaaagacggaaaaaaatcattggcttatcaaattctctatcgagccgtgaaaaagattcaacaaaagacagaaacaaatccactattggttttacgtcaagcaatacgtagagtaactcccaatataggagtaaaaacaagacgtaataaaaaaggatcgacgcggaaagttccgattgaaataggatctaaacaaggaagagcacttgcccattcgttggttattagaagcatcccaaaagcgtccgggtcgaaatatggctttcaaattaagttccgaattagtagatgctgccaaagggagtgggggtgccatacgcaaaaagggaagcgactcatagaatggcagaggcaaatagagctcttgcacattttcgtttaatccatgaacagaatctaggtatgtagacacatggatccatacatctcgatcggaaaagaaaacaatagaaggagaatcggacgatatctttttcgaaacaaataaaaaggaaaaaaaagagaaaacagaaatcatgatcaactaagccctctcgggggcttgcttaagaataagaaagaggaatcttatggaaatagcatggaataaggtttgatcctattcatggggattccgtaaatatcccattccaaaaatcgaaacaatcgggacttttcggagattggctgcagttactaattcatgatctggcatgtacagaatgaaaacttcattctcgattctacgagaatttttatgaaagcgtttcatttgcttctcttccatggaagtttcattttcccagaatgtatcctaatttttggcctaattcttcttctgatgatcgatttaacctctgatcaaaaagatagaccttggttctatttcatctcttcaacaagtttagtaataagcataacggccctattgttccgatggagagaagaacctataattagcttttcgggaaatttccaaacgaacaatttcaacgaaatctttcaatttcttattttattatgttcaactttatgtattcctctatccgtagagtacattgaatgtac

SEQ ID NO: 128037 - DNA, 770 bp, Zea Mays
ccctgccccgcctacggagggtcgaggcacaacaagtgggtaatgcggagaagaagggaatctggttctacgactctacaaggagagggcacatgggtggtggccgtgcgtcgtgcctgtctgccctgagggctgcctgatttgctcggatctgcggtctgcctgcctgtgcgtacaacagacagggccagtgccgccggcagagtggtagacaacagactgccatgcgtgcctcacgttgtatccatggagatgaggacgacattgcctccaagtctgctccaccggcatccatcgacggtgcaagaagcaacaggtgagctcattgagccctcaatggtaggtggctggacctggtggaccgaagatcctgagccattctgcataccagcacatgggcgcaattccacagcgccaacaacaaactcctttccatacttggtggtaataaattacggagatgcattagctcaggataaacaatgctccatagatcatgaagcagatgctcccgccacctaaggatttggagattgctatagtgcaagtagagtgtagtgattatgtagctatagtgcaagcagatgcccccgccacctaagtagcttctttggtgtacacaaaataatgttcaaaggctacaagcattagccgggacatagtccaagcctgatacaagaaaagtgtcacttaacgttatgcccaacattgttttgtttgtgctacgagctgtataactatttaagcaattatgtagctatttttatttc

SEQ ID NO: 128038 - DNA, 1734 bp, Zea Mays
ccctgccccgcctacggagggtcgaggcacaacaagtgggtaatgcggagaagaagggaatctggttctacgactctacaaggagagggcacatgggtggtggccgtgcgtcgtgcctgtctgccctgagggctgcctgatttgctcggatctgcggtctgcctgcctgtgcgtacaacagacagggccagtgccgccggcagagtggtagacaacagactgccatgcgtgcctcacgttgtatccatggagatgaggacgacattgcctccaagtctgctccaccggcatccatcgacggtgcaaggtacggattcgagcctccggtccttcaatctagccaccaggtagattcgtctcagtggtggtcagattcatctcgacagtggtcagatccagcagatagattgatggcgaagaggacgactccatgtccaggcgtactccccgccttgcatcgacattgcagtttccgagcggatcccagtttccggtcgatccggccgcgtagataggagatacgacagctagaggactggctcagggaggtcgacagccgcctctgcgtccgccgccacgcccaccgtgtcatcccggcccttcccatacggcctcgcctgcgggaggaccgaggtcccttgataccaacaacggcggcctccttggggtagcgctccccgttaggcatgagtagggtgagccatcgccatcttggctgtcttcaatgcctggagctccgcgataccgccgggcactagggcataagcgagcgccgccggcctccgtaggcccacccgcccttctcctgtaccttcgccacctggctccgacgagcgcaccccacaacggtgctgctcgccgaatccgaggtggaggcgcctgcgctgtcgacggagctgtcgagcctgtggtggtgtggctgagcctgccctcctatgggctcaccgacatgctgtctcggccttcaggaacctcacgttcctgcagatgctgaacctgagctatgattggttccgtggggaggtcctggcgaccatcggccgccttgcgcatctgcaagtgctagacctgagctacaacgccttctccggtacgttgtcctccaacctcagctcctgcgtcaacttactggtgctgagcctccgtagcaaccatatccatggctagacgcggtgacccccacaccgaacacttcctcctccacggttgccgcattgtccttggtggcaacacaagctcttgtacctccagccggtgaaatcggagactcaagaattttatgttttcagcatcatttacaggtgaggtgaatttaatgctgacggcttatctcttggagcagaagcaacaggtgagctcattgagccctcaatggtaggtggctggacctggtggaccgaagatcctgagccattctgcataccagcacatggataaacaatgctccatagatcatgaagcagatgctcccgccacctaaggatttggagattgctatagtgcaagtagagtgtagtgattatgtagctatagtgcaagcagatgcccccgccacctaagtagcttctttggtgtacacaaaataatgttcaaaggctacaagcattagccgggacatagtccaagcctgatacaagaaaagtgtcacttaacgttatgcccaacattgttttgtttgtgctacgagctgtataactatttaagcaattatgtagctatttttatttcagtttc

SEQ ID NO: 128039 - DNA, 703 bp, Zea Mays
ccctgccccgcctacggagggtcgaggcacaacaagtgggtaatgcggagaagaagggaatctggttctacgactctacaaggagagggcacatgggtggtggccgtgcgtcgtgcctgtctgccctgagggctgcctgatttgctcggatctgcggtctgcctgcctgtgcgtacaacagacagggccagtgccgccggcagagtggtagacaacagactgccatgcgtgcctcacgttgtatccatggagatgaggacgacattgcctccaagtctgctccaccggcatccatcgacggtgcaagaagcaacaggtgagctcattgagccctcaatggtaggtggctggacctggtggaccgaagatcctgagccattctgcataccagcacatggataaacaatgctccatagatcatgaagcagatgctcccgccacctaaggatttggagattgctatagtgcaagtagagtgtagtgattatgtagctatagtgcaagcagatgcccccgccacctaagtagcttctttggtgtacacaaaataatgttcaaaggctacaagcattagccgggacatagtccaagcctgatacaagaaaagtgtcacttaacgttatgcccaacattgttttgtttgtgctacgagctgtataactatttaagcaattatgtagctatttttatttcagtttcacta

SEQ ID NO: 128040 - DNA, 267 bp, Zea Mays
tccggcggccggccctcagtccccgacggcggtggcgaggccgcggcggacgacgaccaggtcgtggagcccgacgagctcgagatcgcgcggtggaggaagatcttccgcggcccgaacaggtccatgtccacgatcgacgaggggacggagaaggacgacacgacgcccgccttctccacgccgtcggcgtcgcctgaccgacgcgacgcccgggccccggccctggccctcggcatggagaccgtcgcggtgcaacttcgtcag

SEQ ID NO: 128041 - DNA, 644 bp, Zea Mays
actaaccttaccaaatggcacatacgaaggtaccctgctccagcgtttacaaacccctgcttcatatgcatttattttttcactcctactaatatctccagtgttccctccacatttatcagataaaggggtaatagcaattctttgtgaacttccttgaatctcaagagatcgaggttgttattctgattcatcaacctttgactgcaaataactacgtatacaattgtgatggtgtcttcccaaaaacatttggatgttttttaattacacttaagcctttcggcacctcctccaagggaacaagttttgaaagccttagcatgttcgtttgcactggaccaatgccaagttgttccccgttattccttttttggcctttctgcacttgccttcatagtttcttcatatttcacgccatttttatttataaaagatgtttcaggtgtctgagcattgtagtggtgaaagtaagctggggattgaatacagtaggatttgaagtagtcttgccaccctcttttgtgaacataatctctcaaagcagcattcccaacaggtggttgagagaaggtgatgcacttcacatgaagcctgttatcctctttagatggagtggttgcaataactctcaagttcgcgag

SEQ ID NO: 128042 - DNA, 95 bp, Zea Mays
tccgttattacgacgccgacttcgccgaatctgcggtgtgactcagggatcgccctgatagtcaatgcgacgacgatgcctgaacatgtgtatac

SEQ ID NO: 128043 - DNA, 711 bp, Zea Mays
atgatgctgcttggcgtgccttatgccgtttttgggcttcggataatttcaaggcaaagtctatacgacaaagttccaatcgtggaaccgagtcgtatcacaagtatggaggaagctagcagtggtgtagtgcccagtgatgttcaaatatacctgagggggcacagaggaccagatcctgcaaatccagatgtgttgtgtagccaaaaggcaacagatcgtctggctgcatatgctgaggcgatgtctagtcagcacggatcgaactatgactggaggaccgcacctattgatcctcaggctgtgtatgcaactagtggaaaaccccatggaaggtactcgattttcgataatgtcatcgactcgagccaggtgacggttcagaggggaggtttgtcgaggtctgctgctcgtagctcccgtcactctactcaggatactgcagaagttgagcaactacgagaagagcttaggcaacatcaggagcggcaaagggttcaagaggaatacttgaggcaacatgctgctcaacaagaatactatgctactcagtttcaacaacaacaagcactgatacaagtatatgagactcctccagctaccttgccggcgcagcaacaagatgatgggttagactttgtcaatacgctcttcacgagtggaggtagtgagcatcactcttcgatatttcctaatgttgatcgacagtag

SEQ ID NO: 128044 - DNA, 1022 bp, Zea Mays
aaaaacagacccgcaaaaggctgtgtgagaagataagaggggaagaaattttagctaggggggcatgcatgaagaaagctttcgctagcagaaatggagccatgccggcatgtcggcgatgtcgctgtcagcatcgatcaatcgatgttgctcgcggccaaacaaggggtagcggtagcagcgtccaagcgcacgaatcgccagctccaacaagtacaaggaacaatgatgatgcgagtgagaccctagcggatcgagaaacgggaaaggtgtttggaggagagctcaccagcggacgtggaggtgctgttgccgctatccgaggtgacggcgacagagaggaacagcgtggaagggcgcggtggaggtgaagcgaggcggtggtggcccgtggaatctctgccacgaggagctgtcggagacgagaggtcgtcgaagagatggcgcgtcggtggcctgggggcggacagcaacagcacagacagagcctcgcctggtttcgactttcgactttagagacgactgacgaggaggcggcgattttcgtgcgggcttcctatcccgagaaaaaactgggatccgacgaggatatgggctgtcagggggtttgctacccaagacaaaatctggcctctattcccaaactaggccatacgcccatacatggcctatggccttggtgggctaggcccagaccattagttacattgcgaaaggattcaggtgttttttgttgggctagcaaacaggctaaaggtaataattaggttttttttctgatgtgcatttgctgtgtttgtgtgcacagcaaagtttaaaatagtgggctatagcgaagttatagcctagctataacattttggaggatctaaacctacgatatttcacttttagacgctattttacctgccaccactatagcccgatttagctctgctagctttagcactaaatagccacgctatttctacttttcatggtgtacaaaaaaataatgaatgtgatgaagaaggatgagaaag

SEQ ID NO: 128045 - DNA, 1392 bp, Zea Mays
atggttgaagaggatgtccagccccttatgtgtgacaatggcaccggaatggtcaaggcgggtttcgctggtgacgacgcaccgagagctgtctttcctagcattgtaggcaggccacgccacactggtgtgatgtccaaaagaggtattctgacactgaagtacccgattgagcatggcattgtcggcaactgggatgacatggagaagatctggcaccacaccttctacaatgagcttcgtgtggcacctgaggagcaccctatactgctgaccgaggctcctctgaaccccaaggcaaacatggagaagatgacccagattatgtttgagacattcaactgcccaacaatgtatgtggccattcaggccgttctttacctgatgactgtaactcaagtttatgtcactaaagaatttagtgctagaatacagatctggtatggtgagaacgtgttagaagttaagaagaatcctaactggatatgtccagtttgtcgtggcatctgtaattgcagcatatgcagaaccaagaaaggatggttccctactggttctgcctatagtaaggttgtctgtagcctatgcctaacctacttggtggctaggaaacgtaatggagtggatccaatgcaggcagcatgcatatttggttctaatgttggtagtatgtatgtaccaatttgtcaaagatccaacaatcctaacagtctagcatcttccttcgtgcaggtggttgaacttgggtacaaatctgtttcacactttttaattgcgacacatcgagcatcatcagataactcagaggattcaagcccagctgtcaaagagaagtcgctgtctgctaaatctgaaagctcatgcatttccgatcatgatggcccggatgccaatgagaggcctgaggatggtgaaacgagcagcaaagctaaggtgaagaaagcaacccgcctcaaagtgaagaacagttctgacggcgacaaagaagacagcagaagcgagtccgtggtgacatctgagtgccaggatggccatcaagccaacacggaggctgggtgtgtcactccatcgtccaagccagtgtcaaggaagaggaaaggctcggtcccttttgcgatgaagttgtggctcttccacttgcaagcagttcatggtatgctagcgaagatgtttagtttcagcagagaacgtatccttattgaggagaacaagggcctcctctctgcatcctccttcgataggcctcgtgcaagaaggcaagaggagggctctaatccctctcctgatgtaggctacatcagtgaaatattgaagcttatacctgaagagtttggaccaaggcgaagtctactgtcactcgtgtttgatgttcagttgctgaagatcatgtga

SEQ ID NO: 128046 - DNA, 843 bp, Zea Mays
atggccaccccgtccgtggtgcaggcccctctatgcttcgtttctccacagggtgattccatgtcccgctcgcgatggcccctgcactaccgctttcgattcaagggtcgcctcgccgcagacaaagcccacgagggcgcacaaggagagccccgacggttttgtcacgaagccagagatgctgaccgatgggatagtgaagctgatgatttggcaccgcaccattcccagcatgcaaggatgccattttctcgatggggagaacagaatcgggacaggaatggagatggaggaagacgaccgagccgctcgagtgctgctgagctcccagtgtctctgtctctgatgaggaggtacacactaaatgagaagaaagtgcagattgttgatacgacttgctcttgtttttcaaagaataatattgcagaacatggacacaatgcaaccaagcatgtagcctcattaatcagtgtagatacgcctaaagtcggccctgacatacagcaacgcacaaccaagaaaaggcataaggtgactgctgacgaaggtacggaagcgactgaaggggtggtgtcagctgcgcatgttccagaggatggcaccactgttacaccaggaactgggaggagcactgatcatcagtactctgaaagggcgagcgattcttcaaccgctgtcggatcatcgaagggccacaacgcgagcctgaggaggctatacaggtcgatgaacgtgccggtgccgtgccccctgccatcgctcgtccagctgatggcggcctccaagcggcctagagtctcaaactgcgtagctgtaggttcagtttttgctgctgcaaaatga

SEQ ID NO: 128047 - DNA, 291 bp, Zea Mays
cacattcctttatgtccttctgatgatgagatctttcctttcaagtttaagaggactcaattccatcttagactcatctttgctatgacggtgaaagcacagggacagacaatatcccactttggagtatatctaccaaattcggtcttctcccctggacaattatatgttgccttatcacgagcaacaacgagaagcaatgtaaagatacttgcggctggagaaatggttccaagcaaaaacttgaatgagacatatacaaagaatatagtgtacaaagaagtcttcact

SEQ ID NO: 128048 - DNA, 297 bp, Zea Mays
atggccccactggcggcgcgggaaagaggggtgtggatccggacggcagagaggcatgcactgtttgacaacgacggcgtggatctaaggccagacgacattggcggctctgatccggggttggacggacttcgctggcaaggacagagggaggtggtcgccgacgttggagaggcgggattggctgggatggggcgccggaggaggcgcacacgaatgtgtagggaggggcgatgtccaagcacgcgagcgtcgaggcttgtccttgaactacgacgagcggcaccgacgctctag

SEQ ID NO: 128049 - DNA, 762 bp, Zea Mays
gttgtgaaaaatgaatagagaaaaatgaaatagaatggcagaaaacctaaacgtgaggttggcgaaaagagaaaagaactagagcatcccgtggagagaaggcggcggcagcgcctgtgggagatgtcaatcctgtgggagaagagcgcgggttggcgatggctggttcggcggacgcgtgactcgaagcccttctttttcacgttcgcggcgctgtgcggcgtcgtccccggcgtaatcggctacggcgtgatgcagctcaccggctcccgcaacgagcagctcgaggcccaccttcgctccacggcccgtcccgagaccacgatgatggggcaagtgaacagggagaggctggcggagtttctcggcgagctgcaacggaaagaggacacgaacgacaggtacgtggccgcgctgaggggggagaccctgaccaggaagcgctacgagcgcatccagcccttgcctgccgccaacgcgcaagcgagccaggagactgccggagccagcgcggaggaggagaggcccaaggcaaagtgagtcatcagcgagacgtgcctcagtcaatttttacttgctggacatacgcatgcttcggcataatgtaagcagtcagcgcctgtgaaacgtcattgcgcttggggtatttgactcccttttgttttaaacgctgctgatgtaaatcttttgtgcatttcccgtgagaaggcgtattccgacagaccgtacaaaagctgatgatgagcatcagattcgtgggct

SEQ ID NO: 128050 - DNA, 835 bp, Zea Mays
aaaacagaccccttctttactctaaccatatctgccgcaaaccgcaacacacaatccagagcgaggtcgtggcgtggactccaaatccttcctcttcaggactcaacagcggagttcgctccgaccacgggccctgctgccatggcggcggcggcagatcttgagcctcagttggggatatcgccggcgacacccgacattgtccgcaagctagctcgaccgtccgggacaaccaccgcagttggctattgctgcactgctctgtacaccagcacggctgctggccccggaaaggtggacggcgatggccttgcctcggtgccgttgcatgcccatgaacattctcagtccgccgcactggataatttggtccaagtggactgtgatcccgtgggcactcaggagtccagcaccttgcctgcactggtgggcgagtcctctggcaaggttgcacagcaagagcagcagcacaaggaaggtgttgatagtgccagagatgcaggtgctgcttctcctgcccctacttctactccggagaacatggagcccacacctcggaggagggggaagaagtcgaccaagggggttcaacgtctcaaagtggccaaagataaagtgatgaagctcaaggtgaccacgcctagtacagtaaaaaagaagaaaatgacagaggatgatattcaacatattggtgcccacaggtctaatagtgcaagacgcaagttagatttggatttacattcatcagaaagtaaaacatgtttcagcagagccgagctgatgattaatttgaagtgcattggcaagagttatggtttaatcagtgaactgacta

SEQ ID NO: 128051 - DNA, 2282 bp, Zea Mays
ccaagcttttatgaatatagcggcgaagtttcctaagagtgagagacactgtcaagataatgcgactcaattaatagatggtgtcgatagaaaaatgaagtcaaaagaagcatttgataactttgacttggttcattcacattttgatgaatacattaaatctgaggaagaagttgactttgataaaaaggtgaaaagtcaatacggcgaagactacaatagaattataggaaattttgctgcaagtatgaagcagaaaaacatctctacttgggacagtgatcttatgaatttagtgaaagataaatatggaaatccagtgtgcgacgagaacaacttgagaaagatcttagcttcactacgacaaccagtcacagcatctaattggaaagagttacaggaggaagcatataaaaaaggatacaataacaaaagtcaaactgaaacaagtgatgttgtagattgggaatcagttctaaacgctccattttctgaggttgcaaaatgcattgcaatcaggggacagcacaacattttggctgtgcggatactggcttttctcgaccatgtaaagaaagctcaagatggaagctttgacctagattggcttagatttgtatcacgtgaaaaagccaaaaaatttctgcttagtatacatgggattggagtgaaaagtgctgactgcatttgccttttgtcattgaggcatagagcatttccagttgatgtcaatgtagctcgcatagtgacaaggctaggatgggtcaaacttcagcccttaaacggtgctgatttccacctaattgacctttatccgatcttggatgatgtacaaaggtatttatggcctcgattgtgcaccattgataaggaaaagttgtatgaactgcactgtcttatgataacttttggaaaggtagtttgcaggaaaaaaaatccaaactgcggagcttgtcctttcagtgcaagttgtaaatattacaatagttcacttgccaaaaagtcgctacctcttccagagaagcatgaacaaggagaacagcaaacaagcatggttgcttatgggagttgcacaccaagttctcaacaaatgtatcggtatcaaattgcaataagcagcactactactgaaacaccacccatccatagctgcgagccaattgttgagatgccaccaagcccagaatatgaatacaatgaaacacctaatgagcaagaagatttctacgaagattatgcatgtgatattgaagattttgcaccaggagtacaatatgattctgaaataaatatttgttcaaacaagcatacgctgaacaataattcttggacaccgaactgtgggaaggacttggctgtgatcaatccaaagtgtagctttggccaaagtaaaaaactaaaaaataccggtcgtcttaggacagaacacaatgcatacgtcctcccagatggtcatgtaatcctagaagagttcgaagacagagttccgggagatagatgtccttacctactagtggttatttcatgtcctgatgactacaaagttaaaggcacggttctgataccgtgtcggacagcaaatagaggaaagtttccactgaatggtacctacttccaggaaaatgaggtttttgcagattactcatctagccgaaacccaataactgtacctagggaatgtattgggatgctggagagaagcattgtatactttggttcatctatacactcgatcacaaaaggtcaaacaaggcaagatatacaggaatgcttgaaggaaggatatatctgtgtacggtcgttccaccggaagaccagaataccactacgcctatgtagcacactacatgctaccaacaccaaacctgctcgtgagaagcctatgaagcggactaggacatcgccggaggggaagaagaacgggacatcgccggaggggaagaagaacgagagcctcttctgatgcttgacttcgtgtacaagttgtagctgaatgttcctcaaaatataggattaactagttctgtaacactaacaccccggcttggttatgacttagaaactgttaggccatgtttggttcacatctcctaaagtttagtcacttgtttaaaaatgttaaaggaggtaactaaaaaaaacctcttaaataggacattatagggactaatgtttagttcctaaaatttaggagatgactaaaggaaccaaacatagtttactaagccttagtaaacgtgtgaataaatgcctctcttgtgtggcggctatttttatttctg

SEQ ID NO: 128052 - DNA, 456 bp, Zea Mays
atggcactcggcgggctcgtaaacctggcgctatgtctcctgtgctcgtccgtggagcttgtcgccacgctgctcctccgcggcctcgcactcttggccgtcgccacggtgcagctgctcaggctccccggccaggcgggcagcgcggcgctggaggcgaccaagggcgcgatcgacgcggccgtggagctcgtcctcggcgtggcctgcgacgcggtcgtggccgtcgtctcggcgctgctggacttcctgtggagcgtcgcctcgggcgccgcggccctcacgaccagtgcggtgaccgagctcgtagaggcggcgcgggacggcggcgaggaggccgccaaggccctcgcggccgcgctggagggcgcggtggacgcgacgctggccgtggtcaccaggcttgtggagagctacgtggatgcgcttgggcatgtcgtggagaacctcacgtga

SEQ ID NO: 128053 - DNA, 520 bp, Zea Mays
atgaattttctatgaattatcaaagttctagcaattattttcatattaaaaatctattttctattttatttattcaattaaaacgatcactggactgggcgacaaaattgcagaaagcgcgagggctctggcgcaaatgttactaagactcagaaaacccaccaggtggactgcgggttgttttgacataaaccgaggggcccaaatgcaatttagacccgcgaagggggtatcctgtgttttcagtcgttggattggaaatctacgtccgttaattaatgaggcgaaggggtaagctgttctaatcccgcgcgttcacccgcagatcaacggacaccgatcaaccatcgccagatccgatcggagccacaattcccagatccaacggtcgccaatcctccaagccaagatctaatcgtatccgtttattacgtgatcaacgatcacgggcccgtcttctacccctatacagacccgagtggtgcgtttcccagggatggcggcgccccagttctcacgg

SEQ ID NO: 128054 - DNA, 103 bp, Zea Mays
gttgagtgcccgtgcgttgcaacggtatacaaaatattcagcaaaatgttattgcacaacaattacataaaaaaataccacatatattatcgatctcaatatc

SEQ ID NO: 128055 - DNA, 132 bp, Zea Mays
atattactaatacataacatgtgcatagaaaagagtggattcgttcgagagaccaaatcgttaatcccaactgccttccaacaccatctatcccaaaaaatcttaatgcgtccaaaaaaaatacaaaaataa

SEQ ID NO: 128056 - DNA, 1409 bp, Zea Mays
cgcgcccctcggcatctcaactacctcgtgatgcctcccccacccccgatctataaaccagccgctcgccactcctcccgtatgctcacctcgacgtccacgatctgcttctcccccgcgcccctcggcaagctcgcagtccaggatccgcctctcgcgcgcccccgccgacgcacacagctcgcagacggcgccccccatatccacttcttgctggccgctcagatcctctgtatccctcctcttgctgcagatgatatgctagagcgtcagcaaggcggactctccatccctccagagagggagggaggcagcagccaatgcccagcacgtaccaatctgcgtgacaggaggtgtccggactgcgtacccacgggcgagcaggattttgacgatccacgacccgatgaagtcgccggcgtcggtgacgcacaaggcggcggtggccatcgtgcgctgacgcccagtcccttcttcctctcggggcggtggtgccgccaggcgaatggattcgtccgagagcgagcaaataggggtaagcatttatcaagcggaagtgggaagaaatggtacagtgtagtggaggaaatgacacaggacacaagcggaagctggcatctcaaggcggtcgcactcgcacagttagcaatgcactcccctaatttctgcccttttatggtttcacgattatctgaatatggagttcaaggattgatcttttctgagttctttgttgccatattttctgtccatgtaataaggttgtggctaaaatattgtgtcaatcgggcttgtgtgttgcagttctattcttgcgtagtgcagctccgaagtcgctgctaccaggtgcccccgtgcctatcaagtatcaacactgcttatcaacgggctatacccttgtatggtggacattcacgaagagcaagctccagcaccgttgctgttctggtctcgaccgtggagatggaactatgattaaaagaaaagagaacactacggaaggaacctactgatgctcagtgtactgcgactttcccacgatgctcatgatgtcgaagtctgcagttgctagactggcccgagtaattgctaagttttgtagaaaatgtttaggcccatttttgaacgcatgaatttcgtatagactgtatttcacacgaaatacacaggaacaaacatttttcctgccttccaaacaggctgttaggattagttgaagttccagtttgatcataggcacctaggtcgatgctctttagtaagatgtaagtaatctgtcttctggccaggttgagcaaggcttagctgcagtgtatcagtgtggtacaactgatgtatttatactgtacaacctaatgagactgtatggattagagctataagaacctgcacagatatttcacaataaa

SEQ ID NO: 128057 - DNA, 1537 bp, Zea Mays
ctcgtatcgtcccgggctcctctcaaaagatcacagagagagaaaacgaaacgccgctccctcgcctcatcccttccctcctcctgcatcctacctccctggtgcccgtcacgttcaccacgttcgcccgctcattcaccggcggcgtcgcccagctcggcctcccgccgcccacggaggccaggtccccgggccgcccgctcggtccgccacggaggcaaggaattggttcttttagtacttgacagaaataaatatattccaggcatggtggcgtctttagacaatgtgaggggcttgactttagccatgtcatctagtgcattcattggttctagctttgtgatcaagaaagttggattgaagaaggctggggataatggggtgcgtgcagcttctggaggcttctcatatctatatgagccgttatggtggttgggaatgataactatgattctaggcgaggtagccaattttgcagcatatgcatttgcccctgccgtacttgttactcctctaggagctctaagcatcatatttagtgcagtgctcgcacacttcattctgaaagaaaatttgcacatgtttggcgttgttggttgcatactatgtgttgttggttctgttggtatagttttgcatgccccaaaggagagaaaaattgattctatgaaggaaatatggcatcttgcaacacagccaggttttattgtttattcatgcgtggcagtggcctgcgttctttttttgatatttcgggttgttgagcgctctgggcacagattgatgcttgtttacatagcaatctgttcattaatgggatctcttacggttatcagtgtaaaagcagttgctattgctttaaagctatcatttggtggatcaaatcaattcatctacgtccagacatggttcttcatagtagtagtcactatttgctgcttggtgcaattaaactacttaaacaaggctctggactcgttcaacacggctgtggtttctcctgtatactacgtgatgttcaccattcttaccattgttgcaaacatgatcatgtacaaggactgggcctcgcagactgcaacgcagatcgcaacacagctatgtgggtttgtgaccattgtcgcggggacttttctgcttcacaagactagggatatgggaaatccaccaccaccaccacctgaccaaatgtgcctgcaagaagccggggaatgtgctccacggtcaatgaccagttctagctgaacacactaagatgtcaaaatctcacagcctctatggactgaattggaattttgagctatatggtgacctttgtagatatattaggaaggagtaaagattggagtgcccagcagttggacataccgatgaagttttacgtttctgcaaaagaaagaatgaactgtatgaaggcatcggaatcttgtgaagacatgagattcaaactagctacctaactttggtaaatagcttgttatgccattttaaaacgatcatgatgctcaagaggcagggcgaattaggcttctct

SEQ ID NO: 128058 - DNA, 1494 bp, Zea Mays
ctcgtatcgtcccgggctcctctcaaaagatcacagagagagaaaacgaaacgccgctccctcgcctcatcccttccctcctcctgcatcctacctccctggtgcccgtcacgttcaccacgttcgcccgctcattcaccggcggcgtcgcccagctcggcctcccgccgcccacggaggccaggtccccgggccgcccgctcggtccgccacggaggcaaggcatggtggcgtctttagacaatgtgaggggcttgactttagccatgtcatctagtgcattcattggttctagctttgtgatcaagaaagttggattgaagaaggctggggataatggggtgcgtgcagcttctggaggcttctcatatctatatgagccgttatggtggttgggaatgataactatgattctaggcgaggtagccaattttgcagcatatgcatttgcccctgccgtacttgttactcctctaggagctctaagcatcatatttagtgcagtgctcgcacacttcattctgaaagaaaatttgcacatgtttggcgttgttggttgcatactatgtgttgttggttctgttggtatagttttgcatgccccaaaggagagaaaaattgattctatgaaggaaatatggcatcttgcaacacagccaggttttattgtttattcatgcgtggcagtggcctgcgttctttttttgatatttcgggttgttgagcgctctgggcacagattgatgcttgtttacatagcaatctgttcattaatgggatctcttacggttatcagtgtaaaagcagttgctattgctttaaagctatcatttggtggatcaaatcaattcatctacgtccagacatggttcttcatagtagtagtcactatttgctgcttggtgcaattaaactacttaaacaaggctctggactcgttcaacacggctgtggtttctcctgtatactacgtgatgttcaccattcttaccattgttgcaaacatgatcatgtacaaggactgggcctcgcagactgcaacgcagatcgcaacacagctatgtgggtttgtgaccattgtcgcggggacttttctgcttcacaagactagggatatgggaaatccaccaccaccaccacctgaccaaatgtgcctgcaagaagccggggaatgtgctccacggtcaatgaccagttctagctgaacacactaagatgtcaaaatctcacagcctctatggactgaattggaattttgagctatatggtgacctttgtagatatattaggaaggagtaaagattggagtgcccagcagttggacataccgatgaagttttacgtttctgcaaaagaaagaatgaactgtatgaaggcatcggaatcttgtgaagacatgagattcaaactagctacctaactttggtaaatagcttgttatgccattttaaaacgatcatgatgctcaagaggcagggcgaattaggcttctct

SEQ ID NO: 128059 - DNA, 1365 bp, Zea Mays
ctcgtatcgtcccgggctcctctcaaaagatcacagagagagaaaacgaaacgccgctccctcgcctcatcccttccctcctcctgcatcctacctccctggtgcccgtcacgttcaccacgttcgcccgctcattcaccggcggcgtcgcccagctcggcctcccgccgcccacggaggccaggtccccgggccgcccgctcggtccgccacggaggcaagcttctggaggcttctcatatctatatgagccgttatggtggttgggaatgataactatgattctaggcgaggtagccaattttgcagcatatgcatttgcccctgccgtacttgttactcctctaggagctctaagcatcatatttagtgcagtgctcgcacacttcattctgaaagaaaatttgcacatgtttggcgttgttggttgcatactatgtgttgttggttctgttggtatagttttgcatgccccaaaggagagaaaaattgattctatgaaggaaatatggcatcttgcaacacagccaggttttattgtttattcatgcgtggcagtggcctgcgttctttttttgatatttcgggttgttgagcgctctgggcacagattgatgcttgtttacatagcaatctgttcattaatgggatctcttacggttatcagtgtaaaagcagttgctattgctttaaagctatcatttggtggatcaaatcaattcatctacgtccagacatggttcttcatagtagtagtcactatttgctgcttggtgcaattaaactacttaaacaaggctctggactcgttcaacacggctgtggtttctcctgtatactacgtgatgttcaccattcttaccattgttgcaaacatgatcatgtacaaggactgggcctcgcagactgcaacgcagatcgcaacacagctatgtgggtttgtgaccattgtcgcggggacttttctgcttcacaagactagggatatgggaaatccaccaccaccaccacctgaccaaatgtgcctgcaagaagccggggaatgtgctccacggtcaatgaccagttctagctgaacacactaagatgtcaaaatctcacagcctctatggactgaattggaattttgagctatatggtgacctttgtagatatattaggaaggagtaaagattggagtgcccagcagttggacataccgatgaagttttacgtttctgcaaaagaaagaatgaactgtatgaaggcatcggaatcttgtgaagacatgagattcaaactagctacctaactttggtaaatagcttgttatgccattttaaaacgatcatgatgctcaagaggcagggcgaattaggcttctct

SEQ ID NO: 128060 - DNA, 1479 bp, Zea Mays
ctcgtatcgtcccgggctcctctcaaaagatcacagagagagaaaacgaaacgccgctccctcgcctcatcccttccctcctcctgcatcctacctccctggtgcccgtcacgttcaccacgttcgcccgctcattcaccggcggcgtcgcccagctcggcctcccgccgcccacggaggccaggtccccgggccgcccgctcggtccgccacggaggcaaggcatggtggcgtctttagacaatgtgaggggcttgactttagccatgtcatctagtgcattcattggttctagctttgtgatcaagaaagttggattgaagaaggctggggataatgggcttctggaggcttctcatatctatatgagccgttatggtggttgggaatgataactatgattctaggcgaggtagccaattttgcagcatatgcatttgcccctgccgtacttgttactcctctaggagctctaagcatcatatttagtgctcgcacacttcattctgaaagaaaatttgcacatgtttggcgttgttggttgcatactatgtgttgttggttctgttggtatagttttgcatgccccaaaggagagaaaaattgattctatgaaggaaatatggcatcttgcaacacagccaggttttattgtttattcatgcgtggcagtggcctgcgttctttttttgatatttcgggttgttgagcgctctgggcacagattgatgcttgtttacatagcaatctgttcattaatgggatctcttacggttatcagtgtaaaagcagttgctattgctttaaagctatcatttggtggatcaaatcaattcatctacgtccagacatggttcttcatagtagtagtcactatttgctgcttggtgcaattaaactacttaaacaaggctctggactcgttcaacacggctgtggtttctcctgtatactacgtgatgttcaccattcttaccattgttgcaaacatgatcatgtacaaggactgggcctcgcagactgcaacgcagatcgcaacacagctatgtgggtttgtgaccattgtcgcggggacttttctgcttcacaagactagggatatgggaaatccaccaccaccaccacctgaccaaatgtgcctgcaagaagccggggaatgtgctccacggtcaatgaccagttctagctgaacacactaagatgtcaaaatctcacagcctctatggactgaattggaattttgagctatatggtgacctttgtagatatattaggaaggagtaaagattggagtgcccagcagttggacataccgatgaagttttacgtttctgcaaaagaaagaatgaactgtatgaaggcatcggaatcttgtgaagacatgagattcaaactagctacctaactttggtaaatagcttgttatgccattttaaaacgatcatgatgctcaagaggcagggcgaattaggcttctct

SEQ ID NO: 128061 - DNA, 1360 bp, Zea Mays
ctcgtatcgtcccgggctcctctcaaaagatcacagagagagaaaacgaaacgccgctccctcgcctcatcccttccctcctcctgcatcctacctccctggtgcccgtcacgttcaccacgttcgcccgctcattcaccggcggcgtcgcccagctcggcctcccgccgcccacggaggccaggtccccgggccgcccgctcggtccgccacggaggcaagcttctggaggcttctcatatctatatgagccgttatggtggttgggaatgataactatgattctaggcgaggtagccaattttgcagcatatgcatttgcccctgccgtacttgttactcctctaggagctctaagcatcatatttagtgctcgcacacttcattctgaaagaaaatttgcacatgtttggcgttgttggttgcatactatgtgttgttggttctgttggtatagttttgcatgccccaaaggagagaaaaattgattctatgaaggaaatatggcatcttgcaacacagccaggttttattgtttattcatgcgtggcagtggcctgcgttctttttttgatatttcgggttgttgagcgctctgggcacagattgatgcttgtttacatagcaatctgttcattaatgggatctcttacggttatcagtgtaaaagcagttgctattgctttaaagctatcatttggtggatcaaatcaattcatctacgtccagacatggttcttcatagtagtagtcactatttgctgcttggtgcaattaaactacttaaacaaggctctggactcgttcaacacggctgtggtttctcctgtatactacgtgatgttcaccattcttaccattgttgcaaacatgatcatgtacaaggactgggcctcgcagactgcaacgcagatcgcaacacagctatgtgggtttgtgaccattgtcgcggggacttttctgcttcacaagactagggatatgggaaatccaccaccaccaccacctgaccaaatgtgcctgcaagaagccggggaatgtgctccacggtcaatgaccagttctagctgaacacactaagatgtcaaaatctcacagcctctatggactgaattggaattttgagctatatggtgacctttgtagatatattaggaaggagtaaagattggagtgcccagcagttggacataccgatgaagttttacgtttctgcaaaagaaagaatgaactgtatgaaggcatcggaatcttgtgaagacatgagattcaaactagctacctaactttggtaaatagcttgttatgccattttaaaacgatcatgatgctcaagaggcagggcgaattaggcttctct

SEQ ID NO: 128062 - DNA, 723 bp, Zea Mays
cttttatcatgcacattcatttaagcttctaattaaccttctctttaaaatactacacccgttatgtatctttagaagtatactgagatttgacgctacttttaaactacattctgctaatgtttagaccaaagcattcactgtgttgactgccccctgtatgggtatgggttattcattgaatcattactaaatgatgttaatgccatgtgcgatattttttttcggtgacatgctggcatattgaacacaatctgttgtgcactgttcaaatattattgcccaactgatgtctgatatatgccttttccatttaccttgtataggaacttcaagctgtccgtggccaacttgcttctgagcagtcaagatgtttcaaacttgaggttgatgttgcggaacttcgacaaaagcttcagagtatggatgcattggaaaaggaggtcgagctgcttcggcgacagagagccgcttcggagcaagcagcaatggatgctaagcagaggcaaagtttgggtggcatgtggggttggctcgctggaagcccgacaccagcagtttagttccgtgattcatatattttacttgtaacattatatatcatttgactgacaccctgtacaatttttttgtttggttatttacgacattcgtgttcatttggaccacacaaaaaataaggtgttccggcgatcgttatactcacaatcactcaaaatgtat

SEQ ID NO: 128063 - DNA, 192 bp, Zea Mays
aggcaaggaaatcaagtgcagaaaacggcatagaagaaagcagtatgtggatcaagagccatgcattatgaggggggtttatttcaaaaatatgaaatggcaggctgccataaaagttgacagaaacagattcacttgggtactgttgggacacaggacgaagcagcccggctttatgataggtatacttga

SEQ ID NO: 128064 - DNA, 952 bp, Zea Mays
gttgttgttggcgatttcttcctcttcccctgtgtttgaaaccataatgaaatgatacacaattctcctgcagattgcgtgtttgagaaaaaaagaaagaaacacttgtatgcataaaacctatctatttcatctctccttattcccctggtaaaacatatgattcaaaatgtcgcagagtttactgttcagtggtttggctttctcaccaaacttaccaattctgattgtgccatacagatttcttttgttatcattctttgttgggctttctcatcgcctgatttctaaactaatgattcaaatgttgcgcagggctgcttttatgtgtggaagggagccaaacttcgtgctttctgaggaagagaagcaggagctacggaggtacacctgggaggacttcttagcagtgactcgcaacacgataaccagcaaaaaacaaaggaaagtcggatcactaaggcgtagcaaggcagacctgttcatgggacagagtgacggcgacaccgagatggccaatggtggcggttcatcgaattccgacaatggcgacgcggggacgtcggcgtcatagatcgctcccaggggttctgccgttgtggcaactcaaagtggagtcctccagcacattcatcccggtcatgcatgatacgagctccgtctaggattttgttctctcaataattaatttccatgtgcataaggccccgttggtctaatcaaatcaaaggttagggaaaccatgccatctcagacgagaattagaggtggtccattgttagaaaacagttcatctgaatagtaatgtataccggttctgaaaactgtgtatatctaccgataggttcaccttacattttgcccagtgtaattagtttaccttataatttaccaaaaaggaataatttttccctttccgttaataccatctctatactagtgggaagaaaat

SEQ ID NO: 128065 - DNA, 1194 bp, Zea Mays
agccagggcgcagcaccctctatccgttcttcagccggcgcctcccacgtctccagtccgacactccgactcactccccctcccccgccccaacccgtcgcaatggccgccgtctccgcagccccgaggccctcgatgcctccccgactcgccctccgtgcccacctcttctcctccgcctctccgctcccaatgcgcgcgctccccttactccgcagccgcttccgctccttgaccacggcctacgctgtcaagcaggacacggccctctggacccctgcacccgtctccgccatcagtgctgccaccgacgacggctccgtctccctcatcgccgtcgacctatctgacgccacggacctcgtggactcgtacacgaacccgggccaatacctcctgatccgcgtacccggcgaggagctcaagccggcgtacatggtcatctcctcgccgcctaaagcggggccccggttcgaattcctcgtcaaaagcgtgccgggagctaccgcggggcggctctgcgccctccgagacggggatgttgtggagctcggcgccgtcacggggaaggggttccccctcgacaggataaatccgcccgacgtcgcgcagaccgtgctcatcttcgcggcggggacggggatcagtgcgattcgatcacttatcgagttcggtttcgctgccaaagaaagagctgatgtgaggctttattatggtgatacaagtctgaaatctatgtcataccaggaaaggcttagtaactgggagtcaactggaattaaaataataccagtcttatcacaaccagatgacagctggaaaggtgaacgaggatatgttcaggatgctttcttcagaaacaagaacatagtaaatccatcttctacaggagccatactttgtggaccgaatgaaatgcaggaggaactcaccttatcccttgtagcagatggtgtctcacgagacaaaatcttaacgaactactgaaagcgatctccggtctctgatgtattttatgaccagttaggcctcaacgtgtaaactttattgcttaggcctggctgtgatgttccagtgatatatgaataaactactgaacttgagacgaggatgtaatgttcagtgatatattatatgaataaactactgaatttgaggcgaggacaatactgtggtcaagtttcggtttggttc

SEQ ID NO: 128066 - DNA, 1096 bp, Zea Mays
ggcgcctcccacgtctccagtccgacactccgactcactccccctcccccgccccaacccgtcgcaatggccgccgtctccgcagccccgaggccctcgatgcctccccttactccgcagccgcttccgctccttgaccacggcctacgctgtcaagcaggacacggccctctggacccctgcacccgtctccgccatcagtgctgccaccgacgacggctccgtctccctcatcgccgtcgacctatctgacgccacggacctcgtggactcgtacacgaacccgggccaatacctcctgatccgcgtacccggcgaggagctcaagccggcgtacatggtcatctcctcgccgcctaaagcggggccccggttcgaattcctcgtcaaaagcgtgccgggagctaccgcggggcggctctgcgccctccgagacggggatgttgtggagctcggcgccgtcacggggaaggggttccccctcgacaggataaatccgcccgacgtcgcgcagaccgtgctcatcttcgcggcggggacggggatcagtgcgattcgatcacttatcgagttcggtttcgctgccaaagaaagagctgatgtgaggctttattatggtgatacaagtctgaaatctatgtcataccaggaaaggcttagtaactgggagtcaactggaattaaaataataccagtcttatcacaaccagatgacagctggaaaggtgaacgaggatatgttcaggatgctttcttcagaaacaagaacatagtaaatccatcttctacaggagccatactttgtggaccgaatgaaatgcaggaggaactcaccttatcccttgtagcagatggtgtctcacgagacaaaatcttaacgaactactgaaagcgatctccggtctctgatgtattttatgaccagttaggcctcaacgtgtaaactttattgcttaggcctggctgtgatgttccagtgatatatgaataaactactgaacttgagacgaggatgtaatgttcagtgatatattatatgaataaactactgaatttgaggcgaggacaatactgtggtcaagtttcggtttggttc

SEQ ID NO: 128067 - DNA, 314 bp, Zea Mays
cggtaagtttcagtttttttctgctgttacaacttaatagactaaagagactacagaaattctggattagcagtcattttccagaaaaaaaacttcatgtttgatttctattggctgcacaggaataaaagaataaaaataaagagaaatctagacagctgttgtttagtgcagatagtggattgtgcatgcttctgtccatttttttctttggtgcatttccccagatcttctttggagttggcagtagtcgtaactagtaacgatgtatttgcctgctgtcggtagactatatatgccgacaaggagctggg

SEQ ID NO: 128068 - DNA, 687 bp, Zea Mays
atggcatggggaggtctgttcttgtgcatgggccgccccacgcaggagcaacagaagtcctgccttgcagccgctggtggcttcaactacgacacagctctccaaggcgccacacgcccaaagtcagtgtctaccttgacctctgacgaagctggtggcgaaataggtgacaaggatcttaccgagcgtggattctttgtgaaccgatcgcgtgttctggtcggctcaggttctgacgcctttgtccatgccaaatctgccctcctctcatggaggcacttggctttagggtgggcgaacgtggaaccggacaccccggtgaaggtaggtacaaggttctgcatctgctacaaggagttgatcccctgggtgacgctgccgcttcagatagcgtatgtgaccgacgtcgattcagacacgtccaaagggtgctcccggtccaagatgtttgccttcggcagcggcactctacagggccatctgctggccggagaggagcggttctcggtacaggtggacgaggaggagagggtgtggtacgaggtgctttctttctcgaagccggcgcacgtcctggcgacgctgtgctacccgtatgtgcagctgaggcagaagcatttcgcgcagcagtcgggacaggcgctcgtcaggcatgtgtccacctgctcttccaagcagaagcagtag

SEQ ID NO: 128069 - DNA, 873 bp, Zea Mays
gtatcgtctccctctttcacatatccccacactcatcgccctctcgctccacataaccacattcccttcccaccacctttcctctctctctcctcggccgccgttcctgctccgtccacccccaccacatgcggcggcgcgggcgcctccccgcggtgctgtggctcgttgccgtgacgttggcggcgctgctggcgcggccggcgaacgcggcgtggtgcatcgcgcggagcggggcgtcggacaaggcgctgcagtcggcgctggactacgcgtgcggccccgcggggggtgcggactgcgcgcccatcctgaccagcggcctctgctacctgcccaacacgctcgccgcgcacgcctcctacgccttcaactccatcttccagcgttcccgcgccgcgccgggggcatgcgacttcgccggcaccgccaccgtcacgcttaccgaccccagttatggatcatgcacctacccttcatctccaagcactgccgggcaaacaggatcacctggttcaacatccatgccagggactcccacgtctttgtcgccaaaaggcactggaagcaccggaggattgaacccacctgacgtcgattctaccgactccaatgctgaacctctggcgaccgcgtccctctcatctcttgctctgctctgtttcatgtacatgttcttgcagttgtggtgatgcatggatgatctagctaggttcagtagagcattgagacgcagtattgttgttgcatcatgatacaggagaccacaccacagttttgttccagggaattggttggtttgtggtaagccgttcaagtgtaaggcaagagtacccattggttggattctcaactcattaggcttcttttcgt

SEQ ID NO: 128070 - DNA, 324 bp, Zea Mays
ctgtctttgccccctctgaacccctcctctaccttttttcagtgaaacatgcatttatcttctcataaattttacaagtatgtatggaatttacttactaaaaaatatatattttgcatttcaggttatggatcatgcacctacccttcatctccaaggtaaatgcattaaatttactagtctctatttcaggtagtgcagaaatgattcaggcagtgtggaacatctaattatatataacttcttcgactcatttcgtaacttattttctgttgtcgaaattcaatatacctaagatatgtagacatttatcagatacattac

SEQ ID NO: 128071 - DNA, 851 bp, Zea Mays
acgcaattcagcctagggttttgtctccgctacaccctcctccactcttatataagcctccgccgccgctaacattcctcttcccctcgcgcaccgctcctgagtcctgtccaccctgccaccgccgacgccgcgccgccgcagcaattgtcaccgtcgctatggcccgtatcaaggtgcacgagctccgggggaagagcaagacggacctgcaggcgcagctcaaggagctgaagtctgagctctccctcctccgcgtagccaaggtcaccggcggcgcacccaacaagctctccaagatcaaggtggtgcgcacctcgatcgcgcgcgtgctcacagtgatctcgcagaagcagaagtcggcgttgcgggaggcgtacaagaagaagaacctgctccccctcgacctccgccctaagaagacccgtgccatccgccgccgtctgaccaagcaccaggtatacatgccatactcctacgactaccattgctcctagttcagtagcgttagatcttctgttataactttaattcgatactaacatcataccatggctagtcatatggggctcaactttcagtatagtattccaatggcaattggaatgtaaccttgagtatatattatccagtgtcacttatatctgataatctgttagtagtcaatgtgcaatttgattatcttgtttagaataagtggtatataagtttatgtttcttccatgatgggcaacttcaagagcatttatatatcctttcaaattctgatagtgtgctgtgtcatcaagatgtgattttattggctcgtgtcaataagtggtatataagttatgttcattgctggatgaagc

SEQ ID NO: 128072 - DNA, 1244 bp, Zea Mays
acgcaattcagcctagggttttgtctccgctacaccctcctccactcttatataagcctccgccgccgctaacattcctcttcccctcgcgcaccgctcctgagtcctgtccaccctgccaccgccgacgccgcgccgccgcagcaattgtcaccgtcgctatggcccgtatcaaggtgcacgagctccgggggaagagcaagacggacctgcaggcgcagctcaaggagctgaagtctgagctctccctcctccgcgtagccaaggtcaccggcggcgcacccaacaagctctccaagatcaaggtggtgcgcacctcgatcgcgcgcgtgctcacagtgatctcgcagaagcagaagtcggcgttgcgggaggcgtacaagaagaagaacctgctccccctcgacctccgccctaagaagacccgtgccatccgccgccgtctgaccaagcaccagctctctctgaagaccgagagggaaaagaagcgtgagaagtacttccccatgaggaagtatgctatcaaggcctaggtcagaactgtgagatgctgcgcttagcatatcatcggctgtgttttaatttttggtttgtatggacatttgctgtgggtcggaagtacgatgtattcctccatttccataaatggctaaattggtttgactggcaattcgtattggcgttcatatttggtggcaacttttctttgtattcttctaaactagatgtttgctgttcattatatttgtgtgaccgttgctcatggtatgtactccgtcccagaaacagaagttgagccgaggctcgacagtactggagtgtttggtttgaggaatgatgtagtccatcatcttctccctcattttttgtttggtttgtagaatggagtgagttaatccatcaccacctcattcttcatagttagttgtttagtactaatatgtggaatggagttatcccaccaaatttaaggaataaatccatgatataccgtttcattttgaattttgaatagagtgattcatcaaaccaaacactttataagactttataagggaaacggaaacgaagactcagggaaagagcgttccaataacatgtttggagcaatcggccaatcgcaaagaaattaagctaactatacgtgtgcaaatttctagtatcaactctcccttcgaaacaaactgtactataccacaaaccgctgcggacaaaagaaaccaccccttaaaaatgacactcaa

SEQ ID NO: 128073 - DNA, 1945 bp, Zea Mays
gtcatcgcgggccccgcccaaggttcaatgaatgaattagccgccaccgccatggcaggagatggaaaatttatctcctgacaacgtttttaccctttctataaagcctcgtccccgtcttctagcgagtgaagtccacactccacagtgagcagcaggaattcagcgcacgccctctcggctctcgcattccaagggtcctcgccacgctagctatcagttcaacgcacgcctcccacattccggccggcacatttcctgttgtctccgatgggtgacgccgctactgccgccgccgccactctcggcctgacctggcccaacgccgccgtcgaactgcctcagctttgcagctaaggacagcgaattctcggactgggacggcgacatactcgcggtcgccgtgacggacaaggacgtgcaggtgcagccccacgtctcgggctccgagttcgagaacgccgtcctgaggaggctcgacgtccagctcggcggcctcctgcgggccgcggcggcagaggaggagttcgccggcaggcccgggcagtcggtggttctccgcgtgcgggggcagcggttcaagcgggtggctctcgtcggtttcgccgcccgcgaccgcgaccgcgacgccgggtgcctgcatggcctaggcgaatccgtcgcgtcagttgccagggctgctcgggccaccagcgccgccatccttgtcgccgaccccgctgtggtccgaccggagtccaggctgaatgctgccgcggcaattgcttctggaactgtgcttggactgtacgaggacaacagatacaagtccgagtgggaaaaggtgcatctgaaacaggtagacctgattgggctgggatctgggccggagctggaccagaaacttcgccatgctaaccgtctttcgtcaggggtcatgcttgcgagagatcttgtgaactctcctgccaatgtccttacccctggtgctctcgcggaggcggcggcgaagatcgcttcgacgtacagcgacgtgttcacagccacgatactagatgcggcgaaatgcagggaactgaagatgggctcgtacctggcagtcgcagcggcctctgagacaaacccgccttactttatccacctgtgttacaaaccccgcggtggtgacgtcaggaggaagctggctcttgttgggaaaggcataacatttgacagcggcggctacaacatcaaggccgtaccggtcgccaccatcgagctcatgaaaaaggacatgggaggcgcggcggcggtgtttggtgcagcagaggttttgggacagatcaagccgcctggagtcgaggtccacttcatatctgccgcgtctgaaaatatgatcagtggctcaggcatgagacccggcgacatcgtgactgcttccaatggaaagaccatcgaggtagataacacggatgcggaggggaggcttacactggctgacgctttggtctatgcttgtaaccaaggtgttgacaagattattgatctggcgacgttaacgggtgctattcgtgtcgcgcttgggcccagcatcgctgggattctaacgccaagcgacgagctagcggaggaattcgcggccgcctacgaggtctccggggagaagttctggaggctgccgatggaggagagctactgggagtccatggagtccagcatcgccgatatgctctgcgccggccctttgcagccccaggccggcgctatcactgccgcactgttcctcaaacactttgtcgatgacaaggttcagtggatgcacatcgacatcgccggcacggtctggagcaacaagaagcgggcgggtactggcttcggagtcaccaccctggtggagtgggttctcagcaactcgtcgtcctgaacagaccctttgaacaattcaaatcccatccgatcctttctttgtcagtcggaagttgtgagc

SEQ ID NO: 128074 - DNA, 2144 bp, Zea Mays
gtcatcgcgggccccgcccaaggttcaatgaatgaattagccgccaccgccatggcaggagatggaaaatttatctcctgacaacgtttttaccctttctataaagcctcgtccccgtcttctagcgagtgaagtccacactccacagtgagcagcaggaattcagcgcacgccctctcggctctcgcattccaagggtcctcgccacgctagctatcagttcaacgcacgcctcccacattccggccggcacatttcctgttgtctccgatgggtgacgccgctactgccgccgccgccactctcggcctgacctggcccaacgccgccgtcgaactgcctcagatcagctttgcagctaaggacagcgaattctcggactgggacggcgacatactcgcggtcgccgtgacggacaaggacgtgcaggtgcagccccacgtctcgggctccgagttcgagaacgccgtcctgaggaggctcgacgtccagctcggcggcctcctgcgggccgcggcggcagaggaggagttcgccggcaggcccgggcagtcggtggttctccgcgtgcgggggcagcggttcaagcgggtggctctcgtcggtttcgccgcccgcgaccgcgaccgcgacgccgggtgcctgcatggcctaggcgaatccgtcgcgtcagttgccagggctgctcgggccaccagcgccgccatccttgtcgccgaccccgctgtggtccgaccggagtccaggctgaatgctgccgcggcaattgcttctggaactgtgcttggactgtacgaggacaacagatacaagtccgagtgggaaaaggtgcatctgaaacaggtagacctgattgggctgggatctgggccggagctggaccagaaacttcgccatgctaaccgtctttcgtcaggggtcatgcttgcgagagatcttgtgaactctcctgccaatgtccttacccctggtgctctcgcggaggcggcggcgaagatcgcttcgacgtacagcgacgtgttcacagccacgatactagatgcggcgaaatgcagggaactgaagatgggctcgtacctggcagtcgcagcggcctctgagacaaacccgccttactttatccacctgtgttacaaaccccgcggtggtgacgtcaggaggaagctggctcttgttgggaaaggcataacatttgacagcggcggctacaacatcaaggccgtaccggtcgccaccatcgagctcatgaaaaaggacatgggaggcgcggcggcggtgtttggtgcagcagaggttttgggacagatcaagccgcctggagtcgaggtccacttcatatctgccgcgtctgaaaatatgatcagtggctcaggcatgagacccggcgacatcgtgactgcttccaatggaaagaccatcgaggtagataacacggatgcggaggggaggcttacactggctgacgctttggtctatgcttgtaaccaaggtgttgacaagattattgatctggcgacgttaacgggtgctattcgtgtcgcgcttgggcccagcatcgctgggattctaacgccaagcgacgagctagcggaggaattcgcggccgcctacgaggtctccggggagaagttctggaggctgccgatggaggagagctactgggagtccatggagtccagcatcgccgatatgctctgcgccggccctttgcagccccaggccggcgctatcactgccgcactgttcctcaaacactttgtcgatgacaaggttcagtggatgcacatcgacatcgccggcacggtctggagcaacaagaagcgggcgggtactggcttcggagtcaccaccctggtggagtgggttctcagcaactcgtcgtcctgaacagaccctttgaacaattcaaatcccatccgatcctttctttgtcagtcggaagttgtgagcccaaagcgtcgcatggcactgcgatagaataagcaaaaaactaattaagcatcattggtgaatgctgccatgcatgggcacaacccgtcattctcagtattactaatgtcttactagggtcgtgcccgtgcgttgcaacggttttaatatatctcatgatagacctttaataatgatgcatgtttaaatttcaa

SEQ ID NO: 128075 - DNA, 1062 bp, Zea Mays
atgaggctcaacaagaatgttggactggctttagagaaactatttgaggatggcgtggtcaagcgtgaagatctgtttgtcacctctaagctatggccaggtaaccatgcacctgaagatgtgcaggaggatctttgttcggccctcgaagatttgcggctcgactatgtagatctgtaccttttggaaaaagaccaacaagcatctaatgaacgcacgaatgggaatggcaatctacataatatattggacccacctaggaaaatgaaaaggaaggatgagctcaccattgaagaggaaaagcagagagccaaggcaaaagagaagcttgataagtgtgtaaaagacactctgttggacctctgttggacccttggtattccaactccgaaagcaaacattagaaaggaaaatattgtgtcaaagttgttggactacattgttgaacctcactctgcagctgaatcttggggctctgatgaccagggatcaaattctaaaaaacgcaagagaggaggtgaaagtgcaagtaagacgcctgatggcacacctagtaggtcgaggaagaaatttttcgatgacgatacttctagtaaaaggcagaataaagcgctccagtatgatactgatgaggatgaatccatgaagtctgacagtgaggaaaacatagatgaagattcagatgaagttgctgacaaacaggaaggctatggatctagaaaagaaaaggcatggaagaagttatcggaggtaaaagaatcttcaggacacaatgctggtgcaatgacagatgctaaatgctccactacttcactgtgcaaagatgatgggtatattaagaaccacacctgtaaaaatttctcccacaacttatcaaaaggcaatgaacccggtgttaagaacataaaggcaatgtttgggttctttgacacagccataggcatcgaaagaacacccctaataaccactgatgaaactatctcttcatcagttcgctcccgagcaacaacagttgtggtccaaggatacctagatatagatgtgtttggcgcatggggctga

SEQ ID NO: 128076 - DNA, 1725 bp, Zea Mays
aagacatactaaacgttagtcgtagtcagataaccaaacaccccaaactgcctgttcaccattttcgccccaaatctgccgaggggattagccgatcgaagcgtcatcggcggctgcgacaatggcggggctgtcgctgcggtgcggcgactgcggcgcgcagctgcggagtgtggaggaggcgcaggcgcacgctgagtccaccaaccacgccaacttcgtcgagtccactgaggccgtcctcaaccttgtctgctccaactgcggcaagccatgccgctcccataccgaggtggacctgcacacgaagcgcacgggccatacggagttcgcggacaagaccgcggaggcggccaaacccatcgacctcgaggcgccgcttaagccggcctccgatgatgccacggacgtcgatgcgtcggcctcggcgactgaggagacacaagagacggttgtgccagaggtgaacaaggaggtgctcacggaccttgagggcatgggtttctcgacagcacgtgccactagggcgcttcacttctctggtaatagcaccattgaatgtgctattaactggctttctgagcaccaagaggacgcagatattgatgagatgcctctggtaccagctaactcaaaaacggaggttaacaagccaagcctgactcctgaagaaatgaagattaaagcacaggagctaagggagcgtgctcgtaagaagaaagaggaagaagagagaagaatggaaagagaaagggagaaggaaagagtacgaatcggaaaagaacttcttgaagccaaaagaattgaggaacaaaatgaaaggaaacgcatgatagaattgcgaagacttgagaaagaggaggagaaaagagctagagaaaaaatccgccagaaattagaagaagataaggctgaaaggagaaggaaactaggattgccaccagaagacccagcagctgccaaaccaagtgcaccacctcctgttgaagagaagaagagtgcattacctgtcaggccagccacaaaggcagagaggatgagggactgtctaagaaatctgaagcaacagaataaggatgatgatgccaaagtgaagagggcattccaaacactgcttacttacattggaaacgttgctaaaaatcctgacgaggagaaatttagaaagatcaggctgacgaatgcaacatttcaggagagggttggaaatctgcatgggggcatagagttcctggagctctgcggatttgagaaacttgaaggcgacgaattcttgtttttggcaagggaaaaagtcgacagtgctatcctgaacacagctggagccgagctgaattctgccatcaccaatcctttcttcggagtcctttgaatcgtaaaaggctacaatgtatactcaaaactctcgggttctcctttgcttgacatcaattgggcgccaactgttgatttccaagtctgtggtcagtctcagattccatgaattattatcagatcggattccgtacattgctgaggcaatctttgaagcaacttgctgcgcatatatgcttgggatctttccgatctcatcgcttcgctgaccttgatgcattttacaatgttctagcaccaaaaataagtgatgtactctgatgtatgcgttttacaacgacttcacttgttaatgacaactcgatcatctttaattatagattactcctacgaaacatatagcatctgatg

SEQ ID NO: 128077 - DNA, 515 bp, Zea Mays
aagatcaaatcaactaaacaaccaaacgaacagagttcaatacagaagtgagaatacatcataagcttcagcaactcaatgaaccgaagcataaatgtcctatccattatttgtcgatgcgacacgcaaaattaaaatttcaagcaaagaaagtgcgcatgagaccaactgaaggcagcctcatcccaactctgaaatatgaaggcgtgtgggactccatcttatgaggacagtacgaccaccgcatcccacgcattcaaggtcatcatcaggctttgatggtcacgctgcacaggcaagaacccgtcggcttcagcttcgacgtgcaccactcggaccccatcggagctgcagggtcatacatcagcgtttggtacccgggctcttcctccagagggaagagcagcagcttgtcctcgtgcaccacgagggagaaacgagtgcttgagctgccggtgagcggcacggggaccttctgccaggagtcgtcagctgggttgaagattgctagagac

SEQ ID NO: 128078 - DNA, 2550 bp, Zea Mays
tggcagtgccgactgccgaggaatagatggagtcacacaaatggcactgacacacacttgacctcccggtgacgcagcgccgaccgcgcacacactccccagactccgcagggacccaacgcagcggtcaaacaaaggcagcggcagccggccggcagcggcaacggcgtaactcccaagtcacctccgcctcgggctccaaaaatccccacccgacctcgagactgagcggaccgacggtgatgtcgtcgtcggtgcccccgccaccgccccagcaggagctggagtcgccctccgccggcggcgacaaggtcctggccgcagcgcagcacatcgtcaagtccctcgccacctccaagaacgccgctgacgacatgatccgcatactctccggcttcgacaaccgcctctcctccatcaccaacgaccacctcttcccctcccccgaccttaccgccgcctccgcctccgagatctccgccgccgccgcctccttcgacgccgccgaccagctcatccagctctgggacgccaccccggacgcgctcgtcttcgaggcccccgaggacgacatcgcgcagtacctcgcggccgtggacgtcgccatcgaccacctcgcgcgcggcggccccggcggcgcgcgggccggcgtcgccgtccagctcgccatggtgcgcctcgaggaggagctgcgccacctcatggtccgccacgccgtccccatcgaccccacgggcctcttcttctcgctccgccgcctctcgctcgagtccatggacgacctcgacgcctgccccgacttcgacgccgccacgccgcacagcctcgacgccacccccgccggcccggagaccgcgcgcggcgcctccctcggatctaacccctttgaggaccaggtgttcgatcccgtgcgccccgaggccgtcgaagacctgcgcgccatcgcccaccggatggcgcgcgcgggatacgcccgcgagctcgccgacgcctactgtggcatccgccgcgacctgctcgacgagtacctctccgtgcttggcgtcgagcgcctcagcatcgacgatgtgcaacgcatcgagtggaagctgctcaacgacaagatgaagaagtgggtgcacggggtcaagacggtcgtgcgcgtgctgctggctggtgagcgtcgcctctgtgaccaggtgctcgatgcgtctgatgaacttatggatgcgtgcttccttgagtccaccaaaggatgcattatgcagattcttagctttgggggtgccgtggcggtgtgcccccgctcgccagagaaggtccctcggatccttgacatgtatgaggcacttgcagaggtgatccctgaaatgaaggacttgtgcataggaagttctggggatggcgtgatcagtgacgtgcaagccattcttgataggcttggggatgccgtgaggggtaacctgtttgagtttgggaagatgttacagcaggagacctcaaggagggcgatggcagctggagagatccacccaatgacacgctatgtcatgaactatttgaggttgctggttgtttacagtgagacacttgatgcactcttggccgatgacagcagtgatcatgatactttcagaagttctgatgatcaggatcaggaacacttggagagaatgaccccttttggaaggcgtcttctgaagctgatatcttacctggaggccaatttggaggaaaaatctaagctctatgacgatgctgccctggagtgcatatttgccatgaacaatttgctctatattgttcagaaggtaaaggattcagagctggggaaggttttgggtgatcactggataaagaggcggagtggcaagattcgacagtattcaaagagctacctaagggtttcgtggacgaagcctttgtcttatttcaaggaagatggacatggcagtgggagtgggagtggcagtggcagtggcagcggcagtgggcattcaagttcgaggatgtccatcaaggaaaggttcaaaaacttcaacatggcctttgaggaaatttacaggaaccagacactctggaaagttccagatcctcagctccgggaagaactgaagatatcaatatctgaaaacgtgattccagcttatcgtgcttttctgggcagatatggcaatcaagtggacgggggaagaaatccaggaaagtatataaagtacacaccggaagatttggagagccagctatccgatttatttgagggatcaccagtgtctgccaatcactctaggagaagagcatagttcgtggttggccggatccatgttgcaggtacgattttgttttgatgggttgatattgatgaacttttgtacacagcgcatctgttgattggatgcttgttcccatagtagtcactacagtactgtaatacaagatgtgaaccttttgatatgcttactactgcatagtgtgaactaaggaatgctgtacatttgttgtcctgtcgtgaattgcaatctgtgctgactagttcacattagtcataaggcaatttgctactaggtaggg

SEQ ID NO: 128079 - DNA, 2810 bp, Zea Mays
atgtcgtcgtcggtgcccccgccaccgccccagcaggagctggagtcgccctccgccggcggcgacaaggtcctggccgcagcgcagcacatcgtcaagtccctcgccacctccaagaacgccgctgacgacatgatccgcatactctccggcttcgacaaccgcctctcctccatcaccaacgaccacctcttcccctcccccgaccttaccgccgcctccgcctccgagatctccgccgccgccgcctccttcgacgccgccgaccagctcatccagctctgggacgccaccccggacgcgctcgtcttcgaggcccccgaggacgacatcgcgcagtacctcgcggccgtggacgtcgccatcgaccacctcgcgcgcggcggccccggcggcgcgcgggccggcgtcgccgtccagctcgccatggtgcgcctcgaggaggagctgcgccacctcatggtccgccacgccgtccccatcgaccccacgggcctcttcttctcgctccgccgcctctcgctcgagtccatggacgacctcgacgcctgccccgacttcgacgccgccacgccgcacagcctcgacgccacccccgccggcccggagaccgcgcgcggcgcctccctcggatctaacccctttgaggaccaggtgttcgatcccgtgcgccccgaggccgtcgaagacctgcgcgccatcgcccaccggatggcgcgcgcgggatacgcccgcgagctcgccgacgcctactgtggcatccgccgcgacctgctcgacgagtacctctccgtgcttggcgtcgagcgcctcagcatcgacgatgtgcaacgcatcgagtggaagctgctcaacgacaagatgaagaagtgggtgcacggggtcaagacggtcgtgcgcgtgctgctggctggtgagcgtcgcctctgtgaccaggtgctcgatgcgtctgatgaacttatggatgcgtgcttccttgagtccaccaaaggatgcattatgcagattcttagctttgggggtgccgtggcggtgtgcccccgctcgccagagaaggtccctcggatccttgacatgtatgaggcacttgcagaggtgatccctgaaatgaaggacttgtgcataggaagttctggggatggcgtgatcagtgacgtgcaagccattcttgataggcttggggatgccgtgaggggtaacctgtttgagtttgggaagatgttacagcaggagacctcaaggagggcgatggcagctggagagatccacccaatgacacgctatgtcatgaactatttgaggttgctggttgtttacagtgagacacttgatgcactcttggccgatgacagcagtgatcatgatactttcagaagttctgatgatcaggatcaggaacacttggagagaatgaccccttttggaaggcgtcttctgaagctgatatcttacctggaggccaatttggaggaaaaatctaagctctatgacgatgctgccctggagtgcatatttgccatgaacaatttgctctatattgttcagaaggtaaaggattcagagctggggaaggttttgggtgatcactggataaagaggcggagtggcaagattcgacagtattcaaagagctacctaagggtttcgtggacgaagcctttgtcttatttcaaggaagatggacatggcagtgggagtgggagtggcagtggcagtggcagcggcagtgggcattcaagttcgaggatgtccatcaaggaaaggttcaaaaacttcaacatggcctttgaggaaatttacaggaaccagacactctggaaagttccagatcctcagctccgggaagaactgaagatatcaatatctgaaaacgtgattccagcttatcgtgcttttctgggcagatatggcaatcaagtggacgggggaagaaatccaggaaagtatataaagtacacaccggaagatttggagagccagctatccgatttatttgagggatcaccagtgtctgccaatcactctaggagaagagcatagttcgtggttggccggatccatgttgcagccaggaccgcatgctgagtgagtccgccgctgggcggtgggctggccaggggagtctccaccgccgccaggatccgcaagcgccgcgccgcgccgtggccgccgtcggaggaggtgggcgaagcggagcgcgcgcctgatcggccggagggtcggcgtcgaatcgcgtcgccgtgatcgagcagcaggaggatgacgtgggagccgtcctggaataaccggcgccaccaccgccacgccgacttcgacgccgacgtcgacgcgcggtccgcggcgtcggccaggaatctcgccagcgccttcgaggaggacctggaggaggaaggggacgttgggtgggacgcggccgccaagcgccggagctgctcggatcaccggtgcagcgcgtcggtcgaggtggtgtgtgaggcgccgcgcgcctgccgtgtcatattgtgttcgctgtgcattgtcctgctctgctctgagagtctgcctctctcttgctttcccgcagttgtccaagctgtcgaggagaaagaccagggctttcaaggacggtgatgggggcaggagctggcacaacggccgtgcgcatggccactgcttctcagatgcgagtgcgatcaccagtggcggtggtggctctgtgggtgtaagttccgatctccgtgctggtcgagttattatgcgtatgaaagaataatatgatgtgttcgacattttgcctgctcgcttaatgactgtacacttacttcaccaac

SEQ ID NO: 128080 - DNA, 1089 bp, Zea Mays
tctcttttaccctattcaattcataggcagggagaaagagagggagggggcggtgagatccgttggcgcgtgcttcttattcccttccggcgccaagtctatagtcaccagtcaccacaccgacaaaacaaaagccgcctcccatctgatctgactctgactcactgcactgccctttcgttcgactctccccctcctttttcttcccttccccacccccaccccgcgcgcgcgctttcaccagttgatgatccgagtccgagttttgttcctgccttttttttttcttctctgtcatggcacgagggcgccgtccttaccatgtgatgtaatgtacctgaatgcagccaggaccgcatgctgagtgagtccgccgctgggcggtgggctggccaggggagtctccaccgccgccaggatccgcaagcgccgcgccgcgccgtggccgccgtcggaggaggtgggcgaagcggagcgcgcgcctgatcggccggagggtcggcgtcgaatcgcgtcgccgtgatcgagcagcaggaggatgacgtgggagccgtcctggaataaccggcgccaccaccgccacgccgacttcgacgccgacgtcgacgcgcggtccgcggcgtcggccaggaatctcgccagcgccttcgaggaggacctggaggaggaaggggacgttgggtgggacgcggccgccaagcgccggagctgctcggatcaccggtgcagcgcgtcggtcgaggtggtgtgtgaggcgccgcgcgcctgccgtgtcatattgtgttcgctgtgcattgtcctgctctgctctgagagtctgcctctctcttgctttcccgcagttgtccaagctgtcgaggagaaagaccagggctttcaaggacggtgatgggggcaggagctggcacaacggccgtgcgcatggccactgcttctcagatgcgagtgcgatcaccagtggcggtggtggctctgtgggtgtaagttccgatctccgtgctggtcgagttattatgcgtatgaaagaataatatgatgtgttcgacattttgcctgctcgcttaatgactgtacacttacttcaccaac

SEQ ID NO: 128081 - DNA, 1854 bp, Zea Mays
atgacgtgggagccgtcctggaataaccggcgccaccaccgccacgccgacttcgacgccgacgtcgacgcgcggtccgcggcgtcggccaggaatctcgccagcgccttcgaggaggacctggaggaggaaggggacgttgggtgggacgcggccgccaagcgccggagctgctcggatcaccggtgcagcgcgtcggtcgaggtgttgtccaagctgtcgaggagaaagaccagggctttcaaggacggtgatgggggcaggagctggcacaacggccgtgcgcatggccactgcttctcagatgcgagtgcgatcaccagtggcggtggtggctctgtgggtggtcgcactccagcacgccagggtgacaacagaacggagcagatgcaggagctgtacaacagcctgaccgcttccaacgagctggtcagggtcctggccaacgtcctgggccccgcgggcgcgctcaacccgacggcggcgtccgtgctcgcggcgctgcgctccgagctggacgccgcgcgccagctcgtgaagcagcagcgcaggcgcggcgtggacggcgaggagcgcctgctgcggaggcagctcgcggaggaggtgcgcgcgtggaagtgcaggcacagggagaaggcggcggcggccgcgcgcctcgtcgcctcggagctcgacggcgagcggcgggcgcggaggcgggcggagagggtggggacgaagctggcggaggcgctggcgggcgcggaggcgtcgctgcgggcggccacgcgggagcttgggctggagcgggcggcgagggcgcgcctggagaaggtgtgcgacgagctcgcctccagagacgttggcggcggcacggaggcggaggcggaggacgacgacggcctcaggcgggaggccgccgccaccgcgctggaggagttggaacgggagagggagatgctgcaggtcgccgacgagctgcgcgaggagcgggtccggatgaagctggcggaggcgaggctacacttcgaggagaagaacgccgccgtcgaccgcctgcgccaggagctcgaggccttcttgggcaacgaacgtcgagaacaaacgcctgcccaccatgaaatggccaaggaggaggaggaggaggatcaccagctgcagatcgtccttgcctccgaattcggtgtccacggcatcgatcctctggtcacagagaagagcggacaggaagaaaatgccgaagctggtgacgacgacgacgactcggaaggcagcgacatcgagctgaacatggacggcaacagctggagctacaccaccacctccaggtccagggacacgacggccaagaacgcaacgtcggcgcacggctcactttcggacagagcaacggaatgtggcgccgacgccggcgccttcgatcgtagatctgaagcgacgagagatgcgccggagcaggactgggcggctgacggatgcagcgacggcgggaccaccggcagggacgaggacgaggacgccgagaggtacgaggcgatcaagaacctcagggagcagatgctgaccggccacgccttcctcttcctgtccaagggcgaggcagacgatgacagcgatcggcgtcgccgtggtttcgcttctcattttgaagaagatggggacctctggtgagccaaattgcttggtgttcaaccgttgacagtaaaagcaccaatcctttgttcgaaatttgtgcatagttttggttttggtgctccatttgcacagcacagttatagagttctttatctctgggatttggattcatactcagttttggtgttttggcactggcattttgcgtttgatgtcacaataaaaaaaattaccaatgca

SEQ ID NO: 128082 - DNA, 2274 bp, Zea Mays
atggacagaaagccagccggtaaaaatagcttcaggcaacaggagaagcagaaaaaaaatgagaggttggactggaatgacctggtcctggctgggccttttgtccttcattcacattcccaaactgctccatcactttataccgccgtctcatctcgtgctcgtggtgtccgtgttcctcctcttggcggggccggccagaaaagcttgctggacggttggctccggaaaccggatgcgtctcaggtcaggcgcctgatttttacttgggttcccatggttcgtttccacagcgcaaaccacctcccagcttttagtcagtatagtctgctggagcccatggaggtgcagctggcgacggagcaaccgggggacccgttcctgccgctgcggtgggagagcacgggcgaccagtggtggtacgccacgcccatcgactgggcggcggccaacggccactacgacctcgtccgggagctcctgcgcctggaccccaacctcctcgtcaagctcacctcgctccgccgcatccgccgcctcgagtccgtctgggacgacgacgcgcgcctcgacgccgccgccaggaaccgcgccgccgtcgcccgccgcctgctgctcgactgcgagcccgataacgacaagcagcccccatcccgcggaggcggaggcgacgccgccaaccgcctcctccgcgccggctacggcggatggctcctctacacggcggccgcggccggggacgagaggttcgcgcgggagctgctcgcggcgcagccgctgctcgtcttcggcgagggggagtacggcgtcaccgacatcctgtacgccggcgcgaggagcggacgccccgaggtgttccgcctcctgttcgacgcggtgctgtccgcggcgccggcgtgcccggtcgggggtgacgacggcgagtttaggcgcgagatgatgaaccgcgccgtgcacgccgcggcgaggggaggcagccttgccgtgctcagggacctcctgcgcggctgctccgacgccgcggcatacagggacgcgcagggatcaacgatcttgcacgccgcggctgcaaagggccaagttgaggttgtgaaggatctgattgcatctttcgatatagcgaactgtgtagatgaccaagggaacacggcgctgcatatagcagccttccgaggccatgtccaagtggtcgaggctctcatcaccgcatctccgtctcttatatcagcaacaaacgaagccggcgacacgttccttcacatggcactgactggcttcgggactcccgagttccaaaggcttgatcgccagacggagctcattaggcaattagcgagtggagcaatcgtggatatcagcagcagcactattatcaacgcgcagaatgacgacgggaagacagctcttcacttggccgtggtttgcaacctgcattcggacgtcgttaagctcctgatgagcgtgccttgtattgacctcaacatctgcgacaaggacggcatgactcctctggatctactcaggaagcagccacggacgacggcgtcagagatactgatcaaacaactgatcctggccggtgggttcacaagctcaagggaccacgagactaggtcggctatcgcttctcagctgaagatgcactccattgtaggaagcccggggacatcgttcaagataccagacggcgagatcttctttctccacgctgctggagtcgacgtgtcgggcggcatcggcgaaggaggagcagcagtaccgttttcctccgttattgctagggctgacgtcctgcatggacccaaactgaagaggctcaactctttccaagacgcggcgaagcatatcaaggtcctattcagatggcctcgccgcggatggaacaagtcaggcagcggcggccgaaagggtctggacgacgacgatgcctcgtctgtggactctgccaagacctggagccacgaggagaccccgacaccgctgaggcagaggtattccaggatcggctcgctgttcaacaagcggacctacgcagcaggcagggcttcacctagcgaagcagtgaagaagggtggagtggtacagccagctggttctactctactttcgacatctctgtcgtcgtcgtcggcgtccttggttgacaggttcgaatctgttcatcaggacaacgatcagtctccttatgtcagtaggttgatcaggcacacacctaagaaatctggatctctcaacagtagacttatgaaccagtccttgcgcctcagggcctaa

SEQ ID NO: 128083 - DNA, 2004 bp, Zea Mays
atggctagagcttcatggaatatgaactatgagaaggttcttgttgacatcttgcacgagcacaatcatgtgaagtaccggggccagaatggttgggcaccagaaggttggcgttctatgacacaaatgttcaatgagaagtgcccgttggctaagtttacaaaggcacagatccaggaaaaagaaaaggaacttaaggcaaactataaggtgctgaaggaagcccgcaagcaaagtggtgttggatggaatgaggccatgggtatgatcattgctgaaccaccaatatgggcaaatataattgttagtaatccaaaggtcaagaaatttcagtcaaggccattccctttgtataatcagttgtcagcactctatgatggcagttgtgccaccggtgatctcaattttacatcaactcagcaacatacatcatcccgacaacaattacatattcaagctgaagttgaagctgaagctatgagctctttcaggattgatgatgacctcggggttaaccctgatttgaaccaaatctcttcaaatttgcatgggttgggatcttcaagtacccgtgttgagattggtggacatgaccgcaccccggcatcttcagaacagcgagcggagagtcatggaaggaagcgtaagcaaagtcagattgctggggttcttgaggaatatttggattacaaaaggcaacataatgataagttgcttgatgtggtaaatcagattgatcaacaagctgagggatgtaacaagaaggaagaatattgtattggaaagtgtgttcgtgtgttagagtcgatggaagatataactgaagaggagatggcagcggcaatgggtgtgtttaagtgcgaggagaacagagaaatatttctgaacagccagaggccacgtgtccgattgttgtggcttagaaacgagatccacaagcaggtagttatataaagcactcaatttctacaattttttttgcttcatggtcacatttactaatttctgcaatattttcagatgtccaccaatctcaatattttcagatgtccaccaagcctttagtttcctgggaggcaatggatggagctctgcgacaataaatacaagatgttcaaaagaacgttattgttgtgttaacattttgggcataccaagtacttttttttgttatgagtctgtcaaacatatgttaaatttgtcactaatttcttatgagctatttctgtggtcaaagaaagttgtttatttaagtggcatgaatcaaaaaatcttaggagacttctgtttgattttgtttatttttaaaagaaagttgcttcagcgtacaaattttgaggggcatattgttgtttttgcgtacaaatttctgtttgattttgttgatttttattttttctattttacttgtgatttgatgatgatcacacttctagcagctgccgatgtgtggctccagagggcagcagggcagctgacccatggggcaccaaaggatgtcagggcagcgcagccccgctgggcaatgcccacccagggaattcgtatgacaggaatttgccccctccggtgctagctcccctgtgttttattggccccggtcaccaaaggatgtcttaggtgccgtggaagcccctgaacctgaactgtccgtcggcgtcgaggcggccccgcgcgtcggacatccactcgctcctgaggtcgatgagcctctggccggcgtcgttgacggtgccgtcggcgttgacgagcgcggcgtcctgcctccacatgtggccctgcatgaacccccagagcacgacgccctgcaccgccgggtgcgcgaacgcctcgcgcaggaccacctcgaggtcgtcggcgcggagcgcgtcgtcgggctcgcagacgtcgacctccgtgaaccagacgggcaggccggtggcggcgtagaccgtgtcgagcgcgtcgcagatgacctcgccgacggggtgggtgacgtggccctgcatcccgacgccgccgacc

SEQ ID NO: 128084 - DNA, 1685 bp, Zea Mays
cgcggctgtctctttcatcggccacccacggcggcggagcatagcactgatagcagtaagcaagcagcggagacgccggagagcggtgaagaagcatggagatggagcagctctgctcgctgctccgcgacctcgacgcgctcaagcagcatcccgacgacctcacttccaccatcgatcggatgcgggagcggctagtggcgatgatgaatccggcagccggtgccgcttctcgatccaagattaaggacatgagtgcagaagtggtggacaacaatccctacagcagacttatggcgttgcaacggatgggcgtagtggagaattatgagcgcatcagggactactccgttgccatcgttggcataggtggcgttggtagtgttgctgcggagatgctcactagatgtggaattggacgactgttgttgtatgattacgacacggtcgagttggctaacatgaataggttgttctttcgcccagaacaggttggaatgaccaaaacagatgccgctgtacagacactttctggaataaatcctgatgttgtgttggagagctactcattgaatattactacagtcaaaggtttcgaaacatttttggcaagtttaaaagcacaaagttctcatgagcgtagcactggagttaatcttgtcttgagttgcgtcgataactatgaagctcgtatggttgtaaatcaggcatgcaatgagcttggtcagacgtggatggagtctggtgtctcagaagatgctgtttctggtcatatacaactgctggttcctggtgaaactgcatgttttgcatgtgctcctccattggttgtagcatctggagtggatgagcgtacacttaagagagaaggtgtttgtgctgcctctttgccaactacaatgggtgttgttgcgggtctcctggtccagaatgctctgaaatatttgttgaactttggacaagtttcccgttacttgggatataactcacttaaggattatttccctgcaatggaaatgaggccaaatccacaatgctcgaatccagcatgtgttctcagacagaaagaatatatggaatccaaacctgctagagatgcagcagcgaagactaagatggaagctgaagcatccacagaaaatgaatgtcctgtccacctagacaatgagtggaatattagtgttgttgatgatgaaactgagacatcaagcattcgaaacactccagatatcctaccagaaggtcttgtccgtgagcttccagacgctgattcatacgcaggaccagctgctccagtgagttccagcgctattgatgatgatgatgatctcgaggagctccagcgtcaacttgatgccctaaacgcatcttagccttaataagtaggctagttcatctgcgccttaattggcttctccccaatcccaacttggatggggaagatgatttacatactgtttttcggagttggtaaattcatagcaccgtggtaaaagaaaaaggagaaaatgatagctatactggttttgggagttttgacttacagttttggttgagatctgagaacatgtgcatgtctgagccagacagctcgtcggtaatggtactaatgtctgaatttttgttgctgttgatattcaaaggttttatctggaaccgtcatttcttattgagaggttccacta

SEQ ID NO: 128085 - DNA, 1085 bp, Zea Mays
atgtcacgtcgaggtactgcagaaaaaagaaccgcaaaatccgatccattttttcgtaatcgattagttaacatggtggttaaccgtattatgaatgatgaaaaaaatcattggcttatcaaattctctatcgagccatggaaaagattcaacaaaagacagaaacaaatccactattggttttacatcaagaaatacgtagagtaactcccaatataggagtaaaaataagacgtaataaaaaaggatcgacgtggaaagttctgattgaataggatctaaacaaggaagagcacttgccattcgttggttattagaagcatcccaaaagcgttcgggtcgaaatatgactttcaaattaagttccaaattagtagatgctgccaaagggagtgggggtgccatacgcaaaaaggaagcgactcatagaatgacagaggcaaatagagctcttgcacattttcgttaatccatgaacagaatctaggctcgatcagaaaagaatcaatagaaggagaatcagacgatatctttttcgaaacaaataaaaagaaaaaaagagaaaacagaaatcatgatcaactaagccctctcgggggcttacttaaagaataagaaagaggaatcttatagaaatatagcatggaataaaggtttgatcctattcatggggattccgtaaatatccaattccaaaaatcaaaacaatcgggacttttcggagattggctgcagttactaattcatgatctagcatgtacagaatgaaaacttcattctcgattctacgagaatttttataaaagcgtttcatttgcttctttcatttttccagaatgtatcctaatttttggcctaattcttcttctgatgattgatttaacctctgataaaaaagatagacattggttctatttcatctcttcaactcttcaacaagtttagtaataagcataacaactctattgttccgatggagacaacctataattagcttttcggaaaatttccaaacgaacaatttcaacaaaatctttcaatttcttattttattatgttcaactttatgtattcctctatctgta

SEQ ID NO: 128086 - DNA, 1167 bp, Zea Mays
ccggaaaaaaaaatcctataaaacgacgcgcccgtctcctcccccgccgtcgtagctccttctcctacacagaaaagccgtcgcctactcgcctccggccaaaaaactgactccacacacgacccaaatcttttcctctccacaggcgactcccaacgcaacagcagctcgtcgagcgagtcgtcgccggccggccggtatatacgcaagaaagccaagaaaaacacttctgcctcttcctccatatccaagaaccaaaggtagctagctagccgcgactcgttggctagacgattcaagcagcagcgcaggatggtggcgccggtggtgattgcgtcggccgggctgggcatgctggccggcgtggcgatggccaaccggtccctcgggaacgggctcccggcggcctccaggtgggacgcgcgcccgcgctgcgccacgtgcggcggctccggccgcgtggagtgcatctgcaaccgctggtccgacggcgactccggctgccggacctgcgctgggtcggggaggatgccctgccgcagctgcggcggctccggcacgggccgaccgctccctgcacggctcaccgtccagcaccagaagccgccgccgccgccgccgcccggctacaactgatcgatggtggatgattaggtatccgtatccgtggattatatacttctcgcgggcgatttgcgatgcgacccatacaagaaagaaatcagttaaactgcgatatgatgcgctctagctagttaatcatatatacatatatacacgtccgatccattcgtgtggatgacatccatgttgcatatgtacaagtacatgtctcttcttcaagagtcaagactagctgtaattgagctgagcatacttggtgttgctgttgttcagttaatttgcaaaaacgcacaacacaagaaagaaggagaaaaaaaacagagtggaaatgttttttttttaagatctggagaacaacatgattgagaagggagggaaggtgattctgagcacagttttgttggaaaggctgtagttaattctggtggatgtaatatattatatgtatgtatatgcttagattcgttaatatatatgcatatatatgcacccacatgaatatgatttacagagattatattaatttgttgtgagtgcatgccc

SEQ ID NO: 128087 - DNA, 703 bp, Zea Mays
agctatatagatcgatcttaaacaataaacatacattccacactgcactactgcagctaacaagcgcatcacaatggccagctttgcaaagccgcagcatctgctgcttgccgccaccgtggccgtcgttctcctgctcgtcgccgcggcggacgccagccagcgcccggtgcacctgcggttgtacatgcacgacatcatcggcgggccggggcagacggccatccacctcatccggaacgtcgggccgccgcacacgtcgctgaagggcgcctacttcggcgacacggtggccatcgacgacctcgtgaccgagggacccgccgccgactccagggccgtcggccgggcgctgggcacctacatgctgtcctcccagcgcgagcaggtgctcgtggtcgccgtcaccgtcgtgctcgccgacgggccctacaacggcagcaccttcgccgtggccggccgcgtcaagatcttcgacgacacgacggagctcgctgtcgtcagcggaacgggcgggctccggcgcgccgccggtcacttgctgtggaggacggctgaggtggtgtccgaggtgtatatggtgctggagctggtcgtgcgcatgtctgttcctgcgacggcgagcactgctgctcctgtcgatgggtgatcacttgctatcgagtggcagaaacgtacgtgtacgtccatctagaccgcaata

SEQ ID NO: 128088 - DNA, 903 bp, Zea Mays
atgtccattgggttgggtaaaaagacacaagacattcctgcacgtgtccccatgctcacaacaacaatgaacaaaaaaatttgggacgtaacagatcaaacccagcacaagttagatttcaacgcaaaacatctagtatttgggcacctttatttacttcctcgtccattcaactggacgagtgagggcaacaggctgttacagggggatggagaacgacttcttcagcttctctacctccagataagcgttagagtaaggcaggaactccgagaaatggctctgcatcagatcgttgatggcagttgccagcttcggaatctccatgatctcctcattggtcagcttccgaacgaacctggccgggcttccagcccagagctcgccggtcggaatccgccttcctgggggcaatacagagccagcttcgaggatcgagttggtctccaccagcgaaccttccatgaggacagagtgctggccaatgatgcactcaggctcgatggtgcaagagcgcaacagacagtaggcgcccactgtcacgtaccggtccacgagtgtctcagctggaagccctgtgggagccgtccatgcggcatggaggacgcatcgctcctgtacgttggcgcagaagccgagcgtgatcttgttgaggtccccccgcaggacggcgccgctccagacggaggcgccgtcgtggacggtgacctggccggcaagcacggcctcgggggctacgtaagcgtccacggccaccttgggcatccattgtcccagcggaacaagcttcctctgcccgcggtagtcccaccgcacccgatccgcgcccacggccgcggcgccggccgcgctgggcggcggcggcggggcggatgccgcgacagaggctgtggaggttactga

SEQ ID NO: 128089 - DNA, 220 bp, Zea Mays
aaaagaacctgtcagacaacccatgagccaccccagccaggttagactaggaacgatcctctacagcaccggaacaggcatcagagccaaatcctggccgttaatcacgctctggcccacaggtcatggttcatcaaccaggtttaagtgcttgcctccttatcaaatcaaggatgcaacggtacgatcctatagaacagatcctgttcaagtaaggtcg

SEQ ID NO: 128090 - DNA, 449 bp, Zea Mays
ccccacatgtcattgactcatgtggacccacatgtaagtgagatagtaatggtatggatccaaagtggtgatcttttaatggtatggatccaaatttccaaaaaagaacctgtcatgaaaaagaacttccaaatcgcaaaaacaagatatctgtaacttctacgttgagagcaatgttagcaacaaaataataaactggtttttgataagttggagcatacaaaaaaagaacctgtcagacaacccatgagccaccctagctaggttagaactggcgaggaacgatcatctacagcactggaatagggcatcagagccattcctggccgttaatcacgctctggcccacaggtcatggttcatcaaccaggtttaagtgcttgcctccttatcaatcaaggatgcaacggtacgatcctatagaacagatcctgttcaagtaaggtcgt

SEQ ID NO: 128091 - DNA, 1046 bp, Zea Mays
ggaagcttctcccaccgccaccggagccccacacgcccctcgtcctcggatcccatcccgtcgcggtcgccgcactagttcgacgtacagaagcgaaggtctcgacgaatccgtgacgccgacgtgggtttgcctctgtacttctggaatcggaaagaggtgtgtcgtgcggtgcgtgtccaattctaaccccttcctatcgaccatcattctcccctctgcctgcgtcgtcctcgccgccatggaccttgcggacgggcgagacgacgccctcaatggaggcgtcggcgtcggcgtcggcgtggaggagacaaggaggaggaggaaggtggagctggtgcaggaggccatccgtggcttcctggaggagaagaggagcgatggccagggaggaggagaggagcgcttgacggccaggctcagggaggaggagcaggagctcctgttgtcgttgctctccaagttgggcgagctaaaaaccgaccccgatccagacatcttggaagaaccgagctcctcccgcccggaccacggccaccagcctgcaggaggaggcgaacgcagcaaggaggtggagccagctgacatcgccaaggacctgagcaagatcaagaggcagaacacgatcacccacctcctcctcggcgccgtcatcgtcctgaccgccgtgtggcaggtcaacgaggtgtcgttcctcctctggctgcagagcaagctgagcaaccccttcaagtccctcggggacatggtcaaggcctccctcctcaagcttagagggaggaggccggtgctcgagtcgtcgccgctgccgctggccggcgtccccgacgtcagccgggctgatctgccgacgtttgtcatcggcggcaccgagcacgtaggtaaatgagctagctgtgtggtgatccgaggattgattaaaatgtccagcatctgtttgttgcgaataatttatgaactgggattgattcttgaattatgaactgacacaccaacatttccgggaggcatataatgcctgggagccaagtatttctagattctct

SEQ ID NO: 128092 - DNA, 2305 bp, Zea Mays
ctacgcacatccccctttctcccactccgtgtccgtggcacccaccccaaaccctcgcgccgcctccgagacagccgccgcaaccatggccaccgccgccgccgcgtctaccgcgctcactggcgccactaccgctgcgcccaaggcgaggcgccgggcgcacctcctggccacccgccgcgccctcgccgcgcccatcaggtgctcagcggcgtcacccgccatgccgatggctcccccggccaccccgctccggccgtggggccccaccgatccccgcaagggcgccgacatcctcgtcgagtccctcgagcgctgcggcgtccgcgacgtcttcgcctaccccggcggcgcgtccatggagatccaccaggcactcacccgctcccccgtcatcgccaaccacctcttccgccacgagcaaggggaggcctttgcggcctccggctacgcgcgctcctcgggccgcgtcggcgtctgcatcgccacctccggccccggcgccaccaaccttgtctccgcgctcgccgacgcgctgctcgattccgtccccatggtcgccatcacgggacaggtgccgcgacgcatgattggcaccgacgccttccaggagacgcccatcgtcgaggtcacccgctccatcaccaagcacaactacctggtcctcgacgtcgacgacatcccccgcgtcgtgcaggaggctttcttcctcgcctcctctggtcgaccggggccggtgcttgtcgacatccccaaggacatccagcagcagatggcggtgcctgtctgggacaagcccatgagtctgcctgggtacattgcgcgccttcccaagccccctgcgactgagttgcttgagcaggtgctgcgtcttgttggtgaatcccggcgccctgttctttatgttggcggtggctgcgcagcatctggtgaggagttgcgacgctttgtggagctgactggaatcccggtcacaactactcttatgggcctcggcaacttccccagcgacgacccactgtctctgcgcatgctaggtatgcatggcacggtgtatgcaaattatgcagtggataaggccgatctgttgcttgcacttggtgtgcggtttgatgatcgtgtgacagggaagattgaggcttttgcaagcagggctaagattgtgcacgttgatattgatccggctgagattggcaagaacaagcagccacatgtgtccatctgtgcagatgttaagcttgctttgcagggcatgaatgctcttcttgaaggaagcacatcaaagaagagctttgactttggctcatggaacgatgagttggatcagcagaagagggaattcccccttgggtataaaacatctaatgaggagatccagccacaatatgctattcaggttcttgatgagctgacgaaaggcgaggccatcatcggcacaggtgttgggcagcaccagatgtgggcggcacagtactacacttacaagcggccaaggcagtggttgtcttcagctggtcttggggctatgggatttggtttgccggctgctgctggtgcttctgtggccaacccaggtgttactgttgttgacatcgatggagatggtagctttctcatgaacgttcaggagctagctatgatccgaattgagaacctcccggtgaaggtctttgtgctaaacaaccagcacctggggatggtggtgcagtgggaggacaggttctataaggccaacagagcgcacacatacttgggaaacccagagaatgaaagtgagatatatccagatttcgtgacgatcgccaaagggttcaacattccagcggtccgtgtgacaaagaagaacgaagtccgcgcagcgataaagaagatgctcgagactccagggccgtacctcttggatataatcgtcccacaccaggagcatgtgttgcctatgatccctagtggtggggctttcaaggatatgatcctggatggtgatggcaggactgtgtactgatctaaaatccagcaagcaactgatctaaaatccagcaagcaccgcctccctgctagtacaagggtgatatgtttttatctgtgtgatgttctcctgtattctatctttttttgtaggccgtcagctatctgttatggtaatcctatgtagcttccgaccttgtaattgtgtagtctgttgttttccttctggcatgtgtcataagagatcatttaagtgccttttgctacatataaataagataataagcactgctatgcagtggttctgaattggcttctgttgccaaatttaagtgtccaa

SEQ ID NO: 128093 - DNA, 706 bp, Zea Mays
cttctcctgcagtgaaaccaaaaaaggaggcacgctactgttcttccgtattcttgtcaatgcaacagcatgtaaaagtagtcttcttgggagctacccagtagttgagtgagaaattaataagctattctaaattaaatgtaaatatgcatttctgaccatagtatgaagttgaaaggtgtttctgttcctttcctgtgtataagataaacattttttctaacccttcttccttaggtcgctgaaattgaaattgatgtctacaaagtgcttcccatttcattattagattactgatatagctatgcctagagagtggagataagtggagataagtggaggtggcaccaccaattccttgatgtaccaggaatgtttggattgttgtattctgacattgtttggttcaacatattcaagttggagcgtcaggtctccaacaattaaactaaatggaggagtggagcttcatgttgggatgatgcatgcacctatcaagtttcggaatgttgtgctcaactgcaacttgtggccgttgaacccattctacttacttttagatttaagttataggatatttaaaaatgtttgatcttcaatacttgttttggatgttttatgctacaattatatatggattggatgtagaaaaagttatgtacactcatgttgtttaatgaaattgtatacacgtgtttgatttgaa

SEQ ID NO: 128094 - DNA, 1563 bp, Zea Mays
ccggcggcctgacccactaacccgccgcaccgtcgtccccgctaggcgctggcctctggccccttgcggcgcgcggtgcgttacaacttacaagtagcgtcagtgagttacagccagccaaaagttacctacagctcactcccaacggaagcaagaaccaccgctcactcactcgccattcggcagaggcgtgactgactgaaactgagcactagggctttgagagtgcagcagaggagggcgaaccatgggcgaggaggagaaggcgaaggaggcggcgcccccggccgacaaagtaaaggaggcggaggagaagaagggcgaggggggaggaggggaggagaagaagaacgaggccccgtctcttccaccgccgccgccggaggaggtggtcatgcgggtcttcatgcactgcgagggttgtgcgcgcaaggtcaagaagattctcaagggatttgatggtgttgaagatgttattgcagatacgaaggcacacaaggtggtcgttaaggggaaaaaggcagctgctgacccaatgaaggtggtggaacgggtgcagaagaagacaggccgcaaggtagagcttctctcaccaatgccaccaccgaaagaagagaagaaggaagaggagaaaaaggaagaacctgagccaccaaaaaccgagaagaaagaggaggcaacggtgctcgctgtggtgctcaaggtgcatatgcattgtgaggcttgcacacaagtgatcaagaagagaatcctcaagatgaaaggcgtgcaatctgtagaggcagacctcaaggcttctcaagtcactgtgaagggtgtgttcgaggaggccaagctgtctgattatgtgtataggcgcactggcaagcacgctgctatcgtcaagtctgagccggttgcagctgagaatgttgatgatggaaatgccaaggatgacaagaaggcagccgaaggtggggaggagaagaaggatgatggcaaggaggaaaagaaagatgaagacaagaaagaagcggataatcagaaggatgatggcaatgctggtgatgaagggaaagacaaagaccctggcgccgttgctaacatgtatatgcactacccgaggtccaatcatctgagcgaatacggatatgcctaccagtaccctcctcagctcttcagcgacgagaacccgaatgcctgttctctgatgtaagaaagccagaaccaagtgaccttaagcgcgaaaataagaggggattgagttatcccctgattttggaggttcaggaagtttagaacttttctcttctatttctaaggttgaactttctgtctggtacaaagtaaactctgggctggtttgtggacttttcatattgtgtatgctactggttagtaggattttgtgttgcacctttcacctttggcttttatttctgtacaaagatgtattatatatgctagttttgaaatagcttgctgctagtactctgtagtctgttgtccggaatagacggagctttctcagttaacattgccagtgatgtcggaaaaatccatattcttggtgtccttttctaa

SEQ ID NO: 128095 - DNA, 1050 bp, Zea Mays
atgagcgggcggcggggtccagctgccacaggaggcggacggggaggcggaggcggaggcggcgggaactggcggcggagcgggtcggcgaaggcgaaggagcagcggctgcgcctgggcgcggaggagctcctcgagagccggctaggattcgcgccatacactgatggggagcggcgcctcggatggcttctcaccttttcaccgtcatcatgggaagacgaggacaccggaaaaatctacagctgtgttgacttatactttgtatcacaggatgggtctacgtttaaagtgaaatacaagtttcggccttacttttatgctgcgaccaaggacaagatggagttggaagttgaggcatatattaggcgacgttatgaaggggaaatttctgacatagaaataattgagaaagaggatttagatctgaaaaatcatctttctggcttgaagagaaaatacctgaagcttcagtttgacaccgtacaacaattaatgcgtgtaaggaatgaccttttacatgttgttgaaaagaacgaagaaaaaatagatgctgtggaggcatttgaatcaattcatggtgtaaaaagggtagaaaggccacaagattacataaattacatcattgatttgcgtgagtatgatgttccatatcatgttcgttttgctatagataatgatgtcagaagtggacagtggtacaatgttaatgtatctggttctgatgttttgcttcagagaagggaagacctgcttcagcgtgcagaagttcatgtctgtgcatttgatattgagaccacaaaactgcccctgaagtttccagatgctgaatacgacaacacaccttgctttcaaccttcctccactcctggaacacaagagagggcaactttccgggtgatcaaggcctggcgagctagtctatttgcagtccaacatctattaagggaagccagacatataaagaatttgcatcgcggaggggcccaactcttccatgtcctttcagctggctcaaaaagaatagatccagctagaagccgattataa

SEQ ID NO: 128096 - DNA, 5826 bp, Zea Mays
aactccttcatgacattctttctttatctcacttctagcggagtaacattctgctatgtttcttattgcgttggagaagacattgatgatttggagtacacacctaaacccgaatttgaggggtattttagagttaagaatgttcaaactgagttggatctacttaaagcatggttttctcacatgcaagaggttaagcctggcatttatgttacatacaacggtgacttttttgactggccatttttagagaagagggctgcacaccatggaataaaaatgaatgaggagattggtttccaatgtgacaataaccagggcgagtgtcgggctaaattttcttgccatcttgactgttttgcttgggtgaagcgagacagttaccttccacaaggaagccaaggtctaaaggctgttacaaaagccaagctaggttacgatcctctggaggttaatccagaagatatggttcgctttgcaatggagcagccacagacaatggcttcgtattctgtatcagatgctgttgcaacatactatctatacatgacttatgtccatcctttcatcttttctcttgcaaccataatacctatgtcacctgatgaggtactgcggaaaggaagtgggacactttgtgaaatgctgctaatggttcaggcattcaaggctagtgtcatttgtcctaacaagcaccaagctgatcttgagaagttctacaataaccgtttattggaaagtgaaacctacattggtggtcacgttgagtgtcttgaaactggcgtctttagatctgatctccctacaaagttccaacttgaaccattagcatatgagcaactcattggaaatcttgatcgtgatctgcattatgtcattgctgtagaaggaaagttggatattgattctgtcacaaattatgatgaagtcaaggatgccatagagcaaaagcttgttgcattgcgtgatcacccaattcgcgaagaacgccctctaatctatcatctggatgttgctgctatgtatccaaatattattttaaccaatagactccagccaccatccatagttacagatgtggactgcacagcatgtgatttcaatcgtcctggaaaaaattgcctcagaaagcttgaatgggtctggcgaggagagacctacatggcaaaaaagaatgactattatcacataaagaggcaaattgaatcagagctgattcaatctggtggcattgcatcgtcaaagccttttcttgacctctcaaaaccagaacatttacttaaattgaaggatcgtttgaagaaatactgccaaaaggcgcacaaaagagttgttgataaaccaattactgaagtcagagaagcgggaatatgcatgcgtgaaaattctttctatgtagacacagtgcgtagctttcgtgatagaagatatgaatacaaaggtcttaacaaaacatggaaaggaaaactcgcagaagcgaaagccagtggaaattctatgaaaattcaggaagcgcaggatatggttgttctatatgattctttgcaacttgctcacaaagctgggaagaagctaactatatcttatccctgtgtcatgcttaatgctgacgttgcaaggaacaacactaatgatcaatatcaaacattgaaagacccagtaaacaagacatatacaacacacagtgagtgttccattgagtttgaggttgatggaccttacaaggccatgatcttacctgcctctaaagaggaagggattctgataaagaagagatatgctgtcttcaatgaagatggcactttggcagaacttaaaggttttgaaatcaagcgtagaggtgagctgaagctcataaaagtttttcaggcggaggtatttgacaaatttcttcatggttcaactttggaggaatgctattctgctgttgcctctgttgctaaccggtggttggacctactggataatcaaggaattgatattgctgacagtgaattgcttgatttcatatcggagtcgagcacaatgagtaaatctttagttgactacggagagcagaagtcttgtgctgtaactacagcaaaaagacttgccgaatttcttggagattcgatggttaaagacaaaggactacattgccaatatattgttgctcgggagccacaaggcactccagtgagcgagcgtgctgttccggtagctatattcgagacagatcctgagatcgcaaagcattatttaaggaaatggtttagattctcctctgatgcaaacattcgatctattgttgattggtcttactacaagcaacgcttaagttcagctattcagaaaatcattacaattcctgcagcaatgcaaaagatctcaaatcctgttcctcgagttcttcatccagattggttacacaaaaaggtcagggagaaagatgatcgatttcggcagcgtaaactgcgtgatatcttcagtcccttggctaaagaagaggggctgcataacttgaataggactggagatatggaagatttattaatttcaaacaaggatttgaggaaaaatccttctcatggtttagacattgacaaagaaaacaatccaaatggagcatcagtgggatctggtttgaatattagtaaaaaacaacaaaactgtatgactgggttaaatgttccttgcacttcacaaatccaaaatgctgcttcttatgaaacagttgataagggtactgactatcaaggatggcttgatgctaagaaaagaaaatggaaatatgtccgtgaacaaaaaaaacgtcgaaggttgggtgctgccgccacttttgacgatcctaacgctttgctctcggccagacatgccaatcagctacctgtcaacagtcggaatagatctacatttttccagaaacaagaattggccctctttagatcacattggcagataatccagcttgcttcaagtacagtgcctggtcacttttttgcgtgggttgttgctgaagggattatgttcaagattcctattaatgtgcctagaactttttacctaaactcaaaggctcctgtcacagaagagtttccaggaaggcgtgtcaaaaagattctcccacatggtagaccttgtttcaaccttattgaggttgtaacaactgaagaacagttcagggctgaaggcaaaaaacttgcagctcatctagcagagccagatgttgagggaatatacgagacaaaaattccaccagagctcaatgctgttctccaaatcggatgtgtctgcaaagtggacaagtctgcaaaaagacgaagtatacaagatggatgggatctagccgagttgcaaatgaaaacaaccgccgagtgctcatatctggaacagacattttcatttttctatttataccacagcttgagtgaaggaagggctgtatatgtattttacttccccacgtctttccgaatacatgcagtgattgtcaatcctttccgtaacaaagaaatatctccgtcatttcttgaaaagcaatttggagatgcttgccaagcccttggttctgtccctgagaatctgtctttccatgtggactaccaaacatcaattgatgctggaagcaaatacgcacaaagaatgttacttgagtacaggcaacaacattctggacctgtcgtaggcatcatagagtgccctaagctccaagctataaaggtagctatacgagcacttgatgatttgccatgtgtaaccattcctagcaatgcacgtgacaacaactatcaggctcttggctggcaagcaacagctggccgaacaagtatgcagcgttgtgctgcatcaacccaatggttcaatgaacggatttcactcgctaaatatgcacatgtgccactgggtaattttgaactagactggcttctttttactgccgatgtattcttttcaagggcattgcgtgatcaacagcaggtactatggatatctgatgatggcattcctgatttaggaggcacttatgaaggagagacatgttttgctgatgaagtcattcagcctgcacttacttatcctggtgcatatagaagagtttctgttgagcttaagatccaccatttggcggttaatgctctcctaaagagtagtcaagtggacgaaatggaaggaggatcaatcggtagctttggaaacgacgtgcctccgggttcaaatgccactgaaactgactttgatgatgctagcttatgtatacctgctttccaggtgctaaagcaacttattcaaagatgcatttcagatgcagtgtcgtctggaaatgtatttgctgatgcaatattgcaacatctctaccgctggctttgcagcccacgatcgaaacttcatgatccagctctccatcgtcttcttcataatgtgatgaagaaagtctttgctctattgttggccgagttacgaaagctgggggctaatgttatttttgcaaacttttctaagataatcatagatactggaaaagtagatttgtcatctgcacatgcatattgtgacagcttattaaggaccttgcagacgagggacctcttcgagtggatagaattggaaccattgcacttttggcattccttactgttcatggatcagtataactatggcggaattcaagctaaaacacaaaacgtagactcttcagatggtgataatgatattgatattgtctcaagctggaacatggcagaagatttgcccaaagatacacaggatcattttgtcttaatcgtatcagaattcctatatattccgtggaaattcatgaaggaacaagtagctgctcaagctaccataagggatgatacctcatgcactccatctgtaacaatcatggctgctgagaatcttgagggccaggtgatagaacacctccgtgacaagattagcaattactttgcagacaagcttctaagaactgtaagtgatatacttcaccatttcaaagggaaaagcaaacatgagtcagatgaacctgcaaaatctgatcctcacacgcataaaggcgatgctgcattggagttcattaagcatatctgtgcagttcttgctcttgatcaaaatgttcagcatgatattttgagaatgaggaagaacctgttaaagttagttcgtgtaaaggagtttgctccagaagcacaattccaagacccatgcgcctcattcactctgccaaatgtgatctgcagctattgcaacgattgccgggacctggatctctgccgcgactcggcactccagggccaggagtggagatgcgcggtgccgcagtgcgggcagccgtaccaccgcgagcagatggagaacgcgcttctgcaggtggtccggcagcgagagaggctgtaccacctgcaggacctggtgtgcgtgcgctgcaggcaggtgaaggccgcccatctgtcggagcagtgttcctgcgggggctccttccggtgcaaggaggagccttcgtatttcctcagcaaaatgcgggtgttcctgaaggtggcggtgagccaaaagttcccgctcctgcaggactgcgtgcagtggattcttgaagccagatgacgcgggctgctacttcaacatagttcattagttcacctgatcgctaggttgtacaacgtgcacaggctgtagctccgaagagtgtataaacgggtgtatagcgctgccacagttcattgtagctctgccctgcttgcaaaaggttgttgttgtattgtagatattcaaaggtggatggcgagaaacgatagtaaccttggtatcgaaacatctggataactagccctctcgtatgtgattgctggg

SEQ ID NO: 128097 - DNA, 313 bp, Zea Mays
atattgttcagcataatatcaaccgtatgcatcatacttattttgctataacccctttatttttgttgtctatagttggatctacttaaagcatggttttctcacatgcaagaggttaagcctggcatttatgttacatacaacggtgacttttttgactggccatttttagagaagagggctgcacaccatggaataaaaatgaatgaggtgcgttgttgatttaattcacttcaggttttattaggaagaatgggtaatttggttattataatcttgtattgtggaagcacttttagaaaatctgatctcc

SEQ ID NO: 128098 - DNA, 5413 bp, Zea Mays
cttatcctgaagtgacattatctccaatggaggtggtctaaatacatctatgtgacacacaaaactaaatattactccttgtctgtgattttgtgtttagttttatggattgtactcgtcttaatttgaaatatttgcctgagttcattttcaccccattgtttctttttcagacaatggcttcgtattctgtatcagatgctgttgcaacatactatctatacatgacttatgtccatcctttcatcttttctcttgcaaccataatacctatgtcacctgatgaggtactgcggaaaggaagtgggacactttgtgaaatgctgctaatggttcaggcattcaaggctagtgtcatttgtcctaacaagcaccaagctgatcttgagaagttctacaataaccgtttattggaaagtgaaacctacattggtggtcacgttgagtgtcttgaaactggcgtctttagatctgatctccctacaaagttccaacttgaaccattagcatatgagcaactcattggaaatcttgatcgtgatctgcattatgtcattgctgtagaaggaaagttggatattgattctgtcacaaattatgatgaagtcaaggatgccatagagcaaaagcttgttgcattgcgtgatcacccaattcgcgaagaacgccctctaatctatcatctggatgttgctgctatgtatccaaatattattttaaccaatagactccagccaccatccatagttacagatgtggactgcacagcatgtgatttcaatcgtcctggaaaaaattgcctcagaaagcttgaatgggtctggcgaggagagacctacatggcaaaaaagaatgactattatcacataaagaggcaaattgaatcagagctgattcaatctggtggcattgcatcgtcaaagccttttcttgacctctcaaaaccagaacatttacttaaattgaaggatcgtttgaagaaatactgccaaaaggcgcacaaaagagttgttgataaaccaattactgaagtcagagaagcgggaatatgcatgcgtgaaaattctttctatgtagacacagtgcgtagctttcgtgatagaagatatgaatacaaaggtcttaacaaaacatggaaaggaaaactcgcagaagcgaaagccagtggaaattctatgaaaattcaggaagcgcaggatatggttgttctatatgattctttgcaacttgctcacaaagctgggaagaagctaactatatcttatccctgtgtcatgcttaatgctgacgttgcaaggaacaacactaatgatcaatatcaaacattgaaagacccagtaaacaagacatatacaacacacagtgagtgttccattgagtttgaggttgatggaccttacaaggccatgatcttacctgcctctaaagaggaagggattctgataaagaagagatatgctgtcttcaatgaagatggcactttggcagaacttaaaggttttgaaatcaagcgtagaggtgagctgaagctcataaaagtttttcaggcggaggtatttgacaaatttcttcatggttcaactttggaggaatgctattctgctgttgcctctgttgctaaccggtggttggacctactggataatcaaggaattgatattgctgacagtgaattgcttgatttcatatcggagtcgagcacaatgagtaaatctttagttgactacggagagcagaagtcttgtgctgtaactacagcaaaaagacttgccgaatttcttggagattcgatggttaaagacaaaggactacattgccaatatattgttgctcgggagccacaaggcactccagtgagcgagcgtgctgttccggtagctatattcgagacagatcctgagatcgcaaagcattatttaaggaaatggtttagattctcctctgatgcaaacattcgatctattgttgattggtcttactacaagcaacgcttaagttcagctattcagaaaatcattacaattcctgcagcaatgcaaaagatctcaaatcctgttcctcgagttcttcatccagattggttacacaaaaaggtcagggagaaagatgatcgatttcggcagcgtaaactgcgtgatatcttcagtcccttggctaaagaagaggggctgcataacttgaataggactggagatatggaagatttattaatttcaaacaaggatttgaggaaaaatccttctcatggtttagacattgacaaagaaaacaatccaaatggagcatcagtgggatctggtttgaatattagtaaaaaacaacaaaactgtatgactgggttaaatgttccttgcacttcacaaatccaaaatgctgcttcttatgaaacagttgataagggtactgactatcaaggatggcttgatgctaagaaaagaaaatggaaatatgtccgtgaacaaaaaaaacgtcgaaggttgggtgctgccgccacttttgacgatcctaacgctttgctctcggccagacatgccaatcagctacctgtcaacagtcggaatagatctacatttttccagaaacaagaattggccctctttagatcacattggcagataatccagcttgcttcaagtacagtgcctggtcacttttttgcgtgggttgttgctgaagggattatgttcaagattcctattaatgtgcctagaactttttacctaaactcaaaggctcctgtcacagaagagtttccaggaaggcgtgtcaaaaagattctcccacatggtagaccttgtttcaaccttattgaggttgtaacaactgaagaacagttcagggctgaaggcaaaaaacttgcagctcatctagcagagccagatgttgagggaatatacgagacaaaaattccaccagagctcaatgctgttctccaaatcggatgtgtctgcaaagtggacaagtctgcaaaaagacgaagtatacaagatggatgggatctagccgagttgcaaatgaaaacaaccgccgagtgctcatatctggaacagacattttcatttttctatttataccacagcttgagtgaaggaagggctgtatatgtattttacttccccacgtctttccgaatacatgcagtgattgtcaatcctttccgtaacaaagaaatatctccgtcatttcttgaaaagcaatttggagatgcttgccaagcccttggttctgtccctgagaatctgtctttccatgtggactaccaaacatcaattgatgctggaagcaaatacgcacaaagaatgttacttgagtacaggcaacaacattctggacctgtcgtaggcatcatagagtgccctaagctccaagctataaaggtagctatacgagcacttgatgatttgccatgtgtaaccattcctagcaatgcacgtgacaacaactatcaggctcttggctggcaagcaacagctggccgaacaagtatgcagcgttgtgctgcatcaacccaatggttcaatgaacggatttcactcgctaaatatgcacatgtgccactgggtaattttgaactagactggcttctttttactgccgatgtattcttttcaagggcattgcgtgatcaacagcaggtactatggatatctgatgatggcattcctgatttaggaggcacttatgaaggagagacatgttttgctgatgaagtcattcagcctgcacttacttatcctggtgcatatagaagagtttctgttgagcttaagatccaccatttggcggttaatgctctcctaaagagtagtcaagtggacgaaatggaaggaggatcaatcggtagctttggaaacgacgtgcctccgggttcaaatgccactgaaactgactttgatgatgctagcttatgtatacctgctttccaggtgctaaagcaacttattcaaagatgcatttcagatgcagtgtcgtctggaaatgtatttgctgatgcaatattgcaacatctctaccgctggctttgcagcccacgatcgaaacttcatgatccagctctccatcgtcttcttcataatgtgatgaagaaagtctttgctctattgttggccgagttacgaaagctgggggctaatgttatttttgcaaacttttctaagataatcatagatactggaaaagtagatttgtcatctgcacatgcatattgtgacagcttattaaggaccttgcagacgagggacctcttcgagtggatagaattggaaccattgcacttttggcattccttactgttcatggatcagtataactatggcggaattcaagctaaaacacaaaacgtagactcttcagatggtgataatgatattgatattgtctcaagctggaacatggcagaagatttgcccaaagatacacaggatcattttgtcttaatcgtatcagaattcctatatattccgtggaaattcatgaaggaacaagtagctgctcaagctaccataagggatgatacctcatgcactccatctgtaacaatcatggctgctgagaatcttgagggccaggtgatagaacacctccgtgacaagattagcaattactttgcagacaagcttctaagaactgtaagtgatatacttcaccatttcaaagggaaaagcaaacatgagtcagatgaacctgcaaaatctgatcctcacacgcataaaggcgatgctgcattggagttcattaagcatatctgtgcagttcttgctcttgatcaaaatgttcagcatgatattttgagaatgaggaagaacctgttaaagttagttcgtgtaaaggagtttgctccagaagcacaattccaagacccatgcgcctcattcactctgccaaatgtgatctgcagctattgcaacgattgccgggacctggatctctgccgcgactcggcactccagggccaggagtggagatgcgcggtgccgcagtgcgggcagccgtaccaccgcgagcagatggagaacgcgcttctgcaggtggtccggcagcgagagaggctgtaccacctgcaggacctggtgtgcgtgcgctgcaggcaggtgaaggccgcccatctgtcggagcagtgttcctgcgggggctccttccggtgcaaggaggagccttcgtatttcctcagcaaaatgcgggtgttcctgaaggtggcggtgagccaaaagttcccgctcctgcaggactgcgtgcagtggattcttgaagccagatgacgcgggctgctacttcaacatagttcattagttcacctgatcgctaggttgtacaacgtgcacaggctgtagctccgaagagtgtataaacgggtgtatagcgctgccacagttcattgtagctctgccctgcttgcaaaaggttgttgttgtat

SEQ ID NO: 128099 - DNA, 1150 bp, Zea Mays
gcctttgatggttctttatcttatgttgttttatggtttagtataactatggcggaattcaagctaaaacacaaaacgtagactcttcagatggtgataatgatattgatattgtctcaagctggaacatggcagaagatttgcccaaagatacacaggatcattttgtcttaatcgtatcagaattcctatatattccgtggaaattcatgaaggaacaagtagctgctcaagctaccataagggatgatacctcatgcactccatctgtaacaatcatggctgctgagaatcttgagggccaggtgatagaacacctccgtgacaagattagcaattactttgcagacaagcttctaagaactgtaagtgatatacttcaccatttcaaagggaaaagcaaacatgagtcagatgaacctgcaaaatctgatcctcacacgcataaaggcgatgctgcattggagttcattaagcatatctgtgcagttcttgctcttgatcaaaatgttcagcatgatattttgagaatgaggaagaacctgttaaagttagttcgtgtaaaggagtttgctccagaagcacaattccaagacccatgcgcctcattcactctgccaaatgtgatctgcagctattgcaacgattgccgggacctggatctctgccgcgactcggcactccagggccaggagtggagatgcgcggtgccgcagtgcgggcagccgtaccaccgcgagcagatggagaacgcgcttctgcaggtggtccggcagcgagagaggctgtaccacctgcaggacctggtgtgcgtgcgctgcaggcaggtgaaggccgcccatctgtcggagcagtgttcctgcgggggctccttccggtgcaaggaggagccttcgtatttcctcagcaaaatgcgggtgttcctgaaggtggcggtgagccaaaagttcccgctcctgcaggactgcgtgcagtggattcttgaagccagatgacgcgggctgctacttcaacatagttcattagttcacctgatcgctaggttgtacaacgtgcacaggctgtagctccgaagagtgtataaacgggtgtatagcgctgccacagttcattgtagctctgccctgcttgcaaaaggttgttgttgtat

SEQ ID NO: 128100 - DNA, 1388 bp, Zea Mays
acagtaaacacgatgtatatacatgcatacatacatcgttaattaaacgatttgaagacaacatgagagttacaaagacacaaaaacaaatctatggagtacacttgcgatgaaaaggcaaagagagtgaaacaaacgttaacagacggcaaagtaaagcaagcagcaagcacttgaacaaagttctgcgcgcgcccggatctctagtctacttatgatgacgccgaagaagaagaggaagaaaagagtgttcaagctcaagctcaaccataaccgacgatacgaccagaccattttagaccaccgtcgccggccgggcgtccaagcagctagcaatgcatgcaagcaggtgctctgttgaattaacggccagcgacgaggaacctcgccggcgggctcaccaccaactggtagccggccagctggtgcacgtggtggtagcctctagtgctgccggcggcgaagcgtccacagccaggcgacgcgctggggtcgcccagctccatctcccacatgacctccatgaagtcgtcgacggcgcagggcagctcgagcgggccgtcgcagccggcgaagccgtactcggcctcggccgcgtccagcagcgcccggaacagcgggtggttggcgcagcgggcgcgcaccccgaaccgctccttctccgggcccaccagaacggtgaagtagccggcggctggcaccggcggcggcgggggcacgcccagggacggcgacgacgccgccctcttcggtgccgccggcggtggcggcctcctccgttgggccagcgaggtccggcacctctgcagcgtcttggacaggatgttcttcttctcgcctccttccttcattgatgttacgattacgaacgaacttacgacagtaattaaacggcgtagtaactgagccgcaaacaagctaagctagcacaactgcacaaggcaaacactatcaacccagtaggtttttctgttcaacaagctaacgaccacagcagatcaaaagactatcaacccggcctattagctagccgcggtcgtaggcctggtgcaggcgagacatgtccacggtggccttgggcgcgaggaggctgtgcttcttggtgctattgctggtgttattcatggctcttggaggacggctggaggcatattctgcggctacaggttcagcgtgcaggaggcaggagcaggcgctggactcgacgatggattgaccgctgagctgagctgaattgaaagaacgcagagcagcagctagctagccgagagagagtgcgtgtacgtgcagcagaggcacactagctagagacaaagaagggtttggcttcctcgtggtcgaggaggagatgggatcaggagagctagagccgatcgatcgaggaggaa

SEQ ID NO: 128101 - DNA, 668 bp, Zea Mays
ctaccgctgacagacgattcaaccgtccgccaaatccaaacgcaccgatccattccagaccatggcgacgaccaaggaccccgcgaccaccggcggcgagcccgccatcggcattccctaccacccggcggcggaggcccaggggcactattactacgcgccgccgccgaacccctacgcggcggggatgccgccgcccaacgcgatctacgccggcgcgcccaagggggtgccgctccagcagaccatgttccgcgacacgcccgcgcccttccactgccaggcctgcggtgaagccgccgtctcctccgtccggtcaaagccaagccttgcatccgtcgtggcttgcatgatgcccttcatgctgggggtctgcttcctatgcccttcgatggactgcctctggcacaagtaccattattgccccagctgtggggaaaaggtgggtgagttcaggaagtcggacccgtgcctcgtcgtggatgcgacccggtggtccgagccgagcttcgccgtgcctgcgtagcgcacatatgtacatgtaccacttgctatactgccttaaaaaatgagtgtgtttgtttctctcgtctagtctgtatataaaagatgctactggcttgttgcatgctgtatattactgaacctcaagaactgccgttgcgctc

SEQ ID NO: 128102 - DNA, 2123 bp, Zea Mays
atgaagtcgccgctgcggaggttcaggggcttcggccaccaccacaccaaggaggagcggaggggccaccaccagccgccgccggccaagctcgacgagctcgtctgcgccgcccaggaggtggaggacatgagagactgctacgatggcttgattgcagctgcggccgccacaacaaatagtgtatatgagttttccgaggctcttgaggaactgggaggctgcttcctcgcaaaaactgcactaaatggcgatgacgatgatgatagcggtagtagagtgctcatgaagctggggaaggcccaatttgaattacaaaaacttgttgatacctatcgctcaaatatcatttatactatcacaaccccatcagagtctcttctcaaggagctacagactgtcgaggaaatgaagcagcaatgcgacatgaaaagagagacatatgaagctatgagggcatcctatacacaaaaaggaaggtcaaggcattccaaaactgaaacatactctgcagaacaactgcaaagcgctctcgctgagtaccaagaagacgcagcgctgttcatatttcgcttaaagtcattgaggcaagggcaattccatagccttttaacacaggcttctcggcatcatgccgctcagttaagctttttcaggagagggttgaactgtcttgaggcactcgaacctcatgtaaaggcaatagctgagaaacagcacatcgactaccagttcagtggtcttgaggatgatgcatctgacaacgatgattacagctcctaccaggatgattgcagtgacgatggagagctcagtttcgactatgaaataaacgacaaggatcaatattttgttgcttcaagtggttcaatggatttagacaaaagagatgtgacgaattccccgcagccagtaaaagaaagcatgcaggaaggggtcaaacaaaccaagggaaatgttataactccgcgagtgaagccagagatcaacacacactcagcacccattctggcaggcaacttaccggatccgtccgagagatcttggcaaacgaagccatcttcagccaaactttcgtacaagcttccaatgccagttgatgacaaggatcccagatctgcaggtgctcagagaccacatcattcacagcagctggagagtaagcctcgtgtctcagcgaatccgtggcattcgtctccactgacgaaagacttcaggccgggtggccacgtgaaaacgccaccaagtgcggagggggcctcggcgttctcccagccggtctctgatttcaagaagatgaagaggcagttctattctggtccaatggcaagcggaccagggttaagcatgccatcttcgctgaacgatcgcagatcatccgcggcacaagcacagcatcttgtgatgccaggaaatttgcaaggcctcttctggcagccgtcatctgcgtccccaaaagttccccccaagatgttggggcggcatccaacgaaatcaccaaggatcagcgagctgcacgagctgcctaggcctcctccagccagcgtggagtccctcaggccttctggtttggtcggctactctggtcctctggtatccaagcgtcagactcagatccctgcagccacagcccgtgtgtcgccgacagcgtcacgaaccccctcgccgcttccaccgccgcctgctaccctgactcgcagctactccataccatcaaatagccagaggataccgatcgtcaccgcggacagattgttggaggctagaaatagcagggacggcagcgatatttattcgccgccacttacccctttgtcactgactgatttgtcccagcagcaaggaacgaaaactactgcaggtggcacaaggatgaagggggccttatgacataaatcaaccaaatgcagactgatcttagttgattttgtaagtagtgatgtattttaggttcatattcatgatattcttttattcatcgtctgtattacaaatgaaaaggacggaaaagtaatatatacttttcttacacagtagtgatgtattgtaggttcatattcattatatattgtttcattcaccgtatgtattacaaatgaaaagggcggaaaagtgcaagaaca

SEQ ID NO: 128103 - DNA, 96 bp, Zea Mays
cgctcacaagactcatataatatactatccttctatggaatcaatgtgttgattaatattcgctacatatttatcattgtttattttttatctatg

SEQ ID NO: 128104 - DNA, 100 bp, Zea Mays
gttctgccgcccagtccggtgaacgggctgctacaggtgctgcacgcactgcaagcagtgtacgctggtgtgctcgtgtacgtacaaaaacaaaaaaaaa

SEQ ID NO: 128105 - DNA, 330 bp, Zea Mays
atgaactacatcatgacttcatcttctttgttgacacgctaccaaggaacgcccaatcaggataaggacattcgtagctccaatcaggaccagtgtaccgcacacaatgcaaccatagtccttcctcatctctatcataacctactggagcaagatttggacagtttgtgcacatggggtcgatatcaaactccacatccgttcctgcatctttgctgccatgatcagcagcactactgtctggatctgatggtgcaatttttttactggcatttgttccttttgttgatcgtggacaaaagttccccgataggtacagctcatcattag

SEQ ID NO: 128106 - DNA, 1704 bp, Zea Mays
tgtttgagaacaggataaaattcacttgctacccaaaattgaataatatgtagattttaggcctttcaatttctttgctctaaacaggcccttaagagcgatagtgctgggcagctggggtgttgtgtttaataacaacgtgagcgtccaagtaaaacccgtgacaaagctatagggtataggggcaaacaaaagaagaaaacgaccaaagatgcctgcctcatcatcaagaaatgagccaaggattacatccacagtggttatatataacagtgggcggctgcaatctccactcggcctccgtcgctgcaacagcaacggcgtcgcgctgcccccacaacaccaccacagcgaaaagcagcagcctcctttcaatccttcacccacctccccgctccccccggcctgtctctccgttcctctcacgcacttcttcctccacacagacacccacacccacccacccacttggccgcccggggcgccccataatcccccctggcctcttgatgactactgcgcccaacatcgagatgatcgcctcctcgctgcgccactgctccctcaccggcggcgctggcgggcggcgccggggaggcaccaggcgccgcggcgccgagggcggcggcgacaccgacggcgtcaccgtggagctgaactccgaggtggcactgccctaccactgggagcagtgcctcgacatccggacagcagagatgctgttggtgaagcggaaggcgtgtgcggtcatggtggagtggagtttccttctttccagccctgccccagctgccttcctgcaacctgttccccgatacctgcatagtgcctgcacacccccacccccacctctaatgccactagttcgtgtgagtgtatgcactgtataaacagacaaacagaacgcaacaaagatgattaggaacggtctacgtgcaaatagattctatagcgttgtccaacagctagctgtttgtttaacgcagtaacctaattaatagctggtgtcttgcgttttttttttctctctgagctaattttcgtgcagacggggcaagtgtactacatcaactgggagaacggcacccggacgacggtggacccgcgcacggcgtcggccttcgtctcctccccgacaccgcgctcctccacgtctcggcgcacccggcgcgcgtccacgccgtcgtcggggtacacctccgtgtcgtcgtccgtgggcgcggcggacgtcgtgaccggcgcgtggcggggcgtcagcaacgacagcgggtacgacaacgacgacgagcaggaggacggcgaggcggacgacgaggacgaggccgagagcagcagcagcaccaccaccagcagcagcagctccagcagcacgggcagcagccgggggtcggcggtctcgtcgacgctctcgtccttctcgcccaccgacgagtccggctccggcgacaacggcggcgcccgcctcggcgccggccacgtcctcgtggcggccggctgccgcgcctgcttcatgtacttcatggtgcccaagcgcgccgacgtgtgccccaagtgcggcagctccggcctcctccacctcagccgcaacggctacgcctgagatcgccggcgcggccatatgctcgctccgctaattgtaggagggggatcggaggacgtctcctgaggcgcaggcagtcgtgcgtgcaatgcaagccacctctg

SEQ ID NO: 128107 - DNA, 157 bp, Zea Mays
tctgtttgaatgcttcaaacctttttggtggaacctttgtatgtttgaacctctgttgtggaagaactagtgtgctagaattgtgtatgacttgtgatgagaatgttgtgtatgatggcttttctgtgtattatgattctgtgagctatcatgagag

SEQ ID NO: 128108 - DNA, 1184 bp, Zea Mays
gtaggtagttgctgctgtgctgttcccccccgtctgtccctgagaggcccgcggcgtctccgcttcgcctcaccacccaccacctcctcctcgccggtacccctcgccggagccagcgagcttccggcgaagaaatccggcgggcacaccacacgggggcggagcaggggggaaggggtccggcgccggaatgggggcaagcggccgggtgctcaacgccgtcgtcgctggtgtcgcgtcgctctagggttaggtaggtgtccgtagctttctccttcgctccccctccctcccctttgccgcccggcgtcgcattggggtcccgtgccgaccgccaggccgcgtgatccacccgtgctcgagctcggagaggctcccggttgcgtggcatggggccatctcttccgcctgctgccgctgactgggaattcggcaccatttcttcgctctgaggagtagtaggtggcagcagtcgccgatctggatgccatctcaagtcatggatccgaggcgccacctctcccagttcagcaatccaaccgtggctgcgtcctccttctctgaggagcagtttcgccttcccacagagaggcaggtcggattttggaagcaggagtcgctgcatcacattggaagcaagtcagttgcatcttctccaattgaaaagccccaacccattgggacaaaaactgtgggtcgggtagaaccacaaccatacaagctgagagaccagaagactgcatttagccttgagcacaagacttttggtcaagagagacatgttaacctaccaccatctctgtggagagctgatcaagaccctaacctccaatctgatccatctttatttcccgatggaaggaggactagtccaaatgaggcctacaacgagaatgggcttttctcaagctccctatcagaaatttttgacagaaaattgggactgagatccatggatgtgcgtctacgccagccagttcaaaaggttgatctaactcatgtagatgatgagccctttgagttaacagaggaaatcgaggcgcaaataataggaaacatacttcctgatgatgatgacctactatcagatgttcttgatgttgggtacacagcccatgctaacatgggtgatgatgtcgatgatgatatattctacactggaggcgggatggaactggaaaccg

SEQ ID NO: 128109 - DNA, 811 bp, Zea Mays
aaaacaagccactcagacgtagaaaacttgacatacattactccattccgaaggacaatccttcggagaaggatattaaccaggggatgcttgttgtatttaatgttgacccctctataacaaacaatgatatccatcagatatttagcgaatatggtgacataaaagagattcgcgatgcaccgcaaaagggccatcacaaaattatagaattttatgatgtcagagcagccgaaggtgcagctcgtgctttaaacaggagtgatcttgctggcaagaaaataaaactggagactggccgtctgagtggtgctagacgttcaacacagcacatgtccaaggagttggggcaggaagaatttggtgtatgcaaactgggcagtccaagcacaaatagcccttcattgccttcattgggttcatctaatatagcagcaatgacatcttgtggacgtgaaaatgggagtatgcatggtttgcattctggacttctcacatcaatgagcccgttcagagaggcttcatttctgggtctatcatctaccctaccacagagcctgtcctctcccattggaattgcttctgctgcaactcatagtaaccaggctccccttggtgagctcagccactctcttagtcggatgaatgggcatgtgaattatggttttcaaggcttgggtgctattcatccccattctcttcctgatgttcacaatggagcaaataatggcaccccttacaatctgaacaccatcacacctgttggtgtcaataagaactcaagaacagctgaagcagttgacagcagaca

SEQ ID NO: 128110 - DNA, 1217 bp, Zea Mays
caattctcctgtgctgtggcaaaatcccggatcatttgtaaataatgtaccgtctcgccccccagcacaaatgcatggagttccaagagcaccatcacacatgattgagaatgttcttccaatgcatcatcatcatgtgggctctgcgccagcaatcaatccgtcactttgggacaggcggcatggctatgcaggggacttgacagaagcatcaagttttcatcctggcagtgttgggagcatgggatttcctggtagccctcagcttcatggtctggagctaaatagcatattttctcacactggtgggagtcgcatggatccaactgtgtcttcagctcagatcagcgcaccatctcaacagagaggtcctatgttccatggaaggaatcctatggtcccccttccttcatttgattcacctggtgagcggatgagaagccggagaaatgattcaggtgttaaccagtctgataataagcggcagtatgagcttgatgttgaccgcataatgcggggggaagactcacgaactacactgatgataaagaatatcccaaataagtatacctccaagatgctcttggctgctattgatgaaagtcataagggcacttatgattttatttacttgccaattgattttaagaataaatgtaatgtcggctatgctttcatcaacatgaccaatcctcagcatatcattccgttttatcagagttttaatggtaaaaagtgggagaagtttaacagtgagaaggtggcatcacttgcttatgccagaatccaagggaaaacagccctgattgctcatttccagaactctagtttgatgaatgaggacaaacgctgccgccccatacttttccactcagatggtcctaatgcaggagatcaggaacctttccccatgggttcaaacatccgagccaggtctgggagatcccggacttcttcgggtgaagaaaatcaccatgacatccagacagtcttgaccaacggtgacacttcttccaatggagctgacaattcaggtcccaccaaggatactgagtagctgaactgcagcttgctgcatcgctaaccacaaaggcccaaacttaggctgctgcagaagttttgtctctggcgggaagctatatgcaagagggtggtaccggttcgttccccagaatctatgtgcttgttaacctgaaggccgagaaaggcgaaaaggc

SEQ ID NO: 128111 - DNA, 1810 bp, Zea Mays
caattctcctgtgctgtggcaaaatcccggatcatttgtaaataatgtaccgtctcgccccccagcacaaatgcatggagttccaagagcaccatcacacatgattgagaatgttcttccaatgcatcatcatcatgtgggctctgcgccagcaatcaatccgtcactttgggacaggcggcatggctatgcaggggacttgacagaagcatcaagttttcatcctggcagtgttgggagcatgggatttcctggtagccctcagcttcatggtctggagctaaatagcatattttctcacactggtgggagtcgcatggatccaactgtgtcttcagctcagatcagcgcaccatctcaacagagaggtcctatgttccatggaaggaatcctatggtcccccttccttcatttgattcacctggtgagcggatgagaagccggagaaatgattcaggtgttaaccagtctgataataagcggcagtatgagcttgatgttgaccgcataatgcggggggaagactcacgaactacactgatgataaagaatatcccaaataagtatacctccaagatgctcttggctgctattgatgaaagtcataagggcacttatgattttatttacttgccaattgattttaagaataaatgtaatgtcggctatgctttcatcaacatgaccaatcctcagcatatcattccgttttatcagagttttaatggtaaaaagtgggagaagtttaacagtgagaaggtggcatcacttgcttatgccagaatccaagggaaaacagccctgattgctcatttccagaactctagtttgatgaatgaggacaaacgctgccgccccatacttttccactcagatggtcctaatgcaggagatcaggaacctttccccatgggttcaaacatccgagccaggtctgggagatcccggacttcttcgggtgaagaaaatcaccatgacatccagacagtcttgaccaacggtgacacttcttccaatggagctgacaattcaggtcccaccaaggatactgagtagctgaactgcagcttgctgcatcgctaaccacaaaggcccaagttattactttttgcagacctattttcagttctagcccctcccttcccatttcgattttgtttgttaagtcctcccgatctgtatttattaacttgcatgatgcgggtcaccgaagacttaggctgctgcagaagttttgtctctggcgggaagctatatgcaagagggtggtaccggttcgttccccagaatctatgtgcttgttaacctgaaggccgagaaaggcgaaaaggcgcagggagagcctccagattttggtcgctgtaagaattaaccccatgttgtacagctggtcccagtaatttgtgctgaggggagagtgaaggagtcatttgatcagtttttagtggtggtgtgtggagaggaagagtcttgcctgcttttcctttttgaactttcttttgtgccttcacctgtgttacattttgagtcgagggctcctcttaaattgtgtgcagaggggctcgattttgttaccccagaacaaggcgcatgtgcgtcggcgtcgtcttctgccaccgtatctatcgaccttatgtacatcttcatctatatatagtatgagttttgatgtcatctatttcttggatgtctcacaaggttatttatttgtatctacgtgtctgttatgcttgtggtgtgtaaagcctctgtgaatcttatgcttggttgcttactatgtgagcatgaatgcaagctgtgagcgtgtaa

SEQ ID NO: 128112 - DNA, 849 bp, Zea Mays
atggcgaataggagatcgacgaccggcacggaagagataagcttgacgcggaagctcgacacgttgtggcgagcagagaattccgcgatggatagcgaaactcgacggcgaacggtgcgacgacgaatgatgacaactggcgaagccaacgacgagccgatcaaactaaaactatacgacaccgaccggcacacgggctacagaacggcgggcggcgaaatccgagctggagctcgcggcaacaaggagcaggacgcgcaggcatctggacaggtacaggcgagtggggtcaaggacagtacgttgccgcggccatggaaaatattggagcagggagtgcgatagcacgatgacgttgacgaagcatcgacgagcgtgcgcgcagtagcgagttccagggagcaggagacggctgggctgggcgactcggtttcgagcgctagggagaccgagctgggcggatgcgtgctggaagacagacagagggagcagaggcctcggcgccggcgagcagctgcaggggagatcgcagtccgagcagagcctcggcagagagggccagggaggagcgtcggcgagcagaagcttgaaggaacgcgcggcagggcgaacaggccgggcgccatggaagccgtgcgcgtgtgggagatcaggctggggctaaagcttggccggcgagcaagaagttcacaggagcagcggctgggcgcagggcgagccatggagatgggcgccgagctccatagatgcagggcgagcagaaggaacggggagggagcgctgcgacgagcgcaggggctccacggcggggtatttgaagaccccaggggcggcgccgtgaggagataa

SEQ ID NO: 128113 - DNA, 849 bp, Zea Mays
atggcgaataggagatcgatgaccggcacggaagagataagcttgacgcggaagctcgacacgttgtggcgagcagagaactccacgatggatagcgaaactcgacggcgaacggtgcgacgacgaatgatgacaactggcgaagccaacgacgagccgatcaaactaaaactatacgacaccgaccggcacacgggctacagaacggcgggcggcgaaatccgagctggagctcgcgacaacaaggagcaggacgcgcaggcatctggacaggtacaggcgagtggggtcaaggacagtacgttgccgcggccatggaaaatattggagcagggagtgcgacagcacgatgacgttgacgaagcatcgacgagcgcgcgcgcagtagcgagttccagggagcaggagacggctgggctgggcgactcggtttcgagcgccagggagaccgagctgggcggatgcgtgctggaagacggacagagggagcagaggcctcggcgccggcgagcagctgcaggggagatcgcagtccgagcagagcctcggcagagagggctagggaggagcgtcggcgagcagaagcttgaaggaacgcgcggcagggcgaacaggccgggcgccatggaagccgtgcgcgtgtgggagatcaggctggagctaaagcttggccggcaagcaagaagttcacaggggcggcggctgggcgcagggcgagccatggagatgggcgccgagctccatagatgcagggcgagcagaaggaacggggagggagcgctgcgacgagcgcaggggctccacggcggggtatttgaagaccccaggggcggcgccgtgaggagataa

SEQ ID NO: 128114 - DNA, 348 bp, Zea Mays
atgtcgaaaactgttgatagcagtgcgacattcaggaagcccggcgacgacacctccaaagatggagcagtggtccagcgagtaattcgtgagggcgccatgatggaggataccgtgggcgtggtcggggccgtggtcgcagtcgtggcagaggagggcgctcatcaggtggaccaccggctggaaaggtcactggtgatgagtgcagaaggtgtggcaagatgggacattgggcgcgagagtgtccgtaaaggcacaagaaggagcaagcacatgctgtccaagaagttgttactactcttcttgtggcaaagacttcccggtaaagacttcaacaacgatttctaa

SEQ ID NO: 128115 - DNA, 819 bp, Zea Mays
atgctgagggtcgcgggcaggcgcctctcgtccgctctcgcctggcgccccgccgccgccgcctcaggctcccggggccctctcgccggtacactacccggccgcgacgacgacgacacacgcgactgcagggcgcgtttcgccatcgaatctcccttcttcgccgctgccagagggttttcagcagagactcttgctccaagaaaccaggatgtgggcttatctgagctcccagcaactgtggcagctgtgaagaatccaagtggaaaaatcgtgtatgatgagtataaccatgagcgctacccacctggagaccccagcaagcgtgcatttgcctactttgtgctgagtggtgggaggttcatttacgcatctttgctgcgacttctcgtcttaaaatttgtcctaagcatgtcagcaagtaaggatgttctcgcgcttgcctcacttgaggttgacctctcaagcattgagcctggaaccacggtgacggtgaagtggcgtggcaagccggtcttcataaggcggaggacagaggatgatatcaagttggccaacagtgttgacgtcgcatccctccgccacccagagcaagatgcagagcgcgtcaagaaccccgaatggctggtcgtcattggggtctgcactcacctgggctgcatcccgctccctaatgcaggagactttggtggctggttctgcccgtgccacggctcgcactacgacatttctggtaggatccgcaagggcccggcacccttcaacctggaagtgccgacatacagcttcttggaagagaacaagcttctcatcggctga

SEQ ID NO: 128116 - DNA, 820 bp, Zea Mays
tctttcagctctacctctggccgatccggacctcttctgtctctgtctctatctctctctctcgcgcgcgctcgtgcccgaaacgctgacatgtccgccaccggcgttctctggccgcagcgcgcggtggccatgtcgtccgacgcggtggccgaggccaggaagggccggctgaagcagcgctacgacaacgagttccgcctcgtcgcagggtgcgtgccgtaccgggtgaataagaaggacgacgacgaggtagcaggcagcccgtgcagcagcagcctcggcgacgacacgggcacggccgaggtggaggtgctcatgatctccacgcctaaccgggccgacatggtcttccccaagggcgggtgggaggacgacgaggacgtgtaccaggcggcgtcccgcgagaccatggaggaggccggcgtcaagggcgtcatccacagagctgccttggggcactgggtgttcaagagcaagagcagccaaagcagggccggcccgacgggagcctgcaagggctacatcttcgccatggaggtcacggaggagctggacacgtggccggagcaggacacgcacgaccggcggtgggtcgctcccgccgaagcctaccagctctgccggtacgactggatgcgggaggcgctcaccgcgctgctggagaggctgccggtgctcgaaccggtggtggctgccgcggcggctgcagccacggcggaactgacgaccgaccaagctggcatgtacatgatgctgcaggcgacctcggacggcgctgtggcgctgtgctagctgattgatggacgacattggtgtt

SEQ ID NO: 128117 - DNA, 1144 bp, Zea Mays
atggccgtggccccctccgcgccgcgattcttcccatcctctccctccgcgcggtttgcggctgccaatcctctccctccgcgtcgtgttcttcccatcctctccctccgcgtcggatctctccccatgtccaccaacgccggcgtccgtgatggcgcgcccggggcggcggtggacgcggctttcgccaggcatgcgctccaggccgaggccctcctcgggtacctccccgcactggccaccagcccgcgtgccgggggcaacagggtaaaccccgccgtcgccgcgacgcagctcggggcgctcggccggtggaagggctcggcgaggggccttctcgagtacatggtcgtccacgacatcggtggtgccatcgtcgccgcccctgggagagccaaagccaagcggaggaggccgcagtcgaccggatttgggaatcatgctcctgccaaacgggatgaacggaaggaagcgagatctttctgggttgatttggcttgaaggaagcgggatctttctggacaatggctgtctagcttcatccattctgggaacaaagaaaaaacaagaaacatctggtgtctgagtccagtagaaagttgtgcaaagagaagagcaaaatatctacaccagacgtctcttttaggtacagagggacggagtcttgtaagaaggtagttgcaagcttgaagtcgtgtgagccatgggggaacagggcattctggacaaacgccgttgggccaggttggaagttgagctttgctgttgagccatggactaagggctttagcatgtcgtgtgcggcgccatattctgctggagccacagagcatcaattatcgctcgatgagaaggtggataactccaccgttgcatctgattctgatgggtaaagttatctatcagctagactcatggcgggaaaggttttttctattgtcggtatccagcacctaagtaggcctaggattttttcttctgtctttaattttttcgtgaacgcgcaggagagttgcgcatcattaaattaagagaagaaacagtccaaaatggaccaaagtacaatgccacaaaaggccaaacacaagaccaccaaatcctgaccaaacacaagaccaccaattcctgctacgcacaggactgc

SEQ ID NO: 128118 - DNA, 1235 bp, Zea Mays
cgtgttctgctcccaagtcacctgccatactgaacgtgcgctcgttgtaaccggggtcgacctcaaccacgacgacgatgcggtctcctcgtcccaggctcgacctcctcgctgacctcgccctgctccacctcaactcgcgatgaggattgtcagcacgttcacatcgcgctgttgcagaacgttggagcctctcagaactctagaagctgcctaccaccacgcaccctaagataggggcatattgtgttagtcgcctgcacacatactgaaatatgggcatatccaccatgtattcttctctcagttatgttagataaggcttttactctgtcatttactgatctggtctgtttttagttccattagcttgttcacaagcttatgttagagaaggcattatggcttttctcaagattataacatttctgaataactgttctgcataggcatggtaccatcttcatcatgtagcctgggatgagctgggcaccatgaaagaattcaagtggttaaatcatgcatctgcaaaaatattgtactctcaaatggtgggttgctgcgtcacgggagtttgggtgaaggcctgaaagatgtgattcaaaacgtcgatgcaagtctgggatgtccgtctcattatggatcaaaattcatgacgttctaaaggtgtcggatgagtacctatatactccctccatcccagaaaacaaggcgcctcattacactattggaagttggacgacatggatgactctggcaagatgcggtaggagcacgacgacatggatgactccgaccacgagtccgacaggaagcctagcaacagtacgcattagcaaggttgaccagaggggcagtggagagtaacccaacaccccctcctctgaccgtcatagcgcttctttcctctggcttcatttcttacctatgtatggatggtcttcaccgctggttacatctagcaagtcctcccaggggtgagctcaattttctcctgatttgctctctcctttgtttttttattgattcatctatgcacatttatagtgtgtttggtttgaggaaggaagtgatccatcttcttctcactcctcacttttttatttggtttgtggaatagaatgggttgatccatcaccaccccattcctcatgtatataatacatgaggagtgggttgattccaccaaaattgatggaatgaacttatgatgcatcacttcattaagcatagag

SEQ ID NO: 128119 - DNA, 863 bp, Zea Mays
gattcacaccaactgcacctttggatctcttctgggtcgtttcatttcaaaaaatcctggccatctccccctctatctctggtaaacatagaggactagatagatcaggataaacaaggcgtgttaattgttgacaaatataataaaagtaaaatcacagtaatgacgagtgaacaaacatgcctttgctgcttcgtctgtttgaaactagagatatcaacctttaagtgcagctttaggtttttttgggatgattctttgtttatcatcgcaggatataatgcacatgggttagttcatctctttttcttttgcacccaggtatgccattttggggatttctccactatgtatgtttaaatgagcacattaattagaagccttttattatcatgttgttatgttatatgttgtttactgcttgcttggtgtaatctctagacccgtggatccagttgcttttgcaagggaaagagatatgccttctgattcagataggaccttaaatgaagacaagtgtttcatatcttgtagtatgccacaggagcatcaaaagatctttgaattgggctgaagaaaacatagaacatagtgtaaaatcttatagtgtaatcttatagtgtaaaatttagagtctattgtcacccatacatataagtgccttgtgaatgtttatggaaccagggaagaagacattgttctgtatggcgagtctgttggtagcgaaccaacccttgatctagctgttcgtttcaatcgtgaagagatgtggtattaatcatagataaggggtgtttagttccagagactaatgtttagtacgtgtcacatagaatatttgaatctcattttactatgggttt

SEQ ID NO: 128120 - DNA, 1527 bp, Zea Mays
atgtcgtcacacacgtcggaagaagaatccctcagcagcttccagcagcagcaggccaagctagaagcctgccatgctgctgggtcgagcaaggctgacgcagcggcagcagccatgcctgtggtgaaaaagagacgcggccacccaggaactctagatcctgatgtggaagtagtggctttgtcacccaagacactcctggcaacaaacaggtacatatgcgaggtctgtcacaagggcttccagagggaccagaacctgcagctccacaggagaggccacaacctaccatggaagctgaagcagaggagcagcaccgaagccaagaagaaggtgtatgtctgccctgaggccacctgccctcatcacgacgcgagccgagccctgggcgacctcacgggcataaagaagcactactccaggaaacacggggagaagaagtggaagtgcgacaggtgctccaagaagtatgctgtccagtcggactggaaggctcacacgaagatatgtggcaccaaggagtaccgatgcgactgtggaacaatattctcaagaaaggacagcttcatcacgcaccgagccttctgcgatgcactggctgaagacacctccagggtgaaccacagcctagcgacaatggtgggaagtctgcatgggcaccagcaggacatcttctcacacggagtacctaccttcccgacttcaccgcccgacgtgatggcaaacctgtccagcatcaacgaccacaactcagacagccacctcaggtctctgtccccctacgctctcatcacaagaaacacggcactgttctccaaccagatatcgcccaaggatccaggcggctttcctctcgacggcagcgcgtcgagctacccttacatgtccatgacttccccctacatgtcggccactgcgctgctacagaaagctgcagagatgggcgcaaagaccagccaggatccgatatcgccgttgctcctgaaaagcttcccaagcaacgtgacgactcccagccctagagaccaccacatggacatctcttcaggaagccagggggactccctcgggaactcagcggccaacagtgtcgtcgttggcatcaaggcagccgaggacgagggctcctacctgagcggtcgcggtagcattctgatgagctcgccatgggtgaacacttacaggcctgccacggtgcccttgatcggactgatgaaccatccgtttggcatgagcagggcagaaaaggagagctccgccggcatgtttcctggaggccagacgcaacacagcaggcaggaaaacatttcggggccggtgggagatgctgggctgacccaggacttcctagggctaggaggcagtgggaatttggagatgggttctgctgacacctacaatgcggacgtgagcgtgaccgcactgagctattctgacgagcagcagaagccgcaggaccatatctacccttaccatcagtcgtctcttgactccactgcgctggagaaacccatttgggaatcctga

SEQ ID NO: 128121 - DNA, 1869 bp, Zea Mays
acttttccttgttccatttcctttcagcgtgcgcgctctatctccctagctccctcccctcccgagatctcctctcttcttccctccctccctcccttctctcttggcgacgtttacgctcaccagcgccaggtacgcgggtctttttcggccgaggtcgctgccgccccacgccaggtggtcaggtcttctccggtcccttcgccggcgacgtgcaccaccaggctgagctccacagtggttcttgcagaggtttcaggtttgtaacagactgctggggtgaatacacctactcaaaaaaaaaaaaagagagaaaatgggaaagagacaaagttctcgatgaattgaagtccatatgtcaaaaacaagagcaaggagctgttgtacaaggggcttgtggaaggagcatatcatatatttgtaggagataactttgcacttgactcatgggcgattggattataggggcgttgataaacatcgtgggaagtgttgccataaactttggtactaaccttctgaagttgggccatgatcagagagaaaagctttcctcaattaacaacagtgagggaaatgaaaaattcgttccaaaatctgttatgcatttccagacttggagaataggtatactcttttttgctgctgggaactgcctcaatttcatgtcatttgcgtatgctgcacagtcactgcttgcagctcttggatcaattcagtttgtttccaacattgcttttgcctactttgtgttgaacaagactatttcagtgaaagtcatggtagccacaacgtttattgtctttggcaacatcttcttagtatccttcggcaaccatcaatcgcctgtttacacgccggagcagctgatcgcaaaatacagcaatttggtgtttgttctttattgcatgtcattggtctttgttgttgcgtttaaccattatctctacaggagtggagaaactattatttcaaatagttcaaaagatgctggcacatattggcgaacaatgttgccattttcatatgctgttgtatctggtgctattggatcttgctcagtcttgtttgcaaaatcattgtctaacatgctgagactgacgatgagcagcagatacgagttccatagctggttcacatattcgatcgttctcctgtttctgtgtactgctggattttggatggcaagactgaatgaggggctgtcattatttgatgcaatactgattgttccaatgtttcaaattgcttggaccttcttctctatttgtacaggatttgtttactttcaagaatatcaagtatttgatacgctcaggataattatgtttgtgttaggcatgacatttgtctttgttgggatttccttgctagcacccgatgacagtaaagatggttcaagcaccgccgatgactccataattgacatagacagaaatggaaagatgccgatggaggagacagacacagatgatagcatctcctttgttacttctgtaaaagtaaatgcaaaacgtgtactttcaaaggcaaagtctgcatgctccatgtcccttggccttggggagagcaccataagcgcttcatcggtgcttgccatgccgatggtctcgtcaagaacaaccggcttcagaggaatcggaaatgaccgtccaaagtatgtccctttaagaaccacagattggagtaacctatagccggtggtaatatataggtacacaggaaatgtctttgtttttgatgttgcctagcggatggcagtgaagttttttttgttgcttccagaggcaactgtttgttgtgatcgtagctagctataacacgagtgtatagttcaccgttgtaccctacaaaacactgtccatacct

SEQ ID NO: 128122 - DNA, 1995 bp, Zea Mays
gttccatttcctttcagcgtgcgcgctctatctccctagctccctcccctcccgagatctcctctcttcttccctccctccctcccttctctcttggcgacgtttacgctcaccagcgccaggtacgcgggtctttttcggccgaggtcgctgccgccccacgccaggtggtcaggtcttctccggtcccttcgccggcgacgtgcaccaccaggctgagctccacagtggttcttgcagaggtttcaggtttgtaacagactgctggggtgaatacacctactcaaaaaaaaaaaaagagagaaaatgggaaagagacaaagttctcgatgaattgaagtccatatgtcaaaaacaagagcaaggagctgttgtacaaggggcttgtggaaggagcatatcatatatttgtaggagataactttgcacttgactcatgggcgattggattataggggcgttgataaacatcgtgggaagtgttgccataaactttggtactaaccttctgaagttgggccatgatcagagagaaaagctttcctcaattaacaacagtgagggaaatgaaaaattcgttccaaaatctgttatgcatttccagacttggagaataggtatactcttttttgctgctgggaactgcctcaatttcatgtcatttgcgtatgctgcacagtcactgcttgcagctcttggatcaattcagtttgtttccaacattgcttttgcctactttgtgttgaacaagactatttcagtgaaagtcatggtagccacaacgtttattgtctttggcaacatcttcttagtatccttcggcaaccatcaatcgcctgtttacacgccggagcagctgatcgcaaaatacagcaatttggtgtttgttctttattgcatgtcattggtctttgttgttgcgtttaaccattatctctacaggagtggagaaactattatttcaaatagttcaaaagatgctggcacatattggcgaacaatgttgccattttcatatgctgttgtatctggtgctattggatcttgctcagtcttgtttgcaaaatcattgtctaacatgctgagactgacgatgagcagcagatacgagttccatagctggttcacatattcgatcgttctcctgtttctgtgtactgctggattttggatggcaagactgaatgaggggctgtcattatttgatgcaatactgattgttccaatgtttcaaattgcttggaccttcttctctatttgtacaggatttgtttactttcaagaatatcaagtatttgatacgctcaggataattatgtttgtgttaggcatgacatttgtctttgttgggatttccttgctagcacccgatgacagtaaagctgatacgaaagatggttcaagcaccgccgatgactccataattgacatagacagaaatggaaagatgccgatggaggagacagacacagatgatagcatctcctttgttacttctgtaaaagtaaatgcaaaacgtgtactttcaaaggcaaagtctgcatgctccatgtcccttggccttggggagagcaccataagcgcttcatcggtgcttgccatgccgatggtctcgtcaagaacaaccggcttcagaggaatcggaaatgaccgtccaaagtatgtccctttaagaaccacagattggagtaacctatagccggtggtaatatataggtacacaggaaatgtctttgtttttgatgttgcctagcggatggcagtgaagttttttttgttgcttccagaggcaactgtttgttgtgatcgtagctagctataacacgagtgtatagttcaccgttgtaccctacaaaacactgtccatacctagctgcatatacacgtgtaagttttagaatacaactcaaatgattcgattcgcctctgaattgcgcaaccatttcagtggttgcatgttgtaaccatcttatatagaattgcaatttcttttgc

SEQ ID NO: 128123 - DNA, 1396 bp, Zea Mays
ctaaccgaacaagcccttactgtttcgccttcctcgtctcctcattctcatcacgcatcagtgagccgttcctagctctcagcgcgtcctcgtcctagtctaggcctcggatccttattaacctcgatctcgtgcagtcgtgcagccagtcagtcatcaggctgcaatggagcgtccgtgcccgcggccggagccggcggcgatcgacatcacctgggtgtcgtgccgcggcgtcaggtcgtcgctcccgttccacacgccgtgcctctacgcgtccgtctccgtcaccccgtcgtcgtccgccaagaacgcgcacggccaccgccggccccaccgcgtgaagacgcccaccgaccgtgccggcggcgagaaccccgagtgggacgcaccgctgcggctctacctccccgagcccgaggcctcgccaacggcggcggagctggaaccggaagcgggcaagaacaagaacagaggcgacggcgtccttctggtgcggttcgagctcaaggcagaggtggccgtgctcggcgacgtgctcgccgcgtccgccgccgtgccggtgcccgacctcgtcgccgacgggcggacgcgccgcgtgtcctaccagctggcgggccccgacggcaggcagcccaatggcgtcatctccttctcctacgccttccaccaacggaacgccgacgccgacgaccaccaccaccaccagagcggcggcgatgccaagcttctcgtcgcgcccccctggcccacctccactgtgtccagtcccgtcgcgcagccaccgcccacgaccgcggcgccgcggctgtacccggcgatagagtggccgatgacggaggaaataccaatttaccatacaccgctactaccagtaccagctggggctgcggcggtcacgctcgctagctcgcggtactaccctcctcaaccgtcgtcggcggctccagtgcagatggagccggttgcggtgtacccgccgccgttgccagagacgtcgtcctgcaacgtgtacccatcggtattgccggccagcgcgatgtaccccccggtagaccttgctccagtgagctgctatccgccggcatcaacatggaacgatcggtgtttgtacggctgaagtcatcgttcgtggttttggttttgtttatgatagattgatagtttaattgatttaccgttccttcatggctcgtgctgtccgcccaaccgcctcggcgttttagcggagccggcgcgcggcgtgtataatttactgttcttaagcctggaggtttccatctatctttccatgttagacagtaggcgtgctcgttttataaatttgctccattttgttggtgcgaacataaggttgatttatctttgaggtttgaattaataataagtgattgtcaac

SEQ ID NO: 128124 - DNA, 1051 bp, Zea Mays
atagattcctcgagtcatcacaccacacgcatcacatgtagatgtagctagcttagctatgctcgcgtaaaaaccctagcggcagtcacacagcaagttgcatgtgtctcgggggcaacaagcaggcggccgaggcagcaggccgcatggagaaccaccggcgccattcgggctctccggcgagcagcaggcggcggcggctgcactacctcctcgccctggctgccgactacctcaggtacctcttcatgaagcggcgccggctcctgcacaaggtggcgcggagaacgctcgcgctcgtccaccgccacggcctgccgcagcgcggcggcaggaaccacgaccagtggcagtggcctcatcgcgcgctggcggagcacgagttctcgtgcgccgacagccccagccccgcgttcctcgcggccaagaggctgctgctgcggtcacgtcggaaaggcagtggcgccgcagccgcagcggccggggctgtgtcttcctgcttcggctcgtttcgacatccgttcgattcgcccgacggcgacgagacgatgacgttggcatctgagacagaggttgccgaagatgaggatgatcagacggaggaggaggaggaggaagaagatgatcaggtactagctgccgaggacggtggctggctacagcgcggtgagggtgagcttcttgacgtggacgacagggccgaggagttcatcaacatgttctacgagcagctcagggcgcagaactttgccgcggttttccgttactccccatgattatatttatggtgtccgccgtgtgtagcgccgtatagagtgatcttgatcttgcgagacgacgatcgttgtgatgtggtttggaggagccttcgcttctcgaggatgcctttgtgtctgtgtcggggaaaccgatcgagagtgtaatgtgtccgtacgcacgtactcctatatgttggtctacactatctgctacatgagtaaatgtgaccaatcatcgatccggtggagaataataaatgggccgcatatatattcccctgcaataaaaaaaa

SEQ ID NO: 128125 - DNA, 426 bp, Zea Mays
atgaaactgcagcgacacctatccatggggaagctgtcgagcgccatgtgggacctccgccttgccggctcggttatcgtggaaaagtgcagggagctctggaaagccacgcatcgacccgcggacgacgactacttcaggggcagctacgagttctcgtgtaccgccacacctgtcaatgttctggccgtgaatgggcgtcgacgtcgccaacggcgcctgccgccgtgcgtcggcgccaagcaagcgacggggaccatcgtcacgcggagggacggagggtggtcgccgggccgctcacctcatcaggccatggcggtgctagacattgacggtctggccgaggagttcatccagaggttccgccagcagctgaggatgcaggtagtagaggttgagcaggatggaaggccaagtctcgcttag

SEQ ID NO: 128126 - DNA, 1437 bp, Zea Mays
ctcgagatccccaaatctctttcttaagtaggtaccgctgcgccgcaaacccaccgcttccaccatcgccacccgtcagtccgtcacccctcgcgcccatagtccccttccccataccatgtccgacctccacccgccggagcaccaagtcgccggccaccgcgcctccgccagcaagctgggcccgctcatcgacggctccggcctcttctacaagccgctccaggccggcgaccgtggggagcacgaggtcgccttctatgaggcgttctccgcccacgccgccgtcccggcccgcatccgagacaccttcttcccccggttccacggcacgcgactcctccccaccgaggcgcagcccggggagccgcatcctcacctcgtcctcgacgacctcctcgcggggtttcaggcgccctgcgtcgcagacatcaagatcggcgccatcacgtggccaccgagttcgccggagccctacatcgccaagtgcctcgccaaggaccgcgggaccacgagcgttctgctcggattccgcgtctccggcgtccgagtcgtcggccccgagggcgccgtgtggcggacggagcgcccggaggtgaaggccatggacaccgccggcgtccgccgcgtgctccggcgctacgtgtcatccgttgccgacgaggggatggactgtgcgctcgccgcggcggtgtacggaggaaaaggtggagtcttgtcacagctgcgcgagctcaaggcgtggttcgaggagcagactctgttccacttctactcggcgtcgattcttctgggctatgatgctgctgcagtcgcagcaggcggagatgggggtggggtgacggtgaagctggtggactttgcccatgtggccgagggtgatggggtgattgaccacaacttcctgggcgggctctgctcgctgatcaagttcgtttctgacattgttccggagactcctcatacgcagcctttgggtccttcttaagagaggatcctggcatttcgatttgataacaaagccctacaagttttgtctggaaaaagaagcgcctccgagttgtgctgggtgtggagatctgagacggtcgtcggcccacttggttgccttgcctttgccttgcctgcaaacatacggcaacctgctccttttttcgcaaccccttacttccgaagaaactttttttttcccactttgggggttcgattacgttggatctggtttgtgccactcggtcagaggttgtaagcatggagggaggcgtgttgatccggcaactgtgtcagtctttgcgctgcctgccgtttctgcatggcttttgcctgctgcgatccgatgtgtactggagatcgtagtgatggacgtctctacctccaaacgaatccgtccgataaatctaacgcaggttgagagtccatttgggttatgggttgtcc

SEQ ID NO: 128127 - DNA, 98 bp, Zea Mays
cctttctatcaaacgacgaatgccagccgtcagatcatagtcatacggcttcagagttgtcttcaaccttaagtgatcctcttcccaacgcttgggtt

SEQ ID NO: 128128 - DNA, 1108 bp, Zea Mays
ttcctggtccgtcggttcatcttcaccaccggtgcatttgtgtgtctcgtgtctaacaggccggtgctggagaacacgacgataactgcgtcagtcttcctcgtcgagcacaacgctggcggcggctgcggccacctgcagcctgccgcggtgcagcgccaggctgaggttgtggctggcaacccatgcagcgagctcacctgcaagaacaattacgacgccacctggtccctgcccaagaagccctcgtggaccggcgacgcggtgggcgctggcctgatcatggaggggcagcgcgtgctgctgccatgacgcaggcgttggcgcccgcggggaatgcacagggcagcagggtgggatggggacccaatagctatggggggccggtgcggtggcacccctagcaccccctcagagccggccctaggtgcgctgcattcgcttctcagcgacaaacccgcgtctgttttaacttttaaaagtatcagactgactcccgcgtgcatgcagaacgagaggctgcgggcgggcctggaggaggcccggcgccggcacatcttggccgtggtgtcgaccatggagcgcgccgccacgtggtgcctgcgggcggcggaggccgaccttgagcgcgcgctggagcgcaatgcggagctcggcgatagggtccatcagatgggcgcagagggccagacgtggcagggcatcgccaatggccacgaggctatcgccgcgggtctgcgcagcaccatcgagcagctcctcccgacgctgtgcgcgggcgtgagagcgggagcagcggacgagggccaggatgaggtcgaggacacacggtcgtgctacttctagccagagcagggaggtgccgacgacaaggtctgtggcacgagggcgtgtggtccggcggatgtgtgcgtgctgctgctgccgtgccggcatttgtgcctttgcggtgggtgcgaggcggctatcgaggcatgccccgtgtgcgcagccaccaagaacgactcactccacgtcctcttttgctgacctcacctcgtcggcacgacaacctatagattcgtttggattggtttgctcgtgctttccacctttttctcttcttttc

SEQ ID NO: 128129 - DNA, 101 bp, Zea Mays
gtgctaacccctgttgctcaaaagaaagccaatttttgaatgagcatcaagctgcaggatcaaaagaaaagttgctcataaataaagaaaggaacaagaaa

SEQ ID NO: 128130 - DNA, 110 bp, Zea Mays
ctttcacagtttccacagtcgtcgtgccccacatttaaattgtaaaaatgttaaaattatgtacagatggagattcgaactatggttattgactctaaaccaacattcac

SEQ ID NO: 128131 - DNA, 288 bp, Zea Mays
atgccggtctgccgacgccgccaaaccagtgtctccgcccgctgtcgatcccatcgatgccgaccccgcgcgccctgtgggggggaggaggaggctgcgtcatataagctgcagctggagaagaagcgggacgactggaggaagaaagacgaggcggcaaccgtgatagagaagaagacgtcgcagtcgtgcaagaagtcgacagtcctcgtggttgagcgcccgtccaaggagaatgaggtggaagccggacccacgcagccacgctcgagcgactcgacgcggtag

SEQ ID NO: 128132 - DNA, 638 bp, Zea Mays
actggatcgtaacagaaatcaacaaattcgtcggctttatcattctaggtgctcctcgaggctatatatgtcgagcctccccattcatctcataccatcatcgggagaaatcgtacaccaggccagaaccagtagtgagaggaacggagagagggggatcggaagccgcccgcgtcttgcgcttgattcaccggagcctcagccacaaggatcggacggtgggcatcgtcttggttcacaggatgcatgtgcgtcaattgcatgcaccgtggatggctggagactacacaattgctcgtcgaacttcgagcgctgccacggttccatgccgagcagcggccagactttgcagacagcctaaagcaccgattgaaggatgaccaggcgaagccatccttgttgttgcgaaggcaggttatcaatttttcctcgtcttcgctgttgaggtgttcgatgacgagtattgtatggttgagtactgctaggcctaggtggacttgtttggcccattttgtgctttggattgggtgcttttccttttttccattttctccatgcgagggcttgagtggtgtttggtttctttgtcaaggtaatgtacatttctctagatgggaatgaagtccctttcgatgttg

SEQ ID NO: 128133 - DNA, 780 bp, Zea Mays
actggatcgtaacagaaatcaacaaattcgtcggctttatcattctaggtgctcctcgaggctatatatgtcgagcctccccattcatctcataccatcatcgggagaaatcgtacaccaggccagaaccagtagtgagaggaacggagagagggggatcggaagccgcccgcgtcttgcgcttgattcaccggagcctcagccacaaggatcggacggtgggcatcgtcttggttcacaggatgcatgtgcgtcaattgcatgcaccgtggatggctggagactacacaattgctcgtcgaacttcgagcgctgccacggttccatgccgagcagcggccagactttgcagacagcctaaagcaccgggttgatgctcaagctgtgttcgatgatgttgtgactggctcctactagattgaaggatgaccaggcgaagccatccttgttgttgcgaaggcaggttatcaatttttcctcgtcttcgctgttgaggtgttcgatgacgagtattgtatggttgagtactgctaggcctaggtggacttgtttggcccattttgtgctttggattgggtgcttttccttttttccattttctccatgcgagggcttgagtggtgtttggtttctttgtcaaggtaatgtacatttctctagatgggaatgaagtccctttcgatgttgtgagcagtctactaatttccatagactatgattacacccaagggcatgaaagtttaatgcaaaggtataggtcgtgaatggcagcttcaagtt

SEQ ID NO: 128134 - DNA, 604 bp, Zea Mays
aagcaatcatcgccgccggttttattatttagcagcagctacagcctgacccagagctgcacggatcacccatcatcaaacaggcagaagctacagcttgtcagcgtggaggccgaagaaagaggaaggccggtccacgtccatccaatgcgctagcgcctagcggatggtctctcatctcatcatcagtgcagggcatcaaaactcatcacaaccaccttgcacatgatcgcgatggagacctggtggtggccggtgtgtgggcaggcactccgccctgggcagtgcagagcaagcagtgctgtacaagtagatgtggttggccgaaccacgtcgagctagcaactccttccggggggaagcgcaaccaccagtagacgcactcacctggaggctaaaaggtcagagccggagaacatggatgatgtcgaaacgcgacatcgacaccgatggaagacagagaggtgcggtcctaatcgccatcctaatccttatcctaatctgtcaggttgaagctaggactagtaaaatcgagacggaatatttggggagagaattgacctagcactagcagcaaccagcgatagccacatcacgtcgtcat

SEQ ID NO: 128135 - DNA, 2514 bp, Zea Mays
gcgctagcagcagcagagatcgaccggccatcgccgttttataaaaagagagtccagcggtagccgtcgctgacggacgcccccctcccagacctccgcccggatctcgccgcctctcccgcccctgctcgcgagccgccgtcgacagccaccgccatgggcacggccaacggccagcagccggcagagggcgctccctctgacaagctccgccacgtcgagtccatgtcggagctgccctccggcgccggcaagatctcggggatcaacgccgtcgtgctcggggagtcgctcgccgccgaggagaacgacctcatcgtccccagccccgagttctctgccagcgccctcgtctcttctccgaaacagtatcgcgagatgtatgagaggtccattaaggacccggccgggttctggtcggagattgccgagaccttttactggaaggagaagtggaaccccgccgaggtctgctcggagaacctcgatgtcaccaagggacccgtccagatcaactggttcaagggagggaaaaccaacatatgttacaacgctgttgaccgcaacatcgagtctggcaatggcgacaaggttgcaatgtactgggagggtaatgagcccggtcaggatgggaagcttacctattccgagctcctggagaaggtttgccagcttgcaaattacttgaagagccttggtgtcggcaagggtgatgctgttattatatacctaccaatgttgctggagcttcccattgccatgcttgcctgtgcccgcattggtgccgttcactcggttgtgtttgctggcttctcagcagattcgctagctcaaaggattgtcgattgcaagcctaagcttgtcatcacgtgcaatgctgtgaagcggggagtcaagcccatctttctcaaagatatagtggatgcagctttggttgaaagtgagaagaatggagtctctgtaggtctctgtttgacgtatgaaaaccagtcagccatgaagagggaaaacacaaaatggcaagcagaaagggatgtttggtggcaggacgttgtcacaaaatttccaaccaaatgtgatgtggagtgggtggatgcagaggatccattgttccttttgtacacaagtggcagcacagggaagccaaagggtgtactgcatacttctgggggctacatggtgtacactgcaacaacatttaagtacgcatttgactacaagccaactgacatatactggtgcactgcagactgtggctggattactggacatagttatgtaacatatggtcctctcctgaatggtgctacggttctcgtttttgaagggacgccgaactaccctgattcgggccgatgctgggatattgtggacaagtacaatgtgacaatattttatactgccccaactcttgttcgttcactcatgcgtgatggcactgagtatgttacacgttactctcgaaagtctctccgagtcctgggaagtgttggtgagccaatcaatcctagtgcatggagatggttctacaatactgttggggattcccggtgccctatatcagacacctggtggcaaactgaaactggcggtttcatgatcacccctttgcctggcgcctggcctcaaaaaccaggttctgcaacctttcctttctttggtgttcagccggtcattgttgacgagaaagggcaagagattgaaggggaatgtagtggatatctttgcataaagaaatcatggcctggggctttccggactctgtatggagatcatgagagatacgagaccacgtacttcaaaccatttgctgggtactatttcactggtgatggttgcagcagagacaaagatggttaccactggctgactggaagagtagatgatgtcatcaatgtcagtggacaccgaatcggcacagcagaggttgagtcagctttagtgtcacatccacagtgtgcagaggctgctgttgttggtgttgagcatgaggtcaaaggtcaaggaatttatgcttttgtaactttggtggatggtgttccgtatagtgaggaactacgaaaaagcctcataatgacagtgcgcaaccagattggggcatttgcagctcctgacaagatccactgggcaccgggacttcctaaaacccggagtggcaagatcatgcgaaggattttgcgcaagattgctgcacggcaactggatgaacttggggacataagcaccctcgctgaacctgctgtagttgaccagcttatttcgctcagcaattgttaggttgcaacgtaattggatggtggatacatccttgagcgcatgttgcgtttgtctgtaatatgagtagaaggtgcatttcaatatcgagaactcaagtgggacgtggtgacatgttgtcgatgtttccttttaaacttttgtatcagatatcaagataggtccatcagaatgtattattgattgacacagacaaatatatcaataaaattgttaatttttcatttggtttcgtttgga

SEQ ID NO: 128136 - DNA, 2592 bp, Zea Mays
gcgctagcagcagcagagatcgaccggccatcgccgttttataaaaagagagtccagcggtagccgtcgctgacggacgcccccctcccagacctccgcccggatctcgccgcctctcccgcccctgctcgcgagccgccgtcgacagccaccgccatgggcacggccaacggccagcagccggcagagggcgctccctctgacaagctccgccacgtcgagtccatgtcggagctgccctccggcgccggcaagatctcggggatcaacgccgtcgtgctcggggagtcgctcgccgccgaggagaacgacctcatcgtccccagccccgagttctctgccagcgccctcgtctcttctccgaaacagtatcgcgagatgtatgagaggtccattaaggacccggccgggttctggtcggagattgccgagaccttttactggaaggagaagtggaaccccgccgaggtctgctcggagaacctcgatgtcaccaagggacccgtccagatcaactggttcaagggagggaaaaccaacatatgttacaacgctgttgaccgcaacatcgagtctggcaatggcgacaaggttgcaatgtactgggagggtaatgagcccggtcaggatgggaagcttacctattccgagctcctggagaaggtttgccagcttgcaaattacttgaagagccttggtgtcggcaagggtgatgctgttattatatacctaccaatgttgctggagcttcccattgccatgcttgcctgtgcccgcattggtgccgttcactcggtaattgcagtattggttgttttgtgaaccctaggttttcttttctatgttgtgatacatccatgcttgtacaggttgtgtttgctggcttctcagcagattcgctagctcaaaggattgtcgattgcaagcctaagcttgtcatcacgtgcaatgctgtgaagcggggagtcaagcccatctttctcaaagatatagtggatgcagctttggttgaaagtgagaagaatggagtctctgtaggtctctgtttgacgtatgaaaaccagtcagccatgaagagggaaaacacaaaatggcaagcagaaagggatgtttggtggcaggacgttgtcacaaaatttccaaccaaatgtgatgtggagtgggtggatgcagaggatccattgttccttttgtacacaagtggcagcacagggaagccaaagggtgtactgcatacttctgggggctacatggtgtacactgcaacaacatttaagtacgcatttgactacaagccaactgacatatactggtgcactgcagactgtggctggattactggacatagttatgtaacatatggtcctctcctgaatggtgctacggttctcgtttttgaagggacgccgaactaccctgattcgggccgatgctgggatattgtggacaagtacaatgtgacaatattttatactgccccaactcttgttcgttcactcatgcgtgatggcactgagtatgttacacgttactctcgaaagtctctccgagtcctgggaagtgttggtgagccaatcaatcctagtgcatggagatggttctacaatactgttggggattcccggtgccctatatcagacacctggtggcaaactgaaactggcggtttcatgatcacccctttgcctggcgcctggcctcaaaaaccaggttctgcaacctttcctttctttggtgttcagccggtcattgttgacgagaaagggcaagagattgaaggggaatgtagtggatatctttgcataaagaaatcatggcctggggctttccggactctgtatggagatcatgagagatacgagaccacgtacttcaaaccatttgctgggtactatttcactggtgatggttgcagcagagacaaagatggttaccactggctgactggaagagtagatgatgtcatcaatgtcagtggacaccgaatcggcacagcagaggttgagtcagctttagtgtcacatccacagtgtgcagaggctgctgttgttggtgttgagcatgaggtcaaaggtcaaggaatttatgcttttgtaactttggtggatggtgttccgtatagtgaggaactacgaaaaagcctcataatgacagtgcgcaaccagattggggcatttgcagctcctgacaagatccactgggcaccgggacttcctaaaacccggagtggcaagatcatgcgaaggattttgcgcaagattgctgcacggcaactggatgaacttggggacataagcaccctcgctgaacctgctgtagttgaccagcttatttcgctcagcaattgttaggttgcaacgtaattggatggtggatacatccttgagcgcatgttgcgtttgtctgtaatatgagtagaaggtgcatttcaatatcgagaactcaagtgggacgtggtgacatgttgtcgatgtttccttttaaacttttgtatcagatatcaagataggtccatcagaatgtattattgattgacacagacaaatatatcaataaaattgttaatttttcatttggtttcgtttggataaa

SEQ ID NO: 128137 - DNA, 1210 bp, Zea Mays
atatatgtgaatcctaactgtacactgtctgaagtggacgaacggctctggcttcggcgtgttacgtgtatagtaggccccttttgaacgaacggcgcgggccggggccaccaccagcatctgcggcagggagaatcgcgttggttcgacgcaaacgctacccggcgcccccttgcccttggggccggctattttaccgcacccgttctcccctctctaccgcagatcagatcacactcgtagagagaaggaaaaatatccccaaaccctagctcccgatctcgatggcgaaccctcgcgtcttcttcgacatgaccgtcggcggcgccccggcgggccggatcgtgatggagctgtacgccaacgaggtgcccaagaccgcggagaacttccgcgcgctgtgcacgggcgagaagggcgtgggcaagtccgggaagccgctccactacaagggctccaccttccaccgcgtcatccccgagttcatgtgccagggcggcgacttcacccgcggcaacggcaccggcggcgagtccatctacggcgagaagttccccgacgagaagttcgtgcgcaagcacaccgcccccggtgtgctctccatggccaacgccgggcccaacaccaacggctcccagttcttcatctgcaccgtcgcgaccccttggctcgacggcaagcacgtcgtcttcggccaggtcgtcgagggcatggacgtcgtcaaggccatcgagaaggtgggcacccgcaacggctccacctccaaggtggtcaaggtcgctgactgcggacagctctcctagatctctctgatctggtctgttcggccgccctccctccgtcatcgtcgactccccctgcgtccgttcctttggatctgaataagatggtggtgatctgagtggtggtcttagtttatcatgtatcgctcgcagtttaatttagcggtttaggtgtggatctgtgaaccccatggcgcctctgcttgattcgtgtttcacctgttatgttctgagattcatgataatgctatgagaactgaaattcccgtttcatgcttcttaaatctttgacctctgcggttgtgccatacgtttttattttccattccgagatctaggccacaaaatgattctggttgttagtgttttaatgtgaactgccaagcatggatcacccaacctttgcgtggcacagttctttgtttggt

SEQ ID NO: 128138 - DNA, 3126 bp, Zea Mays
tttctttttttgtgtgtcgttgctggtgcggtagctatggaggtgtgctgctgctccacctcgtcgtccgtcctcaccgccgggggccgcggcgccgcggcgcggaggctggccgcgccggcggctcgctggggcgcagcggggttcgggagggcggtggtgctggcgcacccgctcccacgcccggcatccgcggccgcggcggcgcccacgcgccgggcgcgcagggggggcgtcggcgtcgtcagggcggtgttcgagcggttcacggagcgggccgtcaaggcggtcgtgctgtcgcagcgggaggcccgggggctcggggagcccgccgtggcgccgcgccacctcctcctcggcctggtcgccgaggaccgatcctcgggcggcttcctctcgtcggggatcaacatcgagcgcgcgcgcgaggagtgccgcggcatcgctgccagtgccagggacgcggactcggccaccgcggcgtctaggcccgggtcgtcggggctcgacacggacgtgcccttcgccgcgcccaccaagcaggtcttcgacgtggccgtcgtgctctccaagaacatgggctccagcttcgtctcgcccgagcacctcgccatcgcactcttctccctcgacgatccaaccaccaacaacctcctaaggagtttgggagcggatcccagtcatctagcatcggttgcagtcgaccgtctccaagcagagcttgcgaaagatggcagagatcctgctgaaccatcatctttcaaagttccaaagaaagcccctgctgcagccggaagatctgccttctcccagtccttgactaaaaagaaagataagggtgcgctggatcaattttgtttggatttgaccacacaagctagtggaggtttcattgatcctattattggccgtgaagaagagattgaaagagtagttcagatagtatgccggcggacgaagaacaaccctattcttttgggtgaggcgggtgttggcaaaactgcaattgccgagggtctggctcttcgaattgcaaatggagatgtccccatttaccttgtggcaaagcgcatattgtcgctagatgttggtctccttattgctggtgcaaaggagaggggtgaactggagtctagggttactaatataatccgcgaggtccgggaagcaggcgatgttattctttttattgatgaggtccacaaccttattggatctggaactgttggaaagagtaagggttctggtcttgacattggcaacttgctgaagcccgcgcttgctagaggtgaattgcagtgcattgctgctacaactctagatgaacaccggatgcattttgagaaggataaggctttggcccgccgcttccagccagtactagtagatgagcctagtcaggaagatgctgtgaagatattactgggtcttcgtgaaaaatatgaaacttaccataaatgcaaattcacattggaagccatcaatgcagcagtttatttgtcagcaagatacattcctgacagacagcttcctgataaggctattgatctgattgatgaggctggaagtagagctcggatggaatcatttaataggaagaaggaagggcagtcttcgattctcttgaagtcaccagatgaatactggcaagagataagagctgctcaggccatgcatgaagtggtgttatctaacaaggaaaaatattctccaaatgagaatgctgaagagagtggtagtgctaacgttgaagcactacacagagacaatattgagtcaacatctacttcatcactctcagctgatgaaccagttgtagttgggacagaggaaattgcaagggttgcctcattatggtctgggataccagtacagcagttgactgccgacgataaaaaacttctagtaggactggacgacgaactcagaaaacgtgtcattggccaagatgatgctgttgtggccatatctcgtgcagtgaagagatcacgtgttggccttaacgatcctgatagacctattgctacgctgcttttctgtggtccaacaggagttggtaaaacagagctcaccaaagctctagcagctagttattttggatcggaatctgctatgcttaggttagacatgagcgagtatatggagaggcacactgtgagcaagctcataggctctcctccagggtacattgggtatggtgaaactggtactttgacagaagcagtcaggagaaaaccatttactgtggtattgttggatgagatagagaaagctcaccctgatattttcaacatccttctccaaatatttgaggatggacatttgacagactcacagggtcgcagggtttccttcaaaaatacgttgattgtcatgacttcgaatgttggttcaacatcaatttcaaaaggaagacagagcataggtttcttgaaggaagataccgagtcaggctcatacttcgcaatgaaatccttagtgatggaagagctcaaggcatttttccgtccagagttgctcaatagaatcgacgagatggttgtgttccgtcctctggagaagactcagatgctggccattcttgatatcatcctaaaggaagtcaagggccgacttttggccctcgggataggtttggaggtgtctgatgcaatgaaggacctgatatgccaagagggctacgacaaaagctatggcgctcggcctctgaggagagctgtcacccacattatcgaggatgtcatcagcgaagcgattctttttggcgagttcaagcccggtgacacgatactgatggacatcgatgcagaggggaagccatgcatgggccatctggaccaacagatcgtccaggtctctgacccaacacgggcaatctgaagctgtgttggaccttttccagtgtagtagattagggatctaaatcttttattctttcaagatagagattattaattctttgttacgtagatatatagagtagtatttcattatgtatatatatcaaccagatgatccagataggggaatctggtcagtcattggagttatttgaaattttcatccagctgtatgtatattgttgaattgtttctgattcaactggccatatatatcatcattaaa

SEQ ID NO: 128139 - DNA, 1850 bp, Zea Mays
attaggcccaactaaacgagcacctgggcagcgcgtctcgccggcgctttcccatggcgtggcgatggctgcgctcagcgacgaggaggggctggtggaacgcggcgccgtcagggacgccgttgtttgcggcggagcagcgcgcgacgttggtgaacgtgaaggtgaagtgggtcaaggaccgggccctcgacgctgcagtgtcgcgggagcggcacctccgcaccgcccaccacctgctcgacctcgtgttctcccggcccggccaccgcgtctcgcggtcggacctcctcgctgaaaagtccgctcgaaggatatgtggttccgcacactctttgctcgagttcctcaggagataccataccatgttcacgttgtcccgcggcggcgtgtcgccgacagacatggcgttcgtcctgcggcagcgggaggtagattgtctcttcgccaccgagggcgacctcgtcgcccgcctccgccgtctcctcatgctcactctcccccgttcgctcccgctccacaccgtcgaccttctccgctgggaccttggcctgcccagcgattaccaggactccatcctcccccgctaccctgaccacttcgcccttgagcagccggagggcgacgagcgcgtctggctccgcctcctctcctgggacgatcttctcgccgtctccgagcttgagaagagcgctgacggaggcgataccacctgcatccccttcccggtgagcttcactaggggttatggtctgagaagcaagtgcatgtcctggctacgggagtggcaggcgctgccatacaccagcccatacgctgacgcttcaggcctcgaccgccgcacagacgtgtcggagaagcggaatgtgggagtgttccatgagctgctgcacctcactgtggcgaagagaacggagcgccagaatgtgagcaatatgaggaagctgcttggcatgccgcagaagttcaccaaggtgttcgaacgccaccctggcattttttacctgtccagggtttgtggcactcagatggttgttcttagagaagcttacggcggtggaagccagctgcttgagaagcatgcacatccgcttgttgctatcagggaagagtactccactttgttgagggcagcattgccaccaaggacgaggggtagagaaagacatggttcttttagcaggcagcatgagggatgtgtggtgggaggagatgaatttgaactctccaagtgaatgcactttaatttatgtctatctggtgtgcactggatatatcatggatgctctggatccaagaggacaatctctaaacgtgttgaacaggtgctctgcgaatgattcatttgtggccgagcttatgttgtaaacttgtaatgcatgttgttatggaccaagaaaaacagacctggggttcattggattttacattacttcattcaattgacggcatcttatggaagttttcataatggtaacctggcatctgtatgcagagaattggtattatcttccagagttagaaatcagatttggggcttggaaaaaggatttcactgacgcattctgtatgcagctccactgaatcaaataagaagcaaggcttgttgctggcttgtctattttcgctctcctatcattttcaatgagctctcagcttttgctcttagttttcatccttttttcctttgaggaaaattttgcccttccttattgtacttgcctcgaaatttgacaaccagacacttgaattgcttttttaccgtgagaagtcatgtaacatgaatcagaagacatttccttccagaggggtgtcctcactgtgatcaagctaaggaatccataaaccat

SEQ ID NO: 128140 - DNA, 79 bp, Zea Mays
cagaagtgtgtgcgttctttaggttgtggccgtattctttttcttggtgcaaaggtgatttatacaagtttctttttgg

SEQ ID NO: 128141 - DNA, 801 bp, Zea Mays
atgtgcgtgttgagcgtggagacttgggcgagcaggcggtccagcttctcttcaatggaatcctcaggaacgttccccatggagccggacagaggtgtcgatgctccactggtctttgataccaaattgatgcggccacctctggagggcctctttggcgaccgtagaggtgagaggaggaggaggctagaaccaggaacagatctgagagggatgataaatcatcaaagaattgagataatacgggcagttactggtgaaaggtacagccatgccacagcttttaacctacgcaaatgttgccctggaagcaaaaataactaccgtggacaggaggggaccattccttggtcaattcactcgcgaataaatatggtcgctgctgcatgtgagactgcatcggtgctcactcactgtctcgggagtaaactaatggtaataggaccagtcaaggtgaagattaagatgatggccgcttctggcatccatgttctccttcctgtgagtgatgatgcctcgagtagtgttgacctgcttggtttactgatctgtgatgtactgctgtccactgtcctatgttggatgacacaggtgagctgcgagcaagagcttgatctggtcgtctctcgtctcggcctcctcgtcacggggcacgaggaccaaggcattccctgtccctccactcgaggtgcatgctatcgtacggggctccggcctgtggtgttgaaggcgtacaacaacgggtacacgtaccgcgacggaagatactcgcatatatgtgtgacaaacggaaccagctag

SEQ ID NO: 128142 - DNA, 1162 bp, Zea Mays
tggtcctgcgcgccggcgccccttgacgcccacgccgccgacgccacggacaccgacttccttctcgaggcggcggcgcccatgttggtggcgtacggcgtggatgcggcggcggcggcggcggcctgctgcgcgtaggcggaggacgacgagatggagaggaaggaccagaagctcttcttgcgcgggctctcggccgccagcgacgaagccgacgacgagtaggggaactgctccagctcgggcctcggcgccaccgacttgctccgcttcagcccgcctccccccgcggaggcggcggcggaggaggaggacgacgaggagagcgtcttcttccggtggaacgacatgaacttgcgcgaggcgccggacgggtggagcggcggcggcggcggtggcggctcagcggcgcggcggaaggacggcggcgacgacggggaccccgacggcggcgggtggccgccgagcgggaagaaagggctggacttggaggaggacaccaggcggccgagcttctcctgcaggcagaaggcgcatatcccgccgccggcgaccgccgccgcggcgccggcgttggcaggccggtacgggtgctcgctgcagtactggattccgtccagcggcggcggcggcggcggcgcggtgccgtcgtcttggtcccccgcgcccgccgcggccacggccgtcgcgtccggagcctgcttctcccccatggatgctcctctccggccgggaacacgctctctgctgcctgtttcttggccggcggaacacacggccgcgcgcgaaccgggaacgggaaggaggatactagcctagctttcagctacaccgcggccatgcggagcatggagaagctaggtagatgatccccggtggaggtttctggcggtgctggacgcaagagatttggcccggacaggaaggccgggtgacggagggagagcagcggttgtaccagacgcgcactgcatctgcagcctgcagggcagaggagggagagagagagactgaggtcgagaggagatggtcgtggtgtgggatgaggatggcgggtcttcggctatgtaccttcccttgtgtttgtccgtgtatgtgccgcgcgggtagcgggaggagcggacggagctgcgagccttttttttttccagagcgggcgagg

SEQ ID NO: 128143 - DNA, 384 bp, Zea Mays
catcagtggaaatttgtggacattgagaagctgaaacttttcttactactatgttgttgtcctagaactttcggagaaatatcagaagaaatttggtaaacttcgatattttgtggctggaatgctgaaatttttatgtttgcctagctacttttatgaactggaatatctgccttcgtcaaaggagatggccgtgaatggaaaaggtacagatcaagacaaggcccacctgtccaatgtctataccgatgtgatgcacagcatatcaaagaaagaaggaattccaagagcctccagtttatccagtattgattatattatgactccaagacggatgtcgcttggggatgttgatacatcaagtagtacagtggcaagcacaga

SEQ ID NO: 128144 - DNA, 236 bp, Zea Mays
aatgcaggtatattgcatggatattcttggcagcactataccatctgcccagttttcagtcaatgggcttggatttgcggatgaatctttccatcttcctcaccatttatatttcttctataattttcttgatggtcttccataccatatttcttggcctttggtatttgggttttgtttctcgtatggcagagaaaaaaccagagatgcttactataatacaaaactgtgcagta

SEQ ID NO: 128145 - DNA, 408 bp, Zea Mays
ggattttccacttacaacggggccagaagctccaatgtctaggaacaattcagaagaggcagaaatcagaaagtgtatcgagtccttcggaagggcaatagattattggttaggttgcttcttgcttgtgaaattgatcgaaaagcaaagaaggacattgacttgagacaatagggaggcgaggcagagcggcctcgagaacgcctgctttagagcttagtggacgttcttctcgtgccacaacttcttcctcagcttgtccacgtcttgttgcagcgcagttttcctgtcccttcgaaaatggcttctgttcttcatgccttgaagcgtcgcatttgcagaggacgccttcatggacactggcgctatcttcgagctaggtggcctcctttgctcctccatggccat

SEQ ID NO: 128146 - DNA, 1871 bp, Zea Mays
atggaagcaatagtactggtgcagttagtggctgcggcggcgcttatatcttctttgatcggcggcgccgccggcgaggccgtggcgcaggagctgcggcaaggcctctccgtcgcccacgaccagtcctactcgcagttccagccggtgctcgctgaccccaccggcgtcttcgcgctcggcttcctccgcgtcaactccaccatgctggacctcgccgtcgtccacctcccgtctgccttcccgctctggcgcgcgatccccgaccgccccgctccatggtctacagccgcctccctctccttcgacggcggcctcttcctcaccgaccgcgcggccgacaaggtgctctggtccaccgctgccacctctgcctcggccggcgaccgcgccgtcctcctcaacacgtccaacctccaaatccagagcactggtggcagcagttcgcccgacgtggtgtggcagagcttcgactacccatcggagaccatcgtccagagccagaacttcacctccgcggcgacactccacagcttcgaccggcgcttcgccatgcggctggggagcaactacttcggcctgtacatcgagcccccgccgtcttcgggcggcgtcgctgcggccatgtacttcaagcacacggcgatggaggccaaggcccagatcgtggccggcggcggcccgacctacgcgcgcgtggagcctgacggcttcctcgccatgtaccagagggaggggccgcccgccgacgtgctctccttcgacaccttcaaccgcggcgtccgcgccctccgccgcatgactctggagcccaacggcaacctccgtgcctactactggaacggcgcccggtgggcccttgactacactgccatcaacgacaacgaccgatgcgagctgcccaccacctgcggcgcctacagcgtctgcgcggagcccagcggcagctgcgagtgcctggccaacgcgaccgatggctcgggctgcgccgcggccgtgcccgcctccgtcgcgagcagcctttgcggcaccacgggcggggaagtcggcgggctgtactgggcggtgcggcggcagggcgtggagccggtgaacaaggagctgctgcggtccgagcaggcggcgtccgcgacggactgcgaggcgcggtgcgagcgcaactgcagctgctggggcgcggtgtacagcaacgggaccggggtctgctacgtcatggactacccggcacagcttctggtggctggtgacgacaggaagatgggctacttcaagatcaggagcctggaggaggaagggacgcgagggcacggcggtgggcgcgcgagcggggtcaaggcggccctccttgttgtcggtgtcgcggtggtggtcgctgctgctgcattcggggcgtacagggtgtgggacaggagacggcggagcgccgtggacgcgaggcggcagattggtgccgctgatgatgggctctcgccggggccgtacaagaaccttgggtccttcagctccgtcgagctcaccaactccttccgaaggtaaccaagagcttgggtttggattcaaggaaaggaccaccaaagcttatcttctaaaatggagctcaattttgtacaatcacttgtctgatctaacgtacaagcagactatactatttaatattagatccaacgatagtttttgtatttttatcctcccatatcatcctccatctccttctgttttcttctccattcggcatttattttctccatacgagggtcatgagaaggtacaatcgagaaaaaaaacgtctgtggcaaaaggatactaatatatatctccccatgcaagagtatctattttatatgtatctttataaatatagaaataaaaaa

SEQ ID NO: 128147 - DNA, 1343 bp, Zea Mays
ccaaataaaggcacatctcttgcctcctctttcgcgctgtccggagaggaggggcaggaggaggccgcaccaaatctatctggggatcggagcgcgggcgacaagatgccacgcggcggcaagcccgcggcttcgtcgaagccgaacccgttcgactcggactcggactcggagtccagcaataagccggcgaacaagtccggggcgtcgtcgtaccaggcccccgccgacgccaagaagcggtacaaggacgggttccgggactcgggcgggctggagaaccagtcggtgcaggagctggagcactacgcggcgtacaaggccgaggagacgacggacgcgctcgccggctgcctgcgcatcgccgaggacatcaggcaggacgccagcgacacgctgatcacgctgcacaagcagggggagcagatcagccggacgcacgagaaggccgtcgagatcgaccaggacctcgccaagagcgagaccctcctcgggagcctcggaggcttcttctccaagacgtggaagcccaagaagacgaggcagatcaagggaccagcgcaggtgtcacgagatgactccttcaagaagaaggccagccgcatggagcagagggacaagctgggcctgagcccgcgagggaagcgcgaccctcgccactacgctgaggccaccgacgccatggacaaagtccagatcgagaagaagaagcaggacgacgccctcgacgacctcagcggcgtgctgggccagctcaagggcatggccgtcgacatgggctccgagcttgacaggcaaaacgaagcgctggatcatctgcaaggcgacgtggaggagctcaactccagggtgaagggagcaaaccagcgtgcgcgcaagctcgtcgccaaataggccgcctagctcgaacgtgggagcttgcgcattcctgggtctggtttgcgccacgattcaccctcgccggctgattgcttgctgtaacatgcatgtattcgctctccattgcattgcattgggagcgttttttctgttcaacagagaatgttctttctccttgcattgttcaccaaagttatactatattgggtataatgtctaagggaagctgccactgccagtatcgtatcctgatgagcataacaagaaacgaccgttccaacaacacaggcgctgagctcgcctcgacctcatggccacaccctccatggctgatgacgtgacctgatcccagggctctgtcgggtcgggttggagtgcgtgggactgtgtccaccaccccaccagtcagagaggggcacgataggataacttggtggtttgcatgttaaactcacatgaaggat

SEQ ID NO: 128148 - DNA, 367 bp, Zea Mays
aacctagaacaaaaaatgaaatggcatagagtacaaaagcgagactatttccatcagatttgagcttctatcatgttcaaccacgataataaacaaagcttgcaatctctagctgtcacataacaataaagattggtgaacgaaaaagaaaaagagagagagcaagagagtggaaactagaacaaccatgtcccccatatcacaaaatgctctgaccttgttgatagccaaagcaagtatgcaattgccaaaccaccaactctcatctgaactttcaggaaattgtagatattttggccttcatatctaagttctccacatcattaattggtctagttgtctgatccctgaatctcttgatcttggg

SEQ ID NO: 128149 - DNA, 1794 bp, Zea Mays
gttgtactgcacacgggggggcggtgtgtacttccccgtcttccggtactagcgtactacacgccgcgagcgaagggcgtaagcaagcaaggccggcgcggcgcatgcaggtcaggtcaggtcaggtcatgtcaggccaggcatcttgggcaacagcaactggcaacagccgggccttttgagcgtgcgccctctctctctctctctctctctctctctcccctatccgtgctttgtgcctgtttggtgcgcgtccacctttcggggtcaccggcttctgctttcttgctacgccaccgcgcctctcgtctatttatggagtcccccgatccatgaagccggggcaggccgagagttgtcaacgacgacgtctgccggcagtgctcctgctcctcctcctcctccttcccggccgccgcgcgagcttggtgggttagtgtctcttcttcgcggagacctgtgagaggagccatcatcatggccgccgttgaggtaaccaaccaacaatcgtcgcgccccttgttccctgcctcctcacatagaatgggttctcattaccactccatttctgatggttgaattactagggattttgatttagaaaaatagaactattagaggatgcaaagcaaaccacataaggggagaacacaactgatcgcctcatctcccgagttcgtcagagatgtaggaacagcacattcgagtttctaatgtattgattgtagttggtagctgctctgattatctacgttctctctcggctcttgatgtgcaagcaagcgcattcaagcccttgatttatttctgtgctggtactggtagcccggtacaccatgtatgaatatgatatgggagcttaataatacgatgtttcgctggtctaactgtctccagttgacaatgcaatgcagactgttgtcctcaaggttgctatgtcatgcgagggttgcgcgggggcggtcagaagagtgctctccaagatggaaggttgttctttttttttcactctaatttctatagtacaaagttcattactaacaaagcgattgattctagtagcctgcagcttgcgcctgcacaatgaaaagctagcttaccagaaaattatcatttttttaatcataagggagtagccctaattaataatcgatcatcaaaacgttaacccaaaattaaaggctcatgcattgcaagctttaccacttacgcctgttcttctggaaccaggagttgaaaccttcgacatagacctcaaggagcagaaggtgacagtcaaaggcaatgtcaagcctgaggacgtcttccagacggtttccaagtcggggaagaggacctcctactgggagggcgaagccacggccccggacgctgcggcggcttctggagccgaagcagctcccggcaccgcggcagaagcgcctcctgctgctgctccggcggcgccagagatcaccccagccaaagctgacgcctgatcgtcacgctattattcactcacatgtgatgctgcggctgcgactcctaaaccttaaatctagaaatagctggggattgggtttgcattgcatcgtgttcttgccggtctagcaagtgactataagaataatggaataaacgatgacccagtgtgtgtatgatttccgttctgaagaacaacacatcccttgcaggattgttgttcagtagattctacttgtaccgcggctttggagttccgcaaaggactttacttgttcaagaacttcttctctgacaggaaataacatgtgagtgcagtccgtgcttttatct

SEQ ID NO: 128150 - DNA, 1516 bp, Zea Mays
gttgtactgcacacgggggggcggtgtgtacttccccgtcttccggtactagcgtactacacgccgcgagcgaagggcgtaagcaagcaaggccggcgcggcgcatgcaggtcaggtcaggtcaggtcatgtcaggccaggcatcttgggcaacagcaactggcaacagccgggccttttgagcgtgcgccctctctctctctctctctctctctctctcccctatccgtgctttgtgcctgtttggtgcgcgtccacctttcggggtcaccggcttctgctttcttgctacgccaccgcgcctctcgtctatttatggagtcccccgatccatgaagccggggcaggccgagagttgtcaacgacgacgtctgccggcagtgctcctgctcctcctcctcctccttcccggccgccgcgcgagcttggtgggttagtgtctcttcttcgcggagacctgtgagaggagccatcatcatggccgccgttgaggtaaccaaccaacaatcgtcgcgccccttgttccctgcctcctcacatagaatgggttctcattaccactccatttctgatggttgaattactagggattttgatttagaaaaatagaactattagaggatgcaaagcaaaccacataaggggagaacacaactgatcgcctcatctcccgagttcgtcagagatgtaggaacagcacattcgagtttctaatgtattgattgtagttggtagctgctctgattatctacgttctctctcggctcttgatgtgcaagcaagcgcattcaagcccttgatttatttctgtgctggtactggtagcccggtacaccatgtatgaatatgatatgggagcttaataatacgatgtttcgctggtctaactgtctccagttgacaatgcaatgcagactgttgtcctcaaggttgctatgtcatgcgagggttgcgcgggggcggtcagaagagtgctctccaagatggaaggtgacagtcaaaggcaatgtcaagcctgaggacgtcttccagacggtttccaagtcggggaagaggacctcctactgggagggcgaagccacggccccggacgctgcggcggcttctggagccgaagcagctcccggcaccgcggcagaagcgcctcctgctgctgctccggcggcgccagagatcaccccagccaaagctgacgcctgatcgtcacgctattattcactcacatgtgatgctgcggctgcgactcctaaaccttaaatctagaaatagctggggattgggtttgcattgcatcgtgttcttgccggtctagcaagtgactataagaataatggaataaacgatgacccagtgtgtgtatgatttccgttctgaagaacaacacatcccttgcaggattgttgttcagtagattctacttgtaccgcggctttggagttccgcaaaggactttacttgttcaagaacttcttctctgacaggaaataacatgtgagtgcagtccgtgcttttatct

SEQ ID NO: 128151 - DNA, 1248 bp, Zea Mays
gttgtactgcacacgggggggcggtgtgtacttccccgtcttccggtactagcgtactacacgccgcgagcgaagggcgtaagcaagcaaggccggcgcggcgcatgcaggtcaggtcaggtcaggtcatgtcaggccaggcatcttgggcaacagcaactggcaacagccgggccttttgagcgtgcgccctctctctctctctctctctctctctctcccctatccgtgctttgtgcctgtttggtgcgcgtccacctttcggggtcaccggcttctgctttcttgctacgccaccgcgcctctcgtctatttatggagtcccccgatccatgaagccggggcaggccgagagttgtcaacgacgacgtctgccggcagtgctcctgctcctcctcctcctccttcccggccgccgcgcgagcttggtgggttagtgtctcttcttcgcggagacctgtgagaggagccatcatcatggccgccgttgagactgttgtcctcaaggttgctatgtcatgcgagggttgcgcgggggcggtcagaagagtgctctccaagatggaaggagttgaaaccttcgacatagacctcaaggagcagaaggtgacagtcaaaggcaatgtcaagcctgaggacgtcttccagacggtttccaagtcggggaagaggacctcctactgggagggcgaagccacggccccggacgctgcggcggcttctggagccgaagcagctcccggcaccgcggcagaagcgcctcctgctgctgctccggcggcgccagagatcaccccagccaaagctgacgcctgatcgtcacgctattattcactcacatgtgatgctgcggctgcgactcctaaaccttaaatctagaaatagctggggattgggtttgcattgcatcgtgttcttgccggtctagcaagtgactataagaataatggaataaacgatgacccagtgtgtgtatgatttccgttctgaagaacaacacatcccttgcaggattgttgttcagtagattctacttgtaccgcggctttggagttccgcaaaggactttacttgttcaagaacttcttctctgacaggaaataacatgtgagtgcagtccgtgcttttatcttctggtgttccctcttaattaatgggaaaatgtgcttagtttgggtcgtgaaattcttaccagcttgagattttatattgaaaatttgaaatacaaacattagattaagggtttcc

SEQ ID NO: 128152 - DNA, 639 bp, Zea Mays
gagcaggcagagcacacaaaccattcccccccagctcctcacttttcgccgtcgccctgcccccacagacatccgacagtctcatcagcgtctccccgctttagggtggccaaggtcaccggctccaccacagcaaggcggctgtagcggccatggagaggctgaacacgaagctgtacctgcagaactgctacatcatgaaggagaacgagcggctgcgcaaggcggccctgctgctgaaccaggagaaccaggcgctgctctccgagctcaagcaccgcctcgccaagtccgccgccggtggcggtggcggtggcagcaacagcaacgcggcagcggcgagccgcgcctcgcccaagcccggcgccgacgccgacgccgctgcgccgccgtctcatcatcaggccggcggcatgcctgcccccaagcccaagcccaagtaggctgcggctgcggctgcagtccgtcgcacggctgctgctgctgctgtcggatagtggtggccttcatggtgtttgttttagcgatcactttaattagctccggatgttacttagtttcaggaatgtttgtctagttttagttgatgggcactcatgtgtggcaatgatcttgcgatgaatggataactagctagat

SEQ ID NO: 128153 - DNA, 928 bp, Zea Mays
cagttggtagccacgcgcacggggacggggttctccctttgctgtcgcccccgcctccgattccgcgatgataacccaccatccctccctgatccgcccatctgtcctcaccctccgtgccgacgtcctccgtcggcgcccaacactgcacgccgtcgcctccgcgccgcctccccgattgtggtctttgcgcgccaccaccggtggaacttcgcccgtaacaaccaaatcgaaccccctcggattctctgacactcattgggccatgcttcgattcagttgtaaatgcctagttgcctgaaaaaaagttgtaaacgcctacttgctccgcaggtcagtggcgatggaggcaaacgcgctgtgccgcttcccacgcgtgggcccgccctgctcggcttcgtgcgtagcaacttcctcccgcttgctctcattggtgggatcatattgggtcttctagatcctactcttggatgccttgcacacaaatactccctgtcaaagtacagcacttttgggatattcgttatctcaggactgaccctgcgcactagggagcttggtgcagcgttagaagcttggcctgctggactatatggactattcctatacttctattggtcatcaatggagcacccagcacctgcaataagtttgctaatgtattatattattgtatataattgcagggatctattttgctgtttacaccctttcttgctcagtttattatgcaagttcagttcttcccccctgaatttatcactggtatatgggtcaagcacatgcctgcttttcatgatggattttctgtcttcattccaccattttttgttgccatcgattaactcatacttttgtgctccttatagcttgtttttttggcatcttacagggttagctatgttttgctgcatgccaacaacactat

SEQ ID NO: 128154 - DNA, 1071 bp, Zea Mays
cagttggtagccacgcgcacggggacggggttctccctttgctgtcgcccccgcctccgattccgcgatgataacccaccatccctccctgatccgcccatctgtcctcaccctccgtgccgacgtcctccgtcggcgcccaacactgcacgccgtcgcctccgcgccgcctccccgattgtggtctttgcgcgccaccaccggtggaacttcgcccgtcagtggcgatggaggcaaacgcgctgtgccgcttcccacgcgtgggcccgccctgctcggcttcgtgcgtagcaacttcctcccgcttgctctcattggtgggatcatattgggtcttctagatcctactcttggatgccttgcacacaaatactccctgtcaaagtacagcacttttgggatattcgttatctcaggactgaccctgcgcactagggagcttggtgcagcgttagaagcttggcctgctggactatatggactaggatctattttgctgtttacaccctttcttgctcagtttattatgcaagttcagttcttcccccctgaatttatcactgggttagctatgttttgctgcatgccaacaacactatcaagtggagtcacactaacacagcttgttggtggtaactctgcacttgctcttgcaatgacagttgcatccaatttacttggcattataattgtacctctttctcttgcaaaatacattagcaatggtgttggggtttccttgcctactgagcaattattcaaaagtcttgtcaccagccttctaatccctcttattatagggaaggttgctcgagaaacctcaaaaggtattgctgattttgttgatggaaatcgacaaggcttttcagttgcaagtgctgttctcctcagcctagtatgtctctaatttgaacatatgccagttgacatgttatttacttgctctgtagctcccttgatttgtccttcagcatgtcatgcttttgggtccatatatatagtgcttcactgcttccagcccaattacccatcccttttggcgaagcgggtacaagagggaaactgatgcat

SEQ ID NO: 128155 - DNA, 1358 bp, Zea Mays
cagttggtagccacgcgcacggggacggggttctccctttgctgtcgcccccgcctccgattccgcgatgataacccaccatccctccctgatccgcccatctgtcctcaccctccgtgccgacgtcctccgtcggcgcccaacactgcacgccgtcgcctccgcgccgcctccccgattgtggtctttgcgcgccaccaccggtggaacttcgcccgtaacaaccaaatcgaaccccctcggattctctgacactcattgggccatgcttcgattcagttgtaaatgcctagttgcctgaaaaaaagttgtaaacgcctacttgctccgcaggtcagtggcgatggaggcaaacgcgctgtgccgcttcccacgcgtgggcccgccctgctcggcttcgtgcgtagcaacttcctcccgcttgctctcattggtgggatcatattgggtcttctagatcctactcttggatgccttgcacacaaatactccctgtcaaagtacagcacttttgggatattcgttatctcaggttcggttgcttaaccctattcgtgtgaatccctgttctattacagtattacttctgtgttctgctgatagcttcctcttggctgcataggactgaccctgcgcactagggagcttggtgcagcgttagaagcttggcctgctggactatatggactagtatgaccttatgtttgttctgtggctgccagacttagggcatgtttggtttgtggctaaatgtgccacactttgcctaagggatctattttgctgtttacaccctttcttgctcagtttattatgcaagttcagttcttcccccctgaatttatcactgggttagctatgttttgctgcatgccaacaacactatcaagtggagtcacactaacacagcttgttggtggtaactctgcacttgctcttgcaatgacagttgcatccaatttacttggcattataattgtacctctttctcttgcaaaatacattagcaatggtgttggggtttccttgcctactgagcaattattcaaaagtcttgtcaccagccttctaatccctcttattatagggaaggttgctcgagaaacctcaaaaggtattgctgattttgttgatggaaatcgacaaggcttttcagttgcaagtgctgttctcctcagcctagtatgtctctaatttgaacatatgccagttgacatgttatttacttgctctgtagctcccttgatttgtccttcagcatgtcatgcttttgggtccatatatatagtgcttcactgcttccagcccaattacccatcccttttggcgaagcgggtacaagagggaaactgatgcat

SEQ ID NO: 128156 - DNA, 796 bp, Zea Mays
cggggttctccctttgctgtcgcccccgcctccgattccgcgatgataacccaccatccctccctgatccgcccatctgtcctcaccctccgtgccgacgtcctccgtcggcgcccaacactgcacgccgtcgcctccgcgccgcctccccgattgtggtctttgcgcgccaccaccggtggaacttcgcccgtcagtggcgatggaggcaaacgcgctgtgccgcttcccacgcgtgggcccgccctgctcggcttcgtgcgtagcaacttcctcccgcttgctctcattggtgggatcatattgggtcttctagatcctactcttggatgccttgcacacaaatactccctgtcaaagtacagcacttttgggatattcgttatctcaggactgaccctgcgcactagggagcttggtgcagcgttagaagcttggcctgctggactatatggactagtatgaccttatgtttgttctgtggctgccagacttagggcatgtttggtttgtggctaaatgtgccacactttgcctaaggttagtcattcaaattgaataactaaccttgggcaaaaaagttaggcaaagtgtggcaattgaggcaacaaaccaaacatgcccttacctattctaatatcattctgtggcacaactataagtatgttggaataaagttctcactgccgtttgatccaaggcataattcaaggaaattccatgccattgattttctggcatttatttcttaccaggagtgctaattgcctttctgattatttttttcagttcctat

SEQ ID NO: 128157 - DNA, 864 bp, Zea Mays
cctatgatcaactgataagcatgatttgtttgtcgaatgtttaggagcacaatttaggcaagtattcatttcttttagtagattatcagccatgaaccacctaactacaatatatataaataaaaaactcgacctgtggggctaagacaccccccatgacattatattaagaaacacagatcgagaaaccccctcgaacccctgtcccacccagacacagcggcaccgtagcctgaccgaggccggaccttggacctgtgctttggtgtgggacagatgagaggacttttttaaccacaactaaaattcgctctcacggaaagtcgaacccaggacctaaggagtgctactcggaccacctaatcaactcaactagatgccctttcacatctgactacaatatgcaaagtataatttgaactcctctaccctaagtgcttataatgttctgtttattttgaatttagtccctctgtttcttaaacaagaaataattaaattcaccatatatcccccatgttttccttaaagactatagtgccatcttgaaatatctgaagcttcctggagacacttatgatggcttgttctttgtcaggttgctcgagaaacctcaaaaggtattgctgattttgttgatggaaatcgacaaggcttttcagttgcaagtgctgttctcctcagcctagtatgtctctaatttgaacatatgccagttgacatgttatttacttgctctgtagctcccttgatttgtccttcagcatgtcatgcttttgggtccatatatatagtgcttcactgcttccagcccaattacccatcccttttggcgaagcgggtacaagagggaaactgatgcat

SEQ ID NO: 128158 - DNA, 1745 bp, Zea Mays
cctgcgtctgctgccacgagacgagacgaggcgcgggcaccgccggtccgccgacgggaggaccgggtccgggactcgggatggtcagacacatgtcgcgtggtgtcccaaccgtccgtccatggtcaggtctgctgcctcgccagccaatctgctctgctctgctctgctctgccctgcggtaaaaccaggcacgcacgacacaaaaagccgagctcgagagtgacatcgtctcgcaggcagtcgcggttggggtggcttctctagtcgctataaaatggcctctggttgcgtcgcctccctctccacccgtccgatctaaccgtcccaccgcccaagccactcgagggccgatcttgctgctgccctggcccctggcccctgggccctggcccttcgccctccgccctcctcctcggcaccgtctcgtccgaccatggctgctgactcgggcaagatgccgtccgccggcggcaaggcgccgccgcccaagtcatccgaatccggcatcatgaagaggctcccgcgcctggcgctcgtcttcctggtggcgctgctgtaccggcagctgcaggccccggctcccagggtccccggaacgcccggcggccccccggtgacgtcgccgaggatcaggctcaaggacggcaggcacctcgcgtaccacgagtcgggcgtccccagggagcaggccaggtacaggatcgtcttcatgcacgggttcgactcgtgcaggtacgacgtgctccgggtgtcgcccgagctggcccgggagctgggcgtctacctgctctccttcgaccggcccgggtacggggagagcgacccgcacccggctaggaccgacaagagcgtcgccctggacatcgagcagctcgccgacgccatggagctcggcgacaggttctacctcgccggcttctccatgggcggggagatcatgtggagctgcctcaagtacatcccgcacaggctttccggcgtagccatcctgggccccgtgggcaacttctggtggtccgggctccccgcgaacgtgtccctggaggcctggaacgtgcaggtggcgcaggacaagtgggccgtgggcgtggcgcaccacgctccctggctcacctactggtggaacacccagaagctgttcccggcctccagcgtcatcgccttcaacccggccatcatgtccccggcggacatggaactcatccccagcttcgcctacaggacccacgcctaccaggcgcggcagcagggggagcacgagagcctgcaccgcgacatgatggtcggcttcggcaagtggagctggagcccgctggagctggaggacccgttccccgacggcgacggcaaggtgcacctgtggcacggcgccgaggacctcatcgtgcccgtggggctgtctaggcacatcagcaagagcctgccgtgggtgcgctaccacgagctgcccacggccggccacctcttccccatggccgacgggatggccgacgtcatcgtcaagtcactgctgctgggcgacgagtgacgattgtcatctcccgtcgtcgtcgtcgagtcgatctccctctccctcttcctccccccctgctttttcctgtgcgcgcgagtctttttgactctttgtagtgcagtgagagaatgctacggacatgtctttgcgatcgttactcctattcctatataatatatgatatatagataaagaaatattaacgggatgtttagtttctaaagactaa

SEQ ID NO: 128159 - DNA, 1350 bp, Zea Mays
agtcatttgtcattatctgtctctctccactgagattcaacacgttatcagcactttgctctccaccgagcggttaccgtcgacagcaatgtccatgcatccgtgcatccggcgtctgtcggacgaaaagcgattcaaagacaagttcatggagacgctgcttaggtatggctacagaggctagtacatgtctaatggctggacgctggacaacaacccgacaccactggaaggagatgatctcgctggagtctggcagtctggccacaaggagttgatctctactcagcaacagttgcaccacagcatctgtatcgtcggaggccgggactgcgtggccatggcgccgcccaacgactccgagccatgcacgcaccaccggctgcccgcggacgagctgcagccgccgccgccggctacgtgctgcggcgccgctttggacgaccgggcgccggcggcggcatgggcgtcgtcgccgtccgagcctgaccaggtggcggcggcgcctgctgctcaggaggcggagaagaagcagaacagcgcgacgacgacggaggccgaagcagcagcgggaagcggcgccgggcgggagctggtggcggcgcggcggccggcggcggcggcggaggagagcgcgcgggagcggctgaagcggcatcgcaccgaaatggcggggcgggtgcggatcccggagatgtggggccaggagcggctgctcaaggactgggtcgactgcgccgtcttcgaccgcccgctcgccgccaccgcggggctgctcaccgcccgcgacgcgctcgtcgccgagtgcgccgccgcgcgccggccggccgtctcgcacggctccgcggggcgcccgctacgggtgcacaacggctgctcgtgagcactgcacacgtcatcggctacgacgactacgatcgagcgacgagcgagcccgctcgccgcatgcagttgagaagtgtgcctttcaacaactctattatttatttcgatccttcattgcgtagtactagtacgttctcggactatggatttggtcgatgatgtgatgatgatacacaccacgattggagtaattaatactactcatgcttcattagtactggtggttgtaattaatgtagttgatcaccattttaagcatgcatgtctcaaaacaatcttgtttattattttttcagctaatatataagctagagtgttcttgctttgtcgtcatcgtagtttcgatcttcccaccagttcattttttttgctttcttcattcaatcaaagctagcatctatatgtatcaccaaaatccatctagctagaacacaatttagaaacttttgagctcttaattaaatc

SEQ ID NO: 128160 - DNA, 1237 bp, Zea Mays
cgaacaccagaacagaaccgcagaacgcaaccgccttcagccttctcccatcccacggacgagcgccacacggcaccccactgcgaggcaatcgccaacccgcactgcaccactcgcgcctcgcgatcaccgctccgaactggaaatcaaatggcgccgtcgccgctgtgttccgcttccccacggccgcttcgagccccaggccagcctccccgagacgtccgctcgccgcggacggtcgtcgtggccgcgggcacccgtgtgagcggagcggaggcccgcgcgtcgctggtgctggccttggcctcgcatgcgctctccgcctcgcagcgccgcttcgccgagctcgccgatgaggccgccaagtacgccttcccgtctggccgcttcgagccccgcaccctcgaggaggccctcatgtccgtgcctgatctcgagacagttccgtttcgcgtactgaagcgcgaggcagagtacgagatcagagaagtggagtcatacttcgttgctgaaacgacgatgcccggaagatctgggttcgatttcaacgggtcatctcagtcgttcaacgtgctggcatcatatttattcggtaagaatactgcctctgagcaaatggaaatgacaacacctgtttttactcggaagggtgagtcaaacggccaatcaatggacatgacgaccccagtgataacaaaaaagtcagctggtacaaataaatggaaaatgtcatttgtgatgccagcgaagtatggttccaatttgcctcgcccaaaagatccttctgtgattatcaaggaggtgcccagcaaaatagttgccgttgcagccttttcaggtttggttactgatgatgatataaaccagagggagtctaaattgcgcgaatctctccgtaaagataccacatttagagtgaaagatgattcggtggtggaagtcgcacagtacaatccaccgttcacacttccattcacaaggagaaatgaaatagcattggaggttgagaggaacgatatagccttatgatgtcctagattaacaaataaattattggcatttgagagtgtatgcaaatgcccatcgtccctaatgcatatatgtataatttctatctggcatgttctgtatatatgtagacatgttaattatcgcatgcatatattattgtattggaaactaaataataagagcaaaaaatgttgtgcgttcgagcccgcgcagggtcgggctggag

SEQ ID NO: 128161 - DNA, 1232 bp, Zea Mays
cgaacaccagaacagaaccgcagaacgcaaccgccttcagccttctcccatcccacggacgagcgccacacggcaccccactgcgaggcaatcgccaacccgcactgcaccactcgcgcctcgcgatcaccgctccgaactggaaatcaaatggcgccgtcgccgctgtgttccgcttccccacggccgcttcgagccccaggccagcctccccgagacgtccgctcgccgcggacggtcgtcgtggccgcgggcacccgtgtgagcggagcggaggcccgcgcgtcgctggtgctggccttggcctcgcatgcgctctccgcctcgcagcgccgcttcgccgagctcgccgatgaggccgccaagtacgccttcccgtctggccgcttcgagccccgcaccctcgaggaggccctcatgtccgtgcctgatctcgagacagttccgtttcgcgtactgaagcgcgaggcagagtacgagatcagagaagtggagtcatacttcgttgctgaaacgacgatgcccggaagatctgggttcgatttcaacgggtcatctcagtcgttcaacgtgctggcatcatatttattcgaatactgcctctgagcaaatggaaatgacaacacctgtttttactcggaagggtgagtcaaacggccaatcaatggacatgacgaccccagtgataacaaaaaagtcagctggtacaaataaatggaaaatgtcatttgtgatgccagcgaagtatggttccaatttgcctcgcccaaaagatccttctgtgattatcaaggaggtgcccagcaaaatagttgccgttgcagccttttcaggtttggttactgatgatgatataaaccagagggagtctaaattgcgcgaatctctccgtaaagataccacatttagagtgaaagatgattcggtggtggaagtcgcacagtacaatccaccgttcacacttccattcacaaggagaaatgaaatagcattggaggttgagaggaacgatatagccttatgatgtcctagattaacaaataaattattggcatttgagagtgtatgcaaatgcccatcgtccctaatgcatatatgtataatttctatctggcatgttctgtatatatgtagacatgttaattatcgcatgcatatattattgtattggaaactaaataataagagcaaaaaatgttgtgcgttcgagcccgcgcagggtcgggctggag

SEQ ID NO: 128162 - DNA, 1660 bp, Zea Mays
gccttttcccccctactctgtgcacacactcgagagtcgagactcagttgtcaccgctccccgccgtcctgctgataagattgctcacatctgctccctccccagacagcaagtgaagaatcaggttgtagaaattgtattgggtttagggttggagcagggtgttttcagaaaaaaaagaataggagagggggagggttaaatcgcgaatttctctgcttgcttgagaccacagcagtcgcaagtcgcaagtcgcaagtcccaactcaggtcaggtgaggggtaggtgaagtgggaaggcgcgcggaggggaggggaggagaggaggatggctgcagccgcggggaggaaggtggcggtcgccgccgtgcagttcgcctgcaccgacgtcgaggcggagaacgtcgccaccgccgagaggttgattagagaagcacacaagaaaggtgcaaagattgtactcgttcaggaattgtttgaggggcactatttctgccaagctcaaagactggatttctttcggcgcgctaagccttacaaaggcaatccaactattataaggatgcaacagcttgcaaaggagctggaagttgtcatacctgtcagttttttcgaagaagcaaacaatgcacattataattcggtggctattatcgatgctgatggcgctgatcttggactctatcgcaaatcacacattccagatggaccaggatatcaagagaagttttatttcaaccccggtgacactggctttaaggctttcaaaaccaagtatgccaccattggtgttggaatctgctgggatcagtggtttccagagtgtgcaagagcaatggcacttctgggggctgaaatactgttttatcccactgcaattggatccgaaccccaggattgtaacctggattcccgtgaacattggaagcgggttatgcaaggccatgctggtgccaacttggtccctcttgttgcttccaaccggattggcagagaaactgttgacactgagcatggcaagagctcgataaccttctatgggaattccttcattgcaggaccaaccggagaaatagtgaagcttgctaacgacaaagacgaggaagtgctggtggcagagtttgacttggatgagatcaagtcgattaggcatggttgggggatattcagggaccggcgccctgaactatacaaagtgctactgacgttggatggcgagaaacaatcataaaccccggtctcacgcttaatagtggtaaggcacaggcaggctccagctccacatcaatgttagattttttttttctccttttttaccctgtccaacgatgccatgcctgcatttgtacaagccatctgcgcgtgttcaccatttcacattcagcaaaataaataattttcgtgcaatgtcattctatgtcgggggagaatttagagctccagttcatgactgcatcaatggttcctcgttaaactttgatttatgggtagcattggtctatcaaagtaggaaggtcatacctggcagaaggtgcggaatcagcatatttgattccaaatgccattcacgatggtcgatggcctttaaccgtcaaccatccactacctttggcatgtgacatgtacctttttttccatcaaaaagctcaggattcttgtg

SEQ ID NO: 128163 - DNA, 2200 bp, Zea Mays
gccccgacccggccgatgccccgtccatccaatccaatccaaaccgtcccttgtccctctcttcctcgaaacgcagctatggggactcggccgcggggggtcgtcctcgcgccatgggcggtggtgctggtgctggtgctcgcgcttcgtctggcaggcgcgtcgcatgtgatccaccgcagcctggaggccgaggcggcgccgtcggtcccggcctccattgtcagccccctgctcaggacggggtaccatttccagccgccaatgaactggatcaacgaccccaacgctccgctgtactacaaaggatggtatcacctgttctaccagtacaaccccaagggcgcggtatggggcaacatcgtgtgggcgcactcggtgtcgcgcgacctgatcaactgggtggcgctggagcccgccatctaccccagcatcccgtccgacaagtacggctgctggtcgggctcggcgacgatcctggaggacggcacgccggcgatcctgtacacggggatcgaccgggcggacatcaactaccaggtgcaggtgctggcgctccccaaggacgcgtccgacccgctgctccgcgagtgggagaagccggaggagtacaacccggtggcgacgccggcggccggcggcatcaacgcgacgcagttccgcgacccgacgacggcgtggcggcacgcggggcactggcggatgctggtgggcagcgtgcgcggcgcgcgcgggatggcgctggtgtaccggagccgggacttcaggaagtggaccaaggccaagcacccgctgcactcggcggcgctgacggggatgtgggagtgccccgacttcttcccggtgtccgggccggggctgcaggccggcctcgacacctccgcgcccggaaggaagtacgtgctcaagagcagcctggacctcacccgctacgactactacaccatcgggtcgtacgacggcggcaaggaccggtactaccccgacgaccccgccggcgactaccaccaccgcctgcgctacgactacggcaactactacgcgtccaagacgttctacgaccccgtggagcgccgccgcgtgctgctcgggtgggccaacgagtccgacagcgtcaccgacgacaaggccaagggctgggccggcatccatgcgatcccaaggaagatctggctggaccccaccgggaagcagctgctgcagtggcccatccacgaggtcgagaagctcagggggaaggccgtcagtgtggacgccaagctggtcaagcccggcgaccattttgaggtcacaggcatcgcaacttatcaggctgacgtggaggtgagcttcgagctggagctggaggcggggacgagcctgctggagaaggcggaggcgttcgacccggcgtacgacgacgacgcgcagaagctgtgcggagtcaagggcgcggacgccaggggcggcgtggggccattcggcctctgggtgctggcctccgccgacctgcaggagcggacggccgtcttcttcagggtgttcagggacggacacggcaagcccaaggtgctcatgtgcaccgaccccaccaagtcgtctcttagtccggatctgtacaagccgaccttcgcgggcttcgtcgacgccgacatctccagcggcaagatcacccttagaagcttgatcgatcggtccgtggtcgagagcttcggcgcgggaggcaagacgtgcatcctgtcacgggtgtacccgtccatcgccgtcgggaaggacgctcacctctacgttttcaacaacggcgaggtggacgtcacggtgtccggcctgaccgcctgggagatgaagaaaccgctgatgaacggcgcctgaaattgaagggaaaaaacaaaagtctatccggccgccacgtgactttctttattttcgttcttcttcttcttcgtcaacacacgtctctgccgccaaaggagaaattgattgatttcaacgtacgtatgtgtacgtctgctgccgatcgaaagagaattggattattataaaattgtttgaggccggtccttccattttctcgtccttaattcctctggcatgcaggatcagtgaccgacgacttgtagtttgcttgagcatgttgtttacgctgctagcttcttgttgtacgatacacatatacaacaatatgacacgatgaataaaaaaagtgctgctaattaatttt

SEQ ID NO: 128164 - DNA, 886 bp, Zea Mays
acacatctggtaagcgagcaccgagcagcaggcggtctcaacggtcgacgcgccagctttccttgtccatgcagatcactcgtcgtacgttccctatgctggctcctcctcggctccccctcgccggggcgctcctgctgctcctcgccgtcgcgctcggcgcggtgccgtgcgagagcgccgcgctccgcctccgcggctccgtcgcctgcctcgactgcgccgagggacacgatctctccggtgtggtcgtggcggtgaaatgcgccggcgacggcgacggcagcgcgggcctccacgcagcgcagaccgacgggcgcggcaacttcgacgtggccgtgccagcagaagcgtcagcctcgggcgcgccgtgcgcggccagggtcctcggcgccacggagcagctctgcgcgccgtggggactcacggtcgcgcgcgtcgtcccggcccgggggcctggctccgcctcctaccccgcctcctatgttctgggctcccgcctcgccttcttcacgaggtgcgctgcggctagcggcggctccgctgtcgctgcgaccatggccgaccgtgaacaccagggtggtaacgccccgatggagccagcgctaaggccgacgccaccggcggcacggacgccggcgtggactccaccgtcccgtggaggcaacaggccgcccttcagttttggaggactgcctcccttcttcttcttcttcccgttcatcccgatcatcggcatcccttgaacctgaacgctgccgtgtccaaagcactaccagtactacttacatttgaatcccatgtccatgtatccatgacataatgataatgctagtgtatgcacgccaaaacagcatccaataaatcaagagattgtgcttttctc

SEQ ID NO: 128165 - DNA, 630 bp, Zea Mays
atggcagtgacagtgacagtcacaacgaaaatgatcatcaagaaccaactcaaaatgaccaagatgctgcagaaaaagcgattgatgatgaagaagaatctggagctgctggtgatcaattcaagctggatgatgatctcatataggtgttgccttcttggtcatagtctactactctactggtctagacgacccgagggacgattaggggcgactaatcaccctgatcgcccagtggcttcgatcaggcgatctgaaaactatgtactggtgaattgtaatgcgacccatgatccatctagcactggacgaaaatattctccagatgctcacccgtcacatatagcgcaaactctcctcaaccaagaaacgagcgcggtttcgggaggaaaggggaagccagatgaggcggaggagcttacggaggggtggtattggcaggagccctcgcggttgtcatcgttggtgaatatggcgtcgcagccgatccgctggcaccgcaccggtgcggctgagccgctctttgccgcctccgtcgtcgttgacattgccggtgccctcttcccgaaacccaatcgcccgctctctattaacccggtccataaaacgactcctcaaaatcaattttaa

SEQ ID NO: 128166 - DNA, 1592 bp, Zea Mays
ggcggagtcgcggaaaccacaaccgcacgattcgtacaacgtccaaaccgagtgggtccccgcccgctgccgtgcttctccccattttccgcagtttcttcaggttttctctttcctctcctcgcttatcttcctcccaagcaaccgcttctcgccgggcgccggcggcagctgccacgtgccgccaccgtctcatcgcctcgccgtactagccccgcggcttcgtcagccgatgagccgctgccctgtgagctatcctctcctggtcggccgctcccccctcctctcttctcgtctttttccgtgacccgcccgttcattcgcttcgtgcgtgcgtggcgcaagtcggtccctgtgcggtgatcgttgtgttgccaacggaaccaaatttagtagagtgccccccttgtgcgatagcgtctgctaattgctcctgttggcgcgcctcgacatgttggcgttggcccccaaagttcactcgagtttattttttaaaataaataaataaataggggatccctaccatattggtcgattttgtttcgagcgcccgcgtgtctgagaattggatttgcccgcgaatcttggtaattgctgtaacagttattgtcatgagtctcatgagtcatggaccatacacttccacttcagtagttcagttgcctgtgatggggaaatatcaagtactgattggaatagcatcgaaggggctaatcttgttcttgtatgtagcgcattgaaacaagtactaaaagaaaggtcgtgatttggtttgcgtaccttttattcacttccctatattatttttaaaagcacttcgtgattttcagatgaatagcaatgtctgcatattagtgcgttcattgatgaatttgtttctaggtttcctctcatacaatataatggtgtcaaagcctgtagtgcttgtcttcctgttggtggtactcataatcacatcccagtttgaatggaagcaacagcttgtaaacgagttggaatctacggctcgcaaccagaaacatgtttcaagtagagaagagcttgtcaaggatcagataatcttcactcaagaaaagatgattcaaagattgaataattttgtccgaaatcttcagcaacagttggtgcagtgtcgtggcaacaacaggacagttaatcgttctggaacttctttgacatcttatattagtgagatccagatgccgcagatgatggatgactgacaatgtcgcgcggcatgaactatacggataaaaagataggatattcacagagtcatgtggacagcgaagttctcccagtaaaagcagtcataatgtagtattagcctggacagaacaatattcgatcagttccagagagaaaggaacgctgatcctttgaaaacccgtgtaattttatttcccttttcctctttttcccccctaagagaactgaaaattctttgttttatgataggcatctatatatacttattatcctctacagatattgtgatatgaaggtgttttagaagtgtaaattgctctttaatgcgtgctctggcacaatagcactgaaacctcttcagtgaggagaggactctgccttta

SEQ ID NO: 128167 - DNA, 453 bp, Zea Mays
atgagccgaggcagcagcaagggtgggaagggcggggggctggacctgaagctgcacctgtctcccccggcggcggcggcggcggcgtcctccgacgaggagtggtcgtcttcgtcgtcgtcgccgccgccgagctcgtgcctgtcgtcgtcggagggcgagcgggagccgcggccgcagatccacgggcacgggctgcagtggtccgacagcccggaggcgacgcccatggtgctggcggcctgcccgcgctgcctcatgtacgtgatgctctccgaggccgacccgcgctgcccccgctgccgcagccccgtcctcctcgacttcctgcaccacgccgccgcagccgccacccgcagcagcagcagcatcaacgtcagccggcgggaggacggcgatcacagccgcagtagcaccagcggcgccggtggccggaggaacaggagggcgtga

SEQ ID NO: 128168 - DNA, 540 bp, Zea Mays
atgagaccttccacggctggcgctctggccgccgcggccctcgtcgcgacgctcttgctgagcgtcggcgccaccccggagacgacgtgcgcggcggcggcggcccgcgaccggcgcgtggactacggcttctgcgtgtcgaggctgagccaccaccacgacagccccgacgcggacacctggggcctggccaaggtggccgccgacgtgggcgtcgccaccgccggggacgccgtctacgacatcaaggccctgctggccaagccgccgcccgacgcccaggcgcgggcggcgctggagcagtgccagaggctgtacgacgcggcggagatggcgttcgcggaggcgtacgacgggatcaaccggcgcgactacgcggcgggcaagggcaaggccgcggaggcggctgccctggcccgccggtgcgacgacgccttcgcgcgggccgccgtgcgcccgccgccgcaggtcgcgcggtggggcgaggagtcctcgaagattgcggtcgtctgcacggccatcaccgacctcatcggctga

SEQ ID NO: 128169 - DNA, 546 bp, Zea Mays
atggcgccgctgccgcaggccgtccacctcctcctcgccttcgccctcgcgcttggctgcctggcgggcggcgccaccgcgacggtggtgacgacgtgcagggcggcggcggacagcgacgcgcgcgtggactacgcgttctgcgtcgccgagctgggcatgcaccgcgagagccccgacgccgacacctggggcctcgccaaggtggccgcgctgacgggcgtcaacaacgccgacaacgccgtgtacgacatcaaggccctgctcgccaacaagaggcccgacggcccgacgcgcgcggcgctggagaagtgcgggaggctgtacggctccgtcgggttcgcgttcgccgaggcggacgacgagatcaacaaccgccgctacgccgccgggaaggccaaggtcgcggaggcggtgtccctcgcgcgccagtgcgacgacgccctcgccgtggccgccgccgtcccgtcgccgctggcgcagcacagctcctacaacgtgcggatcgctgatatctgcatcgccatcactaacctcatcaagtga

SEQ ID NO: 128170 - DNA, 704 bp, Zea Mays
aaatagctgcagattgcagcccatcatcaagaaaccaacaccgtaccgtaccgcagctctccgtcgccccaccgccacctgcaagatgagtccgtggtggaagcccctcttgctggcccaccgcggccctcgccgcgctcctcgcggccgacgctaccgtggatacgacgtgcaaggcggcagccgccacggacgaccgcgtcgactacggcttctgcgtgtcggagctgagcaagcaccgcgacagccctggcgcggacgcctggggcctggccaaggtggctgccaacctcggcgtcaacaacgccggcggcgcggtccgcgacgcggaggcgctgctggccgggcagccgggtgcgggcgcggacggcgccaaggcgagggcggcgctggggcagtgccgcaggctctacttcgacatggagctcgcgctcgcgggcgcgtacgacgagatcgacgcgcgcgagtacgcggcggggaaggagatggccgtggagggcatcgcgttggcgcggcgctgcgacgccgtcttcgccgaggccgggatgccgtcgctgctcgcgcggcgcgcggagtacgctcagcagatcacggtcttgtgcattgccatcaccgacctcatcgagtgatggtctgcgttcttcagtcttgtactaggcttgtgtagcaaataataattggtacgatatgtgaagggtcaacaa

SEQ ID NO: 128171 - DNA, 1174 bp, Zea Mays
ccccggaaaggcggaaacccatcgcaactaatccccaaccccaaacctccaatccacccatcccctcctcatccactccgggcggccatggcctgctccttcgccgccgcgaccgtcgtctcttccgcccccaccccggccgccaggcccctcgccgttgccccgcagtccgtctctgtctcccgctccgcggtcgccaccgccgccaggccgctccgcctcgtcgcctccagatccgcgcgggccaccagactcgtcgcccgcgccggcggcgtcgatgacttgccgctggtcgggaacaaggcgccagacttcgaagccgaggccgtgttcgaccaagagttcatcaacgtgaagctctctgattacatcgggaagaaatacgtcgttctgttcttctaccccttggatttcacctttgtctgcccgaccgagattactgccttcagtgacagatatgaggaattcgagaagttgaacactgaggttcttggtgtctctattgacagtgtgttctcccaccttgcatgggtgcagacagacaggaagtctggtgggcttggcgatcttaaatacccacttatttctgatgtcaccaaatcaatttcaaaggccttcggtgttctgatccctgaccagggtatcgctctgagaggactgttcatcattgacaaggagggagtgattcagcactctaccattaacaaccttgccattggtcgcagtgtggacgagaccatgaggacccttcaggcattgcagtacgtccaggagaacccagacgaggtctgcccggccggttggaagccaggggagaggtccatgaagcccgaccccaagggaagcaaagagtacttcgcggccgtgtagactcgccgtctttgagaagctttgctacgtttttgtcatggtgcccgctaagccccccggcagtaggttggagttttgcggagctcgcgtttttacaaatctctgtgctctgaaccgagcgtagtagcccccctttgctgttgtgcatcccgattgagtgctgttctttgccaccttgtttaatttcgtcacctgacgacataaggttcattttacacgtgattgagagatctcacctctagtcttgtgtcgtagtttgtcggaaaaattccctatatatcttcacattttaaactcattcctt

SEQ ID NO: 128172 - DNA, 1944 bp, Zea Mays
atgagagccgggggctgcacggtgcagcaggcgctgtcgccggaggccgcggtggtggtgaagcaggccgtgagcctggcgcggcgccgcgggaacgcgcaggtgacgccgctgcacgtggccagcgccatgctgcagcagcaggcgccgacggggctgctgcgcgccgcgtgcctgcagtcgcactcgcacccgctgcagtgcaaggccctggagctctgcttcaacgtcgcgctcaaccgcctgccggcctcggcctcgccgctcctcggcggccacggccacgtctactacccgccgtcgctctccaacgcgctccacgccgtcgccgaggtgcgcgccctggcgtgccgcggcggcgacggcgtctggctcgttggatacgggtcgtaccagagctacatgaggtgcagggccgggcagccctcgctggagactctctggggcctccagacgctcgccgtccccgctggcagcctcgccttcagcctcaacttcgtcggcgacagtgcaactgcaatgacaatcaatcaccagtcgatcagctgcaagatggcaaagtgcgacgacgacagaagtgggaacgggtcggcggcgccacgttgcctgtcgcttttggacgccggcggttccggccgcttgacggccgtttcgagcttctgcgccgccgactgctccgcaaccaagtgcgacgcgacggtgaagtcgagtatccccccttggcttcagcattgccgggatcatcaggagccttcccgttgtaagaaaagctcgacatgcggcggctcgccgtctcatcatcaccggacggccctaaacttctccacggtggtgtcgccgtcctcctcggtctcgtcgtacgagcagcactaccacctgcggcaccagtcgtaccagccatggcttctcgtggctgacggcgcccgcgaggccgagcacccgtgtaacaaggccaggtgctctgccgccgtccagctacacgtcgtggacgacgaggacgggaagcctctaagcgcgataaaggtcaagtcccacgactcgagcgcgtccaatggctccgtggagtgccgctcgcggttcaaggagctgagcgccgagaaccttaaggtcctctgctccgcgctcgagaaagaggtgccgtggcaggcggagatcgtgcctgagatcgcgagcacggtcctgcagtgccgttccggcatggcgaggaggcgcgaagccgctgtttcgagctcgagaccgtcgtcaacacaggcgtgtgccaaggaggacacgtggatgctcttccacggtggcgacgccgagggcaaggcgagggtggccagggagctggcccgcctcgtcttcggctcgcgcaagagcttcgtatccatcggcggcagccgcaccaccgcgtcgtctccggcttgttggtccgacggctcttccgagcagcagcgcaagcggcctcggttgacggaggcgagcaaccacggctgtcgtcacgagagcctctacgaggccgtacgcgacaacccgcaccgcgtcatcctggtacaggacgtcgagcagggtggctgctggcggtgccagagggacattttggaggccatccaaagcggcttggtccggagccgtgccggcgacgacgacgcagcactcggcgacgccatcgtcgttctgagctgccagagccttgacgcgtggtcgacaaccacctcgccactaacgaccaagaaggcgaaggcggagagcaaggaggagccggaagaggaagagagcgcaggtgaccaccgccgcaaagaagccataactgctgccgctgcgtcgccgtcatcttcactttgctttgatctgaacatggacgttgagaaccacgacacggagagttgcttcacagatgctagtctgctcaaggcagtggatcgaacgttcttcttcagacgacctgatgagagtagcgattag

SEQ ID NO: 128173 - DNA, 207 bp, Zea Mays
ttatttttttttttattatccccctctttttttttttttttttttttctttttttttttttttttttttttttttttaacttttttaattttctcctttttttttttttttttttttttttttttttttttttttttttttttttttttttttttttttttttttttttttttttttttttatatatttttttaatatttctttttt

SEQ ID NO: 128174 - DNA, 2673 bp, Zea Mays
cccaacacctcgcgtgttgtctagcactctagctgcttctctcggttctcgcgactcccaaacggcaaaacgccaaaaccctagccgcggccattccggaattggccatggaggcgagggcgtcgccgcgtccgtcggtctccatcggtggcggcggcggcttcggagctgggcggggtgacgacagcgccttctcgtttctctcaaaggggtggcgcgaggtgcgggattccgccaccgccgacctgcgcctcatgcgtgcgagggctgattccctccgcacgctcgcggaccgcgagctcgagcacatcctcgcgtccgcctccactgcgctgacctccgcgccgccgccgccgctcgccgcgggggcgcccatagccgagctcgagttcgtgcgcacacggatccagcccaagatctccgaactgcggcgccggtacgtgtcgcaggagcgggagctcggccgcagggtgctcgaggggtgggcgccgcgcggggcggggaaacccgcgcgcgcacgtgttgacctctctgggatcaccgccatccgcaacgccatcgtctctgaagtggatggcggggagcgctggaggcgcgtggtgtggaacggggaggcggaagaggggaaagaatgggaggtgctcaggatgatacgggacggcatcaaagagttcgagcgccggagccagaccaaggagatttttgagggattgcgcagtaccggcgagctcgtcgagaaattcaagtccagcctgaaatcattcaacatggagtctcaaggatccaaggaaatccaaccactggatctacctgaaatactggcaaatcttgtaaggcagtctgaaccatttttggatcaacttggtgtacggagagatcagtgtgacaaactagtggaggcattgtgtaggaaacaaaatcattccctttcagaaaacacatccttgcctgtaaatgataagtcatcagacgaacttgacttgagaatcgcaagcgtgcttcaaagttctggttatcatgctgatgatggtttctggagtgaacctacaaagtctgaggtctcagacgataaaagacatgtggctatagtcaccacagcaagtttaccatggatgacaggaacagcagttaatccattgttccgtgcagcatatctcgcaaaaggtactagacaagatgtgacactggtagtgccttggctttgcaaatcagaccaagaactggtatacccaaatagcatgacgttcagttcaccagaagagcaggaaacttatataaggagctggctggaggaaagactaggatttgaatcaaacttcaagatatccttttatcctggcaagttctcaaaagagcggcgtagcatcattccagctggtgatacgtctcagttcataccgtcaagagaagctgatatagcaatattggaagaaccagaacatctcaattggtatcatcatgggaaacgctggactgacaagttcaaccatgttgttggtgtagttcatacaaactacctggaatatatcaagagagagaagaatggagctcttcaggcctttctagttaaacacatcaacaattgggtgaccagagcatactgtgacaaggtcttacgtctttctgcagcaactcaagatttaccaaagtctattgtttgcaatgttcatggtgttaacccaaagttcctgaagattggagaagaaataactgccaatagggggagtggggagcctccattttccaagggagcatattttcttgggaagatggtttgggccaaaggttatagggaactcatagatttgatggctaaacataaaagcgacttagaaggattcaagttagatgtatacggaagtggtgaggactcgcaagaagttcaatccactgccaggaggttagatttgagtctcaattttttcaagggaagggatcatgctgataattcactccatgggtacaaggttttcataaatccgagcattagtgatgtcctgtgcacagcaacggcagaggctcttgcaatggggaaattcgtgatctgcgcagaacatccatcaaatgagtttttcatgtcatttccgaactgtttgacatacaagacttcagaggagtttgttgcgagagtgaaagaggcaatggatagagaaccccaaccgctaacccctgagcaaagatacaacctttcgtgggaggcagcgactgagagattcatggagtactcagaccttgacaaggttctgaacaatgaggctgctcagcctggacaaggtaggaaaagaaagaataaaagaacctcacagcctaatttgtccgacataatggatggcggtctagcgttggcccatcgatgcttaactggcaatgaggttctcaggctggcaaccggagccattcctggtacccgggactacgataagcagcactgtgtggatatgggtctcttgcctcctcaagtacagcaccctgtatatggctggtgatatggccggtgatgactgatgagcacccaaagctaatcgtaggtatatatgtacataatacaccatgtcgcccttatgtcgaccaatgtttggagtattgtaattgtagcatgcatgacgacctttgcccattgttttgtactctgtaataaggttctctccttaaattggagttttatcgcagaaa

SEQ ID NO: 128175 - DNA, 2184 bp, Zea Mays
tttttttgttttattggtggaggtgatttctaaaaactgcatgggcaccgatactttccttttacgcgatattatctatgtgttggatcttgaagacatatactttattttgtgttggatatgaacactgaactgtgaaacttttcaaaagaaaggagcaaccatttgtctagatatttgatcttgatgctacctgataatgcaaacgcaaagatatttcattgcgaagtatatattattggtaacctaaccttagtgtttgatgcaggaaatccaaccactggatctacctgaaatactggcaaatcttgtaaggcagtctgaaccatttttggatcaacttggtgtacggagagatcagtgtgacaaactagtggaggcattgtgtaggaaacaaaatcattccctttcagaaaacacatccttgcctgtaaatgataagtcatcagacgaacttgacttgagaatcgcaagcgtgcttcaaagttctggttatcatgctgatgatggtttctggagtgaacctacaaagtctgaggtctcagacgataaaagacatgtggctatagtcaccacagcaagtttaccatggatgacaggaacagcagttaatccattgttccgtgcagcatatctcgcaaaaggtactagacaagatgtgacactggtagtgccttggctttgcaaatcagaccaagaactggtatacccaaatagcatgacgttcagttcaccagaagagcaggaaacttatataaggagctggctggaggaaagactaggatttgaatcaaacttcaagatatccttttatcctgttctcaaaagagcggcgtagcatcattccagctggtgatacgtctcagttcataccgtcaagagaagctgatatagcaatattggaagaaccagaacatctcaattggtatcatcatgggaaacgctggactgacaagttcaaccatgttgttggtgtagttcatacaaactacctggaatatatcaagagagagaagaatggagctcttcaggcctttctagttaaacacatcaacaattgggtgaccagagcatactgtgacaaggtcttacgtctttctgcagcaactcaagatttaccaaagtctattgtttgcaatgttcatggtgttaacccaaagttcctgaagattggagaagaaataactgccaatagggggagtggggagcctccattttccaagggagcatattttcttgggaagatggtttgggccaaaggttatagggaactcatagatttgatggctaaacataaaagcgacttagaaggattcaagttagatgtatacggaagtggtgaggactcgcaagaagttcaatccactgccaggaggttagatttgagtctcaattttttcaagggaagggatcatgctgataattcactccatgggtacaaggttttcataaatccgagcattagtgatgtcctgtgcacagcaacggcagaggctcttgcaatggggaaattcgtgatctgcgcagaacatccatcaaatgagtttttcatgtcatttccgaactgtttgacatacaagacttcagaggagtttgttgcgagagtgaaagaggcaatggatagagaaccccaaccgctaacccctgagcaaagatacaacctttcgtgggaggcagcgactgagagattcatggagtactcagaccttgacaaggttctgaacaatgaggctgctcagcctggacaaggtaggaaaagaaagaataaaagaacctcacagcctaatttgtccgacataatggatggcggtctagcgttggcccatcgatgcttaactggcaatgaggttctcaggctggcaaccggagccattcctggtacccgggactacgataagcagcactgtgtggatatgggtctcttgcctcctcaagtacagcaccctgtatatggctggtgatatggccggtgatgactgatgagcacccaaagctaatcgtaggtatatatgtacataatacaccatgtcgcccttatgtcgaccaatgtttggagtattgtaattgtagcatgcatgacgacctttgcccattgttttgtactctgtaataaggttctctccttaaattggagttttatcgcagaaatgtgtagtacatggacatcaaaagttcatgactcca

SEQ ID NO: 128176 - DNA, 2248 bp, Zea Mays
tttttttgttttattggtggaggtgatttctaaaaactgcatgggcaccgatactttccttttacgcgatattatctatgtgttggatcttgaagacatatactttattttgtgttggatatgaacactgaactgtgaaacttttcaaaagaaaggagcaaccatttgtctagatatttgatcttgatgctacctgataatgcaaacgcaaagatatttcattgcgaagtatatattattggtaacctaaccttagtgtttgatgcaggaaatccaaccactggatctacctgaaatactggcaaatcttgtaaggcagtctgaaccatttttggatcaacttggtgtacggagagatcagtgtgacaaactagtggaggcattgtgtaggaaacaaaatcattccctttcagaaaacacatccttgcctgtaaatgataagtcatcagacgaacttgacttgagaatcgcaagcgtgcttcaaagttctggttatcatgctgatgatggtttctggagtgaacctacaaagtctgaggtctcagacgataaaagacatgtggctatagtcaccacagcaagtttaccatggatgacaggaacagcagttaatccattgttccgtgcagcatatctcgcaaaaggtactagacaagatgtgacactggtagtgccttggctttgcaaatcagaccaagaactggtatacccaaatagcatgacgttcagttcaccagaagagcaggaaacttatataaggagctggctggaggaaagactaggatttgaatcaaacttcaagatatccttttatcctggcaagttctcaaaagagcggcgtagcatcattccagctggtgatacgtctcagttcataccgtcaagagaagctgatatagcaatattggaagaaccagaacatctcaattggtatcatcatgggaaacgctggactgacaagttcaaccatgttgttggtgtagttcatacaaactacctggaatatatcaagagagagaagaatggagctcttcaggcctttctagttaaacacatcaacaattgggtgaccagagcatactgtgacaaggtcttacgtctttctgcagcaactcaagatttaccaaagtctattgtttgcaatgttcatggtgttaacccaaagttcctgaagattggagaagaaataactgccaatagggggagtggggagcctccattttccaagggagcatattttcttgggaagatggtttgggccaaaggttatagggaactcatagatttgatggctaaacataaaagcgacttagaaggattcaagttagatgtatacggaagtggtgaggactcgcaagaagttcaatccactgccaggaggttagatttgagtctcaattttttcaagggaagggatcatgctgataattcactccatgggtacaaggttttcataaatccgagcattagtgatgtcctgtgcacagcaacggcagaggctcttgcaatggggaaattcgtgatctgcgcagaacatccatcaaatgagtttttcatgtcatttccgaactgtttgacatacaagacttcagaggagtttgttgcgagagtgaaagaggcaatggatagagaaccccaaccgctaacccctgagcaaagatacaacctttcgtgggaggcagcgactgagagattcatggagtactcagaccttgacaaggttctgaacaatgaggctgctcagcctggacaaggtaggaaaagaaagaataaaagaacctcacagcctaatttgtccgacataatggatggcggtctagcgttggcccatcgatgcttaactggcaatgaggttctcaggctggcaaccggagccattcctggtacccgggactacgataagcagcactgtgtggatatgggtctcttgcctcctcaagtacagcaccctgtatatggctggtgatatggccggtgatgactgatgagcacccaaagctaatcgtaggtatatatgtacataatacaccatgtcgcccttatgtcgaccaatgtttggagtattgtaattgtagcatgcatgacgacctttgcccattgttttgtactctgtaataaggttctctccttaaattggagttttatcgcagaaatgtgtagtacatggacatcaaaagttcatgactccagaagactgtcagcacaatatttgtctgcttttgccattgaattagagaaacatagtctt

SEQ ID NO: 128177 - DNA, 223 bp, Zea Mays
atttgaaatattgaaagtcactttgattggaaggctctcatataggataaatcacataagttgtctgagagaccatagtttggtttttaattgatctataatcatggaaagtgaaggggtacaaggatatttgttgagaaatattttggcacttatcttggtactccaagttgaagatcaagaccaaagatgatcaaaattgaggttatcatataacagattg

SEQ ID NO: 128178 - DNA, 219 bp, Zea Mays
atggcggaccccggggcagtggtggctcccagatcggagacgcaacggcggtggctcccgatccggatgcgcggcggcaacggttcctcgatccggagtcacggcgacggttctcagattcagaggtgcggtggcggcgactccctgatctacagggcgagcgacgacggggcagtggggcgggtgagcggctgcgaccctgggcctcgaggcgggtga

SEQ ID NO: 128179 - DNA, 838 bp, Zea Mays
aaaacataaggaattatattatagatgaaactgactgggtacaatgttgtccacagaaaaattaaccacagattgaacatattgatgaaactgggaattaaaaaagcaaatatcatttccattaagacagcagacaaccattacagaggcaggaatgcaagataaacaatcaggttacccagcaactgaacaactctctatccctaagattctaagaacaagcacaatggtacgaagatgccactgccaccagaaaggaaaccaagagaagcacaagtcctacaagcaggcccgaagcaacaacgacgccgcctgcggtgagaggagctcgcctcgctcaggccctctctcccctgatgcggcgcgcgagctggatgtccttgggcatgatggtgacgcgcttggcgtggatggcgcacaggttagtgtcctcaaagagccccacgaggtaggcctcggcggcctcctgcagcgcagagacggcggaggactggaagcggagatcggtcttgaagtcctgcgcgatctcacggacgaggcgctggaagggcaacttgcggatgagcagctccgtgctcttctggtacttacgaatctcccggagcgcgacggtgccggggcggaagcggtggggcttcttcacgccgccggtggccggcgcagacttgcgcgccgccttggtcgccagctgcttgcggggcgccttgccgcccgttgacttgcgcgccgtctgcttcgtgcgggccatcggagctttggtgcttggcgcggaggacggcgagttggtggcagcgtggaattggggaggagttgactttctgggggatttggcagtgat

SEQ ID NO: 128180 - DNA, 901 bp, Zea Mays
gtcggcccaatcacacggcgggcggcccagcccaccagacccgcttccccaccagcccacccgtgggttcggaagcttcttcgtccgtcccctcctctcccgtgctcaccacctcccccattttcgccgccccctccgatctcgccgttctcgtctccttccgggctcttcatctgttcgccgcacttcgtcagtcgcccatggcggatgaggaggtcactgatccaaaggcgctcctagaggatcgttcaaaggctaagtgtgtgtcgcagtggtatgattatcagaaatgtgttaaaaggattgaggacgatgagactgggcacaagcactgtaccggtcagtactttgattactggaaatgtgttgacaagaatgttgcagagaaactctttgagatgttaaaatgacaatttttccctccatttatccacttaaagttggtaataattgtatcacttgtgaggcctatagactattaaggcacttaatatttgtcagagaacttttgcctcttgggtaacacaaattttccactgccagtttgcatttcatttctgctactagtattgaaccagcaaggtttcctccattgctggataaaaatcaatggaatattcccaagattgtggctgagcgttaaatgctataatgtaccttaattgcttttatggtgtattttgacgaggacatagctaatcattcaggtccataacttggatgagatggaataacatgtgtacattacttctagctggtggtaatgatttatcatgagaagtttgtagtatcattggaatgaaacattggcacaatatagtttttttcccagatgtcgtgagttgacacatggatgctgttatgaggagagcttgtggttatatattccagcatctcttgc

SEQ ID NO: 128181 - DNA, 912 bp, Zea Mays
gtcggcccaatcacacggcgggcggcccagcccaccagacccgcttccccaccagcccacccgtgggttcggaagcttcttcgtccgtcccctcctctcccgtgctcaccacctcccccattttcgccgccccctccgatctcgccgttctcgtctccttccgttggattagggctcttcatctgttcgccgcacttcgtcagtcgcccatggcggatgaggaggtcactgatccaaaggcgctcctagaggatcgttcaaaggctaagtgtgtgtcgcagtggtatgattatcagaaatgtgttaaaaggattgaggacgatgagactgggcacaagcactgtaccggtcagtactttgattactggaaatgtgttgacaagaatgttgcagagaaactctttgagatgttaaaatgacaatttttccctccatttatccacttaaagttggtaataattgtatcacttgtgaggcctatagactattaaggcacttaatatttgtcagagaacttttgcctcttgggtaacacaaattttccactgccagtttgcatttcatttctgctactagtattgaaccagcaaggtttcctccattgctggataaaaatcaatggaatattcccaagattgtggctgagcgttaaatgctataatgtaccttaattgcttttatggtgtattttgacgaggacatagctaatcattcaggtccataacttggatgagatggaataacatgtgtacattacttctagctggtggtaatgatttatcatgagaagtttgtagtatcattggaatgaaacattggcacaatatagtttttttcccagatgtcgtgagttgacacatggatgctgttatgaggagagcttgtggttatatattccagcatctcttgcat

SEQ ID NO: 128182 - DNA, 1710 bp, Zea Mays
gcaaggcatctattttttcattacttagttttaattgctgctgtcttctgcagttggattagggctcttcatctgttcgccgcacttcgtcagtcgcccatggcggatgaggaggtcactgatccaaaggcgctcctagaggatcgttcaaaggctaagtgtgtgtcgcagtggtatgattatcagaaatgtgttaaaaggattgaggacgatgagactgggcacaagcactgtaccggtcagtactttgattactggaaatgtgttgacaagaatgttgcagagaaactctttgagatgttaaaatgacaatttttccctccatttatccacttaaagttggtaataattgtatcacttgtgaggcctatagactattaaggcacttaatatttgtcagagaacttttgcctcttgggtaacacaaattttccactgccagtttgcatttcatttctgctactagtattgaaccagcaaggtttcctccattgctggataaaaatcaatggaatattcccaagattgtggctgagcgttaaatgctataatgtaccttaattgcttttatggtgtattttgacgaggacatagctaatcattcaggtccataacttggatgagatggaataacatgtgtacattacttctagctggtggtaatgatttatcatgagaagtttgtagtatcattggaatgaaacattggcacaatatagtttttttcccagatgtcgtgagttgacacatggatgctgttatgaggagagcttgtggttatatattccagcatctcttgcattctttttgtttgtgtggttccccatcattgtatgtttactgttcattgcatatggggctatctggtgcattatggcggggtaaaatctgatggaacatttttatctttgccatccagtggtttggttatgttcactgtcgctttgtgtttgtctcatgttctgtttgccatgcttggtgttgtgctatggcgacaactgacaagagctcacttcttgctatgttgtatcatcagacgtggaatgctcaaccagttatctgctgtgcgtgccacgaatttgttgcatcggtgcattctgactggattaaatagactggatgttctcctttgctttggatgatggtgatcaatgtgtcctgacctggcctagcgaaaatctacctgaaaggtttttcagattcgtgcagtgcttgcaccgtaacaatgccatcatgtagtcgatacatgtgtactagaatattcccaaaggactcccacccagccatccctggcctgctctcctaccgtacctctcgcgtggcatgcggtgtgactcccggcggcctgtgactctcggcctccggcgaaccttcggttcctgatggctggctcaaggacttacaaacttggagcatgattgccaggcgcaatagcacatgtggtctctacccattcttcccaccggttagcatcactgcactttccaccatcgtgtcctcctcctccctctagcatcgttgccttggtacatcttggtcatgatgccctatgcaagctcattaggtccaatgctattttttttgtaataagcgcacagatgatcttatatgtcatgcttgtcaattaggtcatcacacatgtattccttttagcatgtaaaattctcgtgtgctacaccattttgatttaatatattgtgatctttgaac

SEQ ID NO: 128183 - DNA, 885 bp, Zea Mays
aagagaaggaaatcaaaatcgatggggctggagcgtccaaggcgcaacataccgaggtggtgcttggtgcgttcgacgagcgagcggcggtagagcgcgagaacgctagccatggttgcctcccgctcgccggtttcctcgtcgtccgcgtcgggctccttcacggcgaagcaggagcggaaatgcagaaatatcgagattccggatccggcccgtgacagcgactgtcggacacgctggcagcacgggaatcttcagggcccacggggtgacgtcgcgaccgtccttcgaggccaactaaccccacccacgtggcggcagacggacggacgggcagatctttcggcgccacgcccacactgaacagtacactactccagcgcagtggcctttgccctttggcgcgcgccaactggtgcagtgctgctactttcttccctttgaagacgcgctgtaggctgtagctgttgctttcttccgcttggcctcagcccacgacttcaccggttaaaaatatatacatatatttcatttttctaaagatacttctactatgttgaatctattctcttttagtatatctcagtagtctgaattttatgataattttagacaatattttttacaactaatgagtataaataaatagttattttatgatttgttatttatacttgtttgactacaaaaaaaagatcatgagttgttgacagttattatagcagcacaggtcaaattttatcgagtctatggttttatctagtagtttttttaattcttattacaaaaagcacaggttatgcctatataaactgtaacaaactaaatctataattgagtatacaatatatgtaataaccatccgttgaaagaaaacaaaaaaaa

SEQ ID NO: 128184 - DNA, 484 bp, Zea Mays
cctcgccgcctcagggccgggttagcgatctgtacatggccgccgccggctgtttcgaagcaggagaagccagcagcggcagccgggcgacgccgcggcggcgggggcggcggcggccattattactagccaagaagccgccgtggcggctggtgctagcctttttgatcctgatgctggtggtgccgagctgctgccaggcgacggcgcgagcgcgaggcatgcagccgttccggggcaggccgctgctggagccaggcagcgccaaccgtttcctggggttcttccccaggggccccgtgccgccgtccggcccctcgcggcagcacaactccatcggagcgcaggaccagagccatccctgacgatgacgtacgtataccggcgcgccgtcgaccgtcgtcgtcgtaccaaatgtttggagagagagagagagaggctggtcgagaaaagatatattgtagagtaagatctcgaagataga

SEQ ID NO: 128185 - DNA, 111 bp, Zea Mays
cctacgtactatactcgtacgacacgagtcgcaatcaacgctgttgctttgtgctttctgaggctatccgcaagagttacccctaaattttccctctatatcacttttttg

SEQ ID NO: 128186 - DNA, 2413 bp, Zea Mays
ccattcaatccgggaccggggagcgtcgcgctcgcacaccagtgaccagtgacagagggtcggttttctggaggcacttgctggtcccggcgatcgacgacggagcagaattcttctccgatcggctgcccgggcgggagggtccctctgttcggcgatctgcggttctaccaccatcgatttatactgtggctatgtggaggtgtcatcctacacggtgataggttttcttagtacatagcagcttgaggaaaatgtccgatttcgatgaacaggatgacatattcttggagacatctgatgatacaagaagttcggcatatttttcagctaggtgcagcacaagtgaacaattatcagcatcatggggacctgaggatgagctctggacaagtgaattgctgagtgtcaatgaaaggcggcatagattcctggttcggatgggctttgctaaacctattcctactggaatcaccttttcacagtggcagggagaaattttggctgatcgtgcatttcgcgacctggaggacagaattaacagcatctgttcttcatatcggccgtctttttctcatggcgcatctgcaccagatagtactaggaacagcgtcgtgcttgagcttgatgaaatcgagcaccatgaactgaccggaatacttgatgaggttggaacagacagaaccatgaatacaaaccagtcagatggttttcctagtttccctcaacttgttcatttgtttttgcagaagggcagtggtcgtagtccggcaaggggaatggaaatagaattcagtgagaagcaaaatgatcccaagagcttttgtggaaggttcaaaagaaaggaggaggaagatataatctgtatgcacgacacacgtatgaaaagcctgaagagtggaacattgtttgcaacaaaagttgatcagcaaaacaagaagtggatggacttctctgctctgtacatgtgccaagaaatccatgcccacggcggttcaatcagcgtcatgaagttcagtacatctgggaggtatttagcgagtgtgggcgaagactgcgttgtgcgcatctggaggatacacgaagttgaatcctctcctgatctgtacatcagagagacgcctgtcaaatccatggacagaaatatgggcctgaaaatgaaggtgggaaaaggccggggacgtgccctagccataatacccaggaaagttttcaacatcgctgagacaccactgcatgagtttcatggccacacaagtgatatcttggatatgacatggtcaaaatcaaattttctcttgacttcatctaaagacaagactgtacgcatgtggaaagttggctgtgatgactgtctagcagtattcaagcacagagattatgtaacatgcattcagttcaatcctgttgacgaaggatactttgttagcggctcaatagacggtaaagtccgtgtctgggatgtttcagagaggcgagtagttgactgggccgatgcaaaggatatcataactgccgtgggttaccagccagatggacagggtcttatcgttggcatcgctgcagggaggtgccggttctataaccatgcaggtgaaaacgtggaactggagaaagtactgaaggtaacgaagaagaaatctgctggtagacagatcaccagcctgcagttttcgtgcggcgatcctgctcggatcctgatcgcatcagcaggttctaagatacgagtatctgatggaggagctaagatcaaccgaaagtttgaaggacgtcgaggctccaaggtcctggtgccgccgtctctgacctccgacgggcagtacctcgtgtccgcaggtgccgactccaacgtctacatctgggacttggacagaccagcaaggggcaaaagccgcaccagaggaccaagaagggtgcgttcctgcgagcacttcttctcggagggcgtcacgtccgtggcgacatggccgggtctggcgcaccaacaagaagacctccagtcgccggagaagggggccgcccccacgctctgccgcgaccgcgagctctgctcgttcgggacgtggttctcggcagacggcgcgaggggcgccgcgacgtggcccgaggaaaagctgctgccgtccctcaggtacgtcaactgcgccgggatggacgactgccgcgccaaggtgtcggccgcctggaacaaggtcgtcgtcaccggcggcagcgacggggtcatccggtgcttccacaactatggactgccagtgaagctataggcttgcgagatcagagctgtattactgttccttactttcttgtactgtacagttcatgaaagttctaggacgaggaggggtgtacattggtttgcttgctgacttgctgtgaacgagccgttaattaacagggatcttggtacattgag

SEQ ID NO: 128187 - DNA, 223 bp, Zea Mays
attttcgaaatccgatctttctacatgaatgcatttgcactttcaaagcaatcaaaagaaatgcaaggttcggcatggtgcatcaaacaacataaagtacttagggtttttcttacacgggaaatccaaaccgaatcccgctagaactttggaaaaggtcaaggtttagcgaggggaaaaagaaaaagaaaaggtaacgcccgaattttggcgagtaaagaaa

SEQ ID NO: 128188 - DNA, 2493 bp, Zea Mays
gcgaggttcgatgtatcccatcccatcagcatcgacgtcgccacccgcaggccgcacccgcacgtcgccgagaagcggtccccatcaggcatcagccgggctccctgcctggctgccttctctctctcaacactctgctcacctcctgccccggccggaataagtgttgtggacgtgcgtgccgcgcacactccccgccgcccccagcgacgccaaatgctctgcaccgaatcccaatcatcgtcctccctgcgccgcaacttggcaacttgtgcttcgtcacggtaaatattttacgcttttattcgcagcgtgtcactcctttctatcagcgaccggtcatcagtcatcaccttccccctgactcgtgcgtctgtttctcctgcctgggtctggggttgtccagttgccattgccaccaccaaccgagcctagagggaaagaaatcttggaaaggtgtggtgtgacccctgctgctgctggtgccagatttgctcgcgttcgaggcctccttttgtttccgctagattctgccaagatcagcgattccctccgccagcagaatcgctcgctctctttccatcgagcgtgcattcttttctgctgctgagtcgggcaggatcggcgtaacccctccaaaccccagacctttgtccagcagcctcgcgccctcgccgcgttggtatggtttttccttgccccccgtcctagttgctctgttcgcttgatttcctggtcgaggttctcgtgcgctgttccaatttcgagctaatcgtcctgctcctgcctagcattaatccccttctgttcttggagttcacacacatcccgtgcgcgcggattgctggtgcagcagtcggcggcgccgcgtgcattttgcaaccgctttccaagcaccagctgcaagctttggccttttgcccttttcctcctcccgtccccgaaatcccgcaagaaactcgtcccttctcacgagtcacgagtttggtgaggctttgaagcgagcacagttctcgtgaatatcgcagtgggggttggaatccggcatctctgtcggtcaggctggggtgggagtttcctcgtcggagatggatgggaatttgccgccgcgcaccctgatgccaggcggaggtccaggccacttcgatctggggcagccgttccacttcgccgcccagccccaggcggtccgggttcaccagggcgtcttcgccgtccccgccgcgaaccagatgccggagctcggcaatgtggtgaaggcatcgctgagcgacgaggaggaggaggacgacgacggccacctcgaccacggcaaggcggcggccgcctcccagtggcaccgggtcaagtggaccagcggcatggtcaagctgctcgtgtcggccgtgtcctacatcgacgaggacgtcgacgcggactacgggaccagcagcgggaggaggaagcacgccatgctcaagaggatgggcaagtggaagctggtctcctcggccatgaccgagagggggctcgcggtgtcgccgcagcagtgcgaggacaagttcaacgacctcaacaagaggtacaagaggctgaccgagatcctcggccgcggaagggcttgccagatcgtcgagaagccagagctccttgaacaggtgagcctatctgcgaagctcagggaggaggccaagaagcatctcaactccaagcatctgcactacgaggagatgtgctcctaccacaacaggaaccgctactgcctgcttgatgatcctgccctccagaggtccctgcggatggctcttagggctccagacgaacagggaaagaagtgctcctttggctatgatgatgaggatgaccagatgttgctttctgatgatgacgatgatgattatgatgacgatgagttgcatgatgatctggaggtcagtgctgaggatcatggccctcacagtcacagagttcatgccaccaagaaactgaagcatggccatgaggagggacattgtgggtctcatctttcagaagttgcagctattgacatgaacagtatgttctctgaaggatctggtggtccatctgctgagaagaatttaagttatatgcgtgctcaaatcgagacacaacgtctgaatataaaatctcagaagctgagaactgagcagaggcatttcaaatggctgaagttcagcagggagaaggacagggagttgcagaaaatgaagctggagaatgaaaagatggagctggagaatgagcgactggagctggagctgaagcttaaggaaattgagatgggcatcaaaccaaagaggatttagtgattgaaggatgtaagctgtagagctagaggactcttagagtttctggtaatccttttgtctattgcagtagcttacaaattaggatatattacacagtttcatctttgctaactgcatgccggttaagttaataagtacagtttgacatctgaatatggtgcttaaagataccattgcatattta

SEQ ID NO: 128189 - DNA, 1040 bp, Zea Mays
ttaaagagagccgcacgcttttgcagtttctcagcgctgctggtgccgaggccgcccggctgagaagatatatgccgcccagcctcacttacattacatatgcacattctgttctcagttctcttcctctctctcaactcaactactcaaagcggtagattaaccggctctagcgtagcgagtgttgctacatctctcttggccatgggggcatgcgcgacgaagccgggtgacctcaaggtcaagggcgaggcgcctctggtcgcggaggacgccgcggcgccactggcggctgccgacgagaaggcgaaggccgccgaggtccccgtggccgccgctgccgaggtcgaccaggccgatgtcagccgccggaggtccctcagcgacctgcttaaacgggtgagcgacctacttcgttccctgtagtccttgggtactcagaccgagtaacagtgtgacactgacaccaacctttcatctgtttcgcttgctgttgctgctacctctgtacaggacgccgagggcagtgacggggaggaggaggtcgaccaggaggcggagaaggtcgtggctggggagccagcgagtgctgccgctgccggggaaacgatggggtcaccgcaagcaacagtgcaggcctcggtcgcaaccgagcaggacgacacggccgaagaactcaaggatggtcttccgagtggtggcgacgcgcatgcggcggaagaagagaagcggatggatcctgaatcaatccaagctgctgttgctgctgatgccccaagttctgaggaaagcaaggttgctgctgctgctgatgccccaagttctgaggaaagcaagcttgctgctgctgctgatacctctgcctgaaaaatggggcatagtgttgtgattctttgttcttttcgtctctctcggggttttttcatggcgaaatacgctttaatggcgcgagattcatagcaggcagcttggttgctgtcttgctccgtttgtgccgcggtcaggatgtgcatggctggattttactgttgttttatttc

SEQ ID NO: 128190 - DNA, 1022 bp, Zea Mays
ttaaagagagccgcacgcttttgcagtttctcagcgctgctggtgccgaggccgcccggctgagaagatatatgccgcccagcctcacttacattacatatgcacattctgttctcagttctcttcctctctctcaactcaactactcaaagcggtagattaaccggctctagcgtagcgagtgttgctacatctctcttggccatgggggcatgcgcgacgaagccgggtgacctcaaggtcaagggcgaggcgcctctggtcgcggaggacgccgcggcgccactggcggctgccgacgagaaggcgaaggccgccgaggtccccgtggccgccgctgccgaggtcgaccaggccgatgtcagccgccggaggtccctcagcgacctgcttaaacgggacgccgagggcagtgacggggaggaggaggtcgaccaggaggcggagaaggtcgtggctggggagccagcgagtgctgccgctgccggggaaacgatggggtcaccgcaagcaacagtgcaggcctcggtcgcaaccgagcaggacgacacggccgaagaactcaaggatggtcttccgagtggtggcgacgcgcatgcggcggaagaagagaagcggatggatcctgaatcaatccaagctgctgttgctgctgatgccccaagttctgaggaaagcaaggttgctgctgctgctgatgccccaagttctgaggaaagcaagcttgctgctgctgctgatacctctgcctgaaaaatggggcatagtgttgtgattctttgttcttttcgtctctctcggggttttttcatggcgaaatacgctttaatggcgcgagattcatagcaggcagcttggttgctgtcttgctccgtttgtgccgcggtcaggatgtgcatggctggattttactgttgttttatttctcttggaggtactccgtgcaatcaagctgtcttttctataatggcggactcggccggcaatcaaagctataaatttctaaagtttaattaagcgta

SEQ ID NO: 128191 - DNA, 2226 bp, Zea Mays
aggacagctaattggatccgtgctagaaaaccaagggaaactgagtctggtgtatcttttgatgatcccaatgtcgaagaagcggcaaaaaacatatatgcaattgcagctaagcagagcgaaggaacatttaagccgcaaagggagaaagacattctaacggctggtctcggtaaccctgagcatcctggtcgtgtacgaggaatatcatctaaggaaggatggaaggaaggattcggaccacaatgggaaggtctgtacaagaaacgtgatcgatacaaggaagagatggcaaattattttaaggaggaggccaagaaagagttcaaagacctgatgtctgaaatgctatcgaatcctcctccagaattgatgcagcaattggcgatggcgagtgtgatgtctgttcaacaaatgaccactccacagatgcaaataattccagcagctcaaacgccggctgccaccgagggtacgaccatcccaagctctgtcgcgtcaacgggaaataaggtccgctatctagttgatgacatcacaaggcctgtggcatgcacactagttataagatatggtattaacaatcagcgtacaaggaaagtagccacaggccttgcgatcccaggacgcaagttccatggaaacgacattccagaagaatattgcagggttgaagtgacgacagtcgtccaaggatacgaggacgacatgctagacatccctgggcccgaaggtatcgagacacttggacaagctatcaagaattttatcctttggcctcgaagggatgtcgaattgcttgattggtcgaattcgtcgcaggcccaaccgtctccgccttctcaaattgttgttcctattgtacatccatcatcacctcctcaaacttcacatgctgctcctcatcctctttctgaccctccttctcctcatcctcatggtggcccaccgtctccgccacatacatcgcccttcagggatccaccttctccacagccatctccacgaccatctaaagtttctataccaaaagtagtgtccccgtatgataagaaaaagaagagtaaatccactgctggcactgttcgttttttgaaagggattggacggagcctcacgtcagacaatgttgatttggctgatctcgaggagtccgcaaaaaaggctgaggcaatggttgcaaagataaagaagccaactaaggcagattataaaaacgtgcctaaaaaatatgtgccgggcagaccactactcacttttgagaaactaaggaaggtcccggctaatattaaaaggttgcatgattggtacatgcgggcatcttcagttggcatcgacaccatcagtgttaatataccagcccatgcttttattggttcaaatcaaaaaggcgttgttacattcgaggacatgtggttaatgatgaaccttcagagactcgacgtgcaacttgtaaccatatttgcattaatgcaacatgatcagcaggagatcctttatggtaccaatcccaatgctagtgccagtaaaagggttgggtatctcaacccaataaagatatgcgaggataaccacacttttagaatcggaaaaggcaatgaagcattacaggggctaacagacgaagaaattgaggtgcgtatccaggatctgaagaaggattttgaagcaagatacgccacctatataggacacgcaatgcttcaatttcaagacagggaatccatagtggccccgtacaactttaaggaccactggatatgcttcttcatttatcctaaggttggaaaggtgctggtgctcgactccttgcacaccgagccttcggcctattcaaaattcctcagcatcttagagctggcatttaggttttataagcttcaaggtggaaagtacgacacgtccaaaaaagtcgtgccactagacatccattataactggccgtgccacaagcaaccacccggatcggtcctatgtgggttctacgtgtgcgagttcatgagaatgaacggacgatacatcacgaaccctggcaagcaaggaagcccggagaacttgactgaaggtgcattgtacggcatagttgaggacctgtgcacattcatattgaaagaggtcattcccgcagaagggaaatatcacgatgcttccggaacattagctttgccaaagtttagaatactaacaaaaattagtagactatctcttagccgagatagttattag

SEQ ID NO: 128192 - DNA, 220 bp, Zea Mays
ccgcgatagcgtcgctacgaacgagattcgtgcgagcgggacggtggaggaaggagggtgaggccgttgatggggcagcggctgtcacggcggggcatcgcgtgcgggaccgggaaggaggaggggcgccggggcgagggcatggaagcagacgtggatggatacagaggcaggggcggggcgggcggaccgtgggcaggggaggcgaggcgaggtgttg

SEQ ID NO: 128193 - DNA, 2624 bp, Zea Mays
ttgaattattattattctcctctttgcaggggctggctggcttcctcctcttccacctccctccatgcatgcagaggagcagcaccttcattactccacattactctccctccactccgactccgggagaagtcacccaccacagtctcacatctctggtacatgtacatccacagttctgcaagcaaaccattcactcctccctctgcctgtattcttcgtttcgcccctgggatcctcgtcacgactcacgccatccgcccccaccgccaccaccagccacaccatctctgttctccagtcacgccagacggccagaacccacaattttcatcacaccaaaccatccactcctcacctttccccccaaacaagtccaatctttacaacgacattgtcgccaactacaacccctttcccttctgggtgcctcaccagattacccactcaaatccagctaccaagcacaaaagctgcggcatttgccatactgtttcatccgcggaacccaatcttgccgcccgatccttcgcaaaatccaccgtacgtgcttgctgcccctgttccagtccagactctagacaatgctgtctgcgccgtggaatccgagcgttgccagctaattccgctcgggaacacgcacgaggagatccgccagttcgcaagaagcgatatccatccacggcgttgccctggctgctcgcgctccgccagctcccatgtcggacacggagctgtcccagagcacggtggtgtttgggctccgcatgtgggtgctcgtcggcatcggcgtcggtgccgccttcgtgctactgctcgtcctcatctccgtcctctgcctcctcgccttccgccgtcgccgtcgccggcggcagcggccggccaaccccgcgcagcagctccccaccaccgccccgcccaagaatcccacgaatgccaaggcgcccaaggacatccaagaagtcccctcccacgccgccgccgccgccccagcgaagacgccgcttgcgctcgcgcaggtgctccagctccccacgccaccggtctccgagcagctcgtgaccggcaaggagcaccacgtcacgcacccggagcagcagcagcaccccagccaccggagcgacgggccttcgccgcacggcaacggcgagagccgcggtggcgccgcggagcgcgcgcccccggcggtgcccgaggtgtcccatctggggtggggccactggtacacgctcaaggagctggagaccgcgaccgggatgttcgccgacgggaacgtgatcggcgagggcgggtacgggatcgtgtaccgtggcgtgctcgaaaacggcacgcaggtcgccgtcaagaacttgctaaacaacagggggcaggcagagaaggaattcaaggttgaggtcgaagcgatcgggcgtgtgcgacacaagaaccttgtgcgccttctaggatactgtgctgagggtaatcagaggatgcttgtatatgagtatgttgataatgggaacttagaacaatggctgcacggggatgttgggcccagaagccctctcgcctgggatgacaggatgaagatcatactgggaacagcaaaagggttaatgtatttgcacgaggggcttgaaccaaaggtggttcaccgtgatgtcaagtcaagcaacatccttctggacaagcaatggaatgctaagctctcggatttcggacttgcgaagcttcttggttcagaaaggagttatgtcaccacaagagttatgggaactttcgggtatgttgctccagagtacgcagggactgggatgttgaatgaaacaagcgacatatatagttttgggattcttataatggagataatatccggtagggtaccagtggattataataggccaccaggagaggttaatttagttgattggcttaagacgatggtaagcacccgaaactcggatggggttgtggatccaaagatacccaagaaaccttcctcaagagcactgaagaaggctttgctagtggcgctgagatgcgtagaccctgatgctcttaagagaccaaagattagtcatgtcattcacatgcttgaagtcgatgatttcccatacagagatgatcgccgaggcactagagcaccaggacaagcaaggttaccagaaacaccggcaggcggatcaggtcgacctgagactgacagcagtggaaacggcggttccacacaagctgaacccttcagatggagaaacccagaggcttagtgttcatcggactactgaaaggaaagccaagccctcttgatttgtgaagcaacaagccaacaatggtgtccactgaagtcgtgaaactctcatcttgctgatgataggcaaaggcatccatggatactgttagatcatctgtaaatgtaaaaaaaaagtaatttagccctagtaattctttcctgcttatatttatataggtggaggtatctatctatgacaaacccgttccattaaaggcaaaaataactttatttaaatctctggggtgcctctggttaacaaatggtctgcatctgctcagcatagctgaacttgtcatttatgtaaattttttaacaccgactcggcaacttcggtgtgaatatgttttgtttt

SEQ ID NO: 128194 - DNA, 2865 bp, Zea Mays
gatccttccccttctcccgcatcgatcgtctctcaagaacagagggtagaatcacaggtagaaagaaacaagaactgaattagccagtggtaattccggcctggcagctgaatcgtgactcaattcctgacgaatttctcgtggattccgtggagaaaaagtgtgacctttccgatgcagtacaaccaccgcagccgcttgccgccgccgccgctgccgttcggccgcggagggcatcctcgcggccccaagcagccatgctacgctccgcttcctccgccaccgtttcctccggcgccgccgccgccgccgccgtcgctagagcgcaagtacgaggtgcttatggaggccggtcgcctcgccaccgagtatctggtcgcccagggcgtgctccccccggccgctctgcagcgcggcgccggcatctctggcgcgtggcctgatcatcctcttcctccgccaccgcagctgcaacagcaggaaccccgggggggttatggccggaggcggtacaaagatgaatacaacaataatcctaggcgagccaatgacactagtagtagcaccagtagcagagatgattgcagccgtggcagctacaatggaagagggaagatgaagtatgggaaatacaggagggggtatttggattcagggagggacagggagaaggagaggagaaggccatttccaaatggccggcgctacgaggaggataaggatgaagatggggcacctgggtttcggagggagcgacacggcaatcgggggagtgatgaggtgaggcctcatgatacagaggcactgagggaagggacaccattgacagcgaaggctgtagaagggttctgcatggaggatgcaacgtcaaagattatgagctctttcaaagatactattaaggattctaatgatgcgccaaaggtgccggaggagactgaggaaggcgaggtggaggatgacagggagacgcagaattcagaaactgaggtagtgaagcaagggatagataccgatgtaaatcatgcttcttgttatgttattacagagtcaaatcccaaccagttatcagatggtaagattcaagatgagattcctgacgaggaagctgaagatgacaaaaaagttatggatgaggctactttggatcacaacacttgtgatggtgaggtgacaaatatggaagttgagatgcacgttggtaaggagagtttgattgactattgtaacttcacgagaaccccaacaaggcctaggtcagcacgtgcacacagaaatgcagcatctatcccaggagaacctgcagtagttgaaacatttgatttagtttcttctggtcaagcttcacatatggtaagcgctgaatctgctgagagattttttactaaaattgtgtcagaaaacacagaagataaattttgccaagaaaacactagctctggtgatgtccgtgctccaccaaaggagctgatgcttcttcaagaaaatggaataacagttgtgactgaaaacatggcagaagataatgttgatgcagaaccacatgtggtcgtccagcaatataaggaagaaactaacctatctccgttaacagatgccctcgagaagagcttgaggcaggaaatcacattatctccatttgcagcttctcacaaggatagcttgatgcaagagggtggcttgatgcaagaagttgatttatctccgttgacagctaatcacagggagagcttcactgaagaaaccgaattgccaccatcaacagcttctcacaaggacagcttgattgagggaactgacttaactcagacaatatcttcttataataataacttgaaattgcaatttaaggaaggaacacaggtatgcgatattgatatgctgccacaagatgtgaacctcattgagttgcccgatcaaaggaaaatcattggtcgtgatgttggtgctaaagctgtcaccggaatggaagaaggaaagctggatcaatctagctcactaaatctatcggatgttgacctagttggtggtacagaggttgccgctatacacaataatccagtgttggtccagctgtctgcagctggatcttccacagagtcaaataataaacagcaacaagatcctgaaacttttacaggtgccaatgccagtcctacagatgatttatgccagcttccattagataataaggatgttcaggtagttaatatagaatgtggcacaccagttgaagttggtggatttggtttgtcaaaatcaatacacaataatccagtgttggtccagatgtctgtagctggatcttctgcagagttaattaataaacagcaagaagatcctgaaacttttacaggtgccaatgctaatcctacagatgatttatgccagcttccattagacaataaggatgttcaagtaattgacatagaatgtggcacaccagttgaagttggtggatttgatttgtcaaagtcaaatgtcatggcatttcagctaaaagttatacaatttgattcaaccagaaataagatggtatgctctagcatggatagcatcatggaccctggcgatggaatacatacggatgttattcctgttgttcaagatggctacagccttgcattttcagattttctcagttctgatataccatgctacccgtcaatgcaatcagatcttcatgctggaataagtgccaacgactcagagacgcgtgccaccaagtgcatcctctcccccgagcagtcgagcaccctacaaccacctgtgccgttgctcctgcaggcgctgaaacggttgcagccagaagggatggcccggcgggccacccagcagccaccagaacgtgaccagcttttgtag

SEQ ID NO: 128195 - DNA, 189 bp, Zea Mays
atgatgcggtcattattcattagccagcaagttaatctgtacagtgcaacgagtaaatctcaggctagagtgaatgaacttaaaatcacgttttggcccttagtcttcctggcatttatggattgtggaactttgaagaacacatttaggttaggattgctacttatgttgtgcggtctgttgacctag

SEQ ID NO: 128196 - DNA, 479 bp, Zea Mays
ttagttgagttagctcagtacaggcgacaataaatagatcgggttatatcagataaattagttgagtttagcagcaagatcggccgggccaatgcagcccgcctctccgacttgtcctcggacagaaggtttggattggatggagccacccgttggcccgtgaccgtcctggccgcggcgcaaggtcgcagccgccatgcccaataaggccttagttcggtttgagatggattaaagagatccacctctaaccgaacaagccgacatggaggaaagtcctaagccgacatggcgacacagccgcaggatttacggtgcctcgtctcatctgccaccgtcttcgtccggccctagcccctagcacagcacgtagccggacttgtgtccaccaaagcatcagttgtaattagttgcagtccatgataattcttaatcccgttgttagcccgactgtggagataatttgcaatagttgacca

SEQ ID NO: 128197 - DNA, 1008 bp, Zea Mays
atgtccagatatccgaaatataaaatccggacagttatccgagaagatatcctgatatccgaaattcgacggatatctgtcatctcatatccgtatctgatatccgaactgtactatccgaattcgaatccgaaatccaaaaattctgcggatatccgaaaaaaactatccagacgaataattagcctcttcggatggtcggatgctcggataatatccgtaccgtttacacccatactggagataataggatgccatgccccggaaggacgggagcgcgccagagaggctgttcccctggaggctgaggtcgcgcagcgccgcgagcgaggggagcgatggcgggagcgtccccgccaggccggcgttcttgaggtcgaggttgtcgacgcagccctcttgccccagctcggatccgcctgggcgcgccacgacaccgtcctcgccggccctgccggcacagtgctcgtcctcaccgagctcgccgcgctatcctacaccccctccggatccgccaagtggatgaagcatccactctctctgttgtccaagccgcggagccccatactggcctccgacgtcgtcttcgcactctgcgacgtcagcacgccgtggcacagccagtggaagctcttctcctgcccgcttgccatgctcatgaggggcttgacgcccatggagcgagcggcgtggggagacgtcttcgaggtactcaagcgtccccggctcctagctggtgctggcggccgccgggtccttatgatcggcgggctcagtgggaggaagctgggcgcatgccgcccaatatgtaccgctgcttcactggcctatgcgaggctgcctcgtagggaggtgtcataccggccgctgctgccgggggtaacaataaggtcaaagttttcggaggcgatgggaaggtgtggttcgcagcatatggccattgtacaggctctttgcctcgtgtgttgcgacagtcgtgatggctactgcgcaagtcaccaaacatga

SEQ ID NO: 128198 - DNA, 1928 bp, Zea Mays
cggcaagacaaggcttcctcgcacactggcagttgacttgtctccgctcgtcccacctcatcctcctccctgatttttgccacgagctcgtcctagctaggtatgtatttcctctgaggatgatctcgtccacgcatcgtatgtctaggatatctcgcttggttattgtcccgcctccaaatcaaacgcatcctaagtgacacaggcatagagaagctttgctagcgaagtccagtagtgcaactcaccccttcctggtcctgctgctccgccctctccacctagctaccactcccttagagcgccactgccaagccatggcgggaggaggggcggcctaccagagctcgtcggcgtcgccggactggctgaacaagggcgacaatgcgtggcagatgacgtccgcgacgctggtgggcctgcagagcatgcccgggctggtgatcctgtacggcagcatcgtgaagaagaagtgggccatcaactcggcgttcatggcgctgtacgccttcgccgccgtctggctctgctgggtggtgtgggcctacaacatgtcgttcggcgaccggctgctgcccttctggggcaaggcgaggccggcgctcgggcagcgcttcctggtggcgcagtcccagctcacggccaccgccgtgcggtaccgcgacgggtcgctcgaggcggagatgctccaccccttctacccggccgccaccatggtgtacttccagtgcgtgttcgccagcatcaccgtcatcatcctcgccggctcgctgctgggccgcatggacatcaaggcctggatggccttcgtcccgctctggatcaccttctcctacaccgtctccgccttctcgctctggggcggcggcttcctcttccagtggggcgtcatcgactactccggcggctacgtcatccacctctcctcgggaatcgccggcctcaccgccgcttactgggtagggccaaggtcggcgtcggacagggagcggttccctcccaacaacatactgctggtgctggcgggggcaggcctgctgtggctcggatggactggcttcaacggcggcgacccgtactcggccaacatcgactcgtccatggcggtgctcaacacgcacatctgcgcctccaccagcctcctcatgtggaccctccttgacgtcttcttcttcgggaagccgtcggtgatcggtgctgtgcagggcatgatcaccggccttgtgtgcatcacgcctggcgcaggcctggtgcaagggtgggcagccattgtcatgggaattctctcaggtagcatcccctggtacactatgatggtactgcacaagaaatggtccttcatgcagaggatcgacgacaccctcggcgtattccacacccatgcggtcgctgggctcctcggcggcgccactactggactctttgctgagcctgtcctctgcaacctcttcctcgccatcccggactccagaggtgcattttatggtggtgatggtggatcacagtttgggaagcagatcgctggcgcactcttcgtcattggctggaacattgttatcacttccataatctgtgttcttattggcctagtcctgcccctccgaattcctgatgcacagctgcttatcggggatgatgctgtacatggtgaggaggcgtatgctatatgggcagaaggcgagctcaacgatgtaacccgccaagatgaaagcaggcatggcagcgtcgctgtaggagtcacacagaatgtttgagcatagttcttgtaaggttgaaagaaagaaaaatacaagtgcatttgtttgctaattgctattaactgatggcacaattgtatgcaacaaaacacctgttcatggaggaatgtagagtgtcaggatttgatttattttttttttggaatctggaatcttttctgctttcatgat

SEQ ID NO: 128199 - DNA, 836 bp, Zea Mays
gaagtcaacaaaaataagaccacaatataatagtcaagctgacaaaagggacaccaagaatttcatggtacagattataatttgtagcgaacaaggcccaaagaacattctccattttaactggttacctaacaaacaccttctattcaataggcctggtgcaagggtgggcagccattgtcatgggaattctctcaggtagcatcccctggtacactatgatggtactgcacaagaaatggtccttcatgcagaggatcgacgacaccctcggcgtattccacacccatgcggtcgctgggctcctcggcggcgccactactggactctttgctgagcctgtcctctgcaacctcttcctcgccatcccggactccagaggtgcattttatggtggtgatggtggatcacagtttgggaagcagatcgctggcgcactcttcgtcattggctggaacattgttatcacttccataatctgtgttcttattggcctagtcctgcccctccgaattcctgatgcacagctgcttatcggggatgatgctgtacatggtgaggaggcgtatgctatatgggcagaaggcgagctcaacgatgtaacccgccaagatgaaagcaggcatggcagcgtcgctgtaggagtcacacagaatgtttgagcatagttcttgtaaggttgaaagaaagaaaaatacaagtgcatttgtttgctaattgctattaactgatggcacaattgtatgcaacaaaacacctgttcatggaggaatgtagagtgtcaggatttgatttattttttttttggaatctggaatcttttctgctttcatgat

SEQ ID NO: 128200 - DNA, 2240 bp, Zea Mays
cacagggacgtccctcccggcctccccccacccgccaccgcccaaagggagcagtgatccatccatcctatcccccgtgccaaacccaagccagctatggaccatcccgccgccgcctcctcgcctcatccgacgccatagcacctcttcccgtttgcacccccttctccctccatctcccaagccaagcgctcaacctggtcacagcttctccacgctcgctcggggctgctttgtccccgtcttcctgtctgcaacccgtgtgcacaaccgcggcctgctgggtcatgggcttctccttcccattctggcgtgcccgcgcggatggctgacaaagcagccggcgctggaggctgactgtcccgtccgccgccggtgcatccacattttccttatcgctctctcgctccctcaggacgatgcgcctctcgaagctcccaccccaagcgcagcggctccacggcggcggcgacggatgtcgtcacattccacgtcatgtacatcatcgactgtgtcgtgctaggcgtcacactctcctgcttctttgtatactacggttttcacctatgagcgtggtctgtgagcacttggtgtggcttaccaggaagtgccagatggtacaaaagagagtcatgaaggaccatgatagttcattagcctcctgccactttgtgcccccatgccatgatagtgcagggccatttaatcttgatgtcaatgacaagatgattacatgtttgccatatttattcctgtgtaccttgagtgatcaacttggtattgggaaggaaacaacacgtcgtttgggaatgagtactaaatgtacccttcctcttccttactctaaacagaataaggatgagtcacttgcttccttgccaattgatgaattgaccgagaaggttgatggcttatctggagtctttccagaacacaggtatgagatcgtgaaacgcttgcaagaaagaaaacatatatgtggcatgacttgggtggtgtaaatgatgccccaactttgaagaaggctgatattggtattgcaatagcagactctacttacgcatcccatggtgcttctgacattatcctaaccatgccttagtgtaattaatagagttgtgttgacgagtcgagcaattttccaaaagagaattacacagtaaatctatgttgtatcaattaccatccgtattgtggtatgtatggacttctgcttactttttagaaaataacgctcgcttgactgaatagataaataatactcacttcattttttatatttgttgcgttttagttcaaaaatgaactggtcggacgataagtattcgagaacggagataatatatctgacccatacatattttgttgtaacaacttggttttatgcttcttgcactgatatggaagtttgacttcgcaccatttatggtccagatcattgccatcctcaatgacgcttcctgtaaagacgatgatgcatcccgcatatatgcgtgagccaaactctccccaattcttcccgagcgcgcgcaatccagtagcttccgatgtcttttttccagccgcgcatgcagttttgttcgaggaaaggagggcaagagcgggagagacaccatcgtcgttggaggagccagccgaggcgttggagtgtgagatgatacattcaggatatgaactagtcgggcgcgacgatctgaacctatcgagacaagcacgtcgggataacaatgttagcttgcagcgtccttcggcgaggaccattcatcctttaacctcccggcaaatgcatgatgaattttatttaggtgtgttttggttggagtgtgagatgatacattcgggatatgaaccagtcgggcgcgacgatctaaacctatcgagccaagcacgtcgggataacaacgtcggcttgcagcgtccttcggcaaggaccattcatcctttcacctcccggcaaatggttatgttttgtcaccgaaggttcagtcttccctaagttcctgatgcaccaaggtcagtttttagaaaggtgtcaatgtagttttatactccttagttttcagaaatatgtcaatgcagttttatatgtgtgaacacaatttgacaatgcagttttatactcttgtcttagtttttagattatgtgtcactgcagtttgtcaatgcagttttgaacggatattcagttttcctgaagatagcatgataaatgcattctgttaggtcgttcctttttaaaa

SEQ ID NO: 128201 - DNA, 393 bp, Zea Mays
atgtcaaaatccaatgagcagagtaaacctgcagcaagagagaaaaaaatatatagagagagaaatggccaagcaaaactgaagctccagcctgaacctctcaaaatgctatgtgggaaatgggaaaagaaatttcacgggcaggcatgttttcatgtcgtgccgcctcggcgtttcagattatgcagatgcagtcttcttctgctggaaaacaacagcatacacagggactccaatgccagtgcccaccgcagccagcacagcgaggcacaccttaagctgctggtgcttcatcctgtgcaggttgtacatgtgcttggcgtggacgtagtatggctcatcatgagcgtgcgcccccatcctccttgtgccagtagaatggaatgcacgaga

SEQ ID NO: 128202 - DNA, 633 bp, Zea Mays
cccgcccagcgcaccccaaccacgccaggcactaccagcagtcaccagaggcccccgatgccggcctcaccgtcgcgccccgcgccgtctccggccacgcctccctccgccgtagccactccgcgccgccggcgccgcctcgtccaggggaatcccaaccaaaaccagcaccactcgccgtcgccgtccctggcgccggcctccccgttccccttcttcccgtcgtcgccgtcgccgttccaccggttcctcccctccccgctgcgcgcctcctccgtgcccttctcgtgggagcaccgcccgggcatccccaagacgcccgcccggacccgctcctcctcctccaagggcggcagcggcggcaaggcgctcccgctcccgccgtcgctgctcgcccgctcctgcgccggcggctctgacccctacgcctccgtcgtcccggccgagtacgccgccgcggcgcacccggccggctggagcgtgcgcgtgcgccggacccggacccgccggcgccggtcgcccgccagcagcctgggcgacgccctcgccgagtggctgtccatgctcagcctctaccgctcctggaaacgcgccgccgcctgtttcgccgcgaattcctagtcgccggcggca

SEQ ID NO: 128203 - DNA, 1935 bp, Zea Mays
ccgttgtttgtttcccatcccattccattcctgaacccatggccacctgctctctgctgcctccgtcctgaattctctggaacccacagccacagcttcacagccgcgtctgcttctgcgcgtccactctgtccaccacgtcctccagcgccttgatccggtcgatgtcgaagccgacggcgacgggcgacgaggcggcggccgacctgcccgtcgccagcgggaagaccctgccgccgtgctcccgcgacgacgggccgctcttgctcagcctgtcgttcctgctcagcgccaccctgttgccgcgggccgccgccagctcctggctcttgctcttcccggccccgggggaccgccgccgggtgtaggcgtcctgcagcatctcgcgctcttctcgggtgagcccagcggggcgcccggaagtggctgctgctgctaccaccacccgcggggccgcgtgggtcggggaacggacgggggatcggctcggcgacctgtttgccggcctgctgtagctgatcaggatgtggagccacaccaccaggtccagtacgcatgcgtcggccttctccttgtccgcgtggtacagcgtctcgatcttcagcgcgccaggttgcccggcctgcttctgcgccgggtcgttcctgcacagaccggccggagagttcttcagctttggcgcccacacgtcgagcttagtaataatataatgctcttaaaagaagatctcatgagtgtcttaccctgtgttcgcccactcgccaacccatccgaacccatggtgtgccctggttcatagcatcacaaacaagggttataaatatcatcaacgtccaattcactcctggaaaaaggacccatgattctacttttttcttctgtagctaaacaattcgacccaacttgtagtacctggccgtgttattggcaaccgggacaatccattgcaaagtcttctccattgaactcctggttctagtgatcggaacctgaggcagaagaaagtagcagtcagggaaataaagctcccgagtggatgttgtcgatgtggacaatggaacatcattcccaagcaccagactacctcttgagactctgtcggagttatcagccttgttcgaagagcagacttgacgttcgggggcagactttgatagagcgcatctctggtgctctgaggggggacggagcttcgggaaaccttaaattaagcaatggatatcggtcagcaaacagttccccagtaaattgtagttggagacagaattttgttgcaagtacgttccaattatgctcactagctagcagcatgaggtttgtaaatatgacaacattactctttttttttgagtaaccacgagatacttacaatattgtcaatctgagaaatgatattagcgtagtgaagagagagaccagcagaccccaaagtttgacggctctcttgtgattcgctcgactctccaactacaggaacaaaaaagaaaaagcgcataacagacaagtcagtactgatcactaggtggtaaaaccatgactggtttgatggcaagtatagaagtgagcgagcaagcttaccacaaggcccaaaagtatcttggatctcgacatgtaagaagtggacaatatctacaagcttctccatgacctacaaataggagatgcagtttgcatcattcatcttgcccgttgaaaacagatcatttggagaagaagaagaaaaaaaatgtcatctgtgcacttcatcgtgtgcatgatttgaatatgaactactcacagagtcaagaggcttagaccaaagagactttttcttcaaattgtgtacatgcttcctctggctcttcagctcttgtctgatgatctgaacagtgtcccctgttcattcatgggagtcggttattaagtgtgatgaggatcagggaactggactggcag

SEQ ID NO: 128204 - DNA, 1758 bp, Zea Mays
cgccagcccccattgttccgctccgcaccacggaagacgaagcgcagcagccacgccccgaaaaaggcagaagaaacgcggtgcctcgagccatcagatgccccaccccaccccaccccaccgtgttgatctaggagttggagtcggacggcgctgggagtcgccgagtcggggcatggcatccatagccatacatctcctcgcggagcctggggcggagctgtcaccaccatgcccaatcctatcgcaccaaggaggactctgcctcgtgctcctcgtagtcttcgtacccacccctccacgcttcccctttccttgcacggtcccgatccctagccctgcccctctcctccagcgccgctcgccagctctctgcccccgccgcgcccagagatgcagatcccccaccgccgttaccgctgggtgaaggagtgggtctcgcaagaactggtcgtcgccggaggcccctgcgtgctgtacaagtgggtgcgagaggacagactagcagctttgaaggctaaggacaagaagcatggggcagaatctgcaactcctgaacccaactctgaggttctcttcctgtgcagctacgaaggatgtgggaagacattttttgatgcaggggctcttaggaagcatgctcacgtccatggggagaggcaatatatctgtcactatgagaactgtggcaagaaattcttagatagttctaagttgaagagacattttcttattcatacaggagaaaagaattttgtgtgcccacatgaaggttgtgggaaggctttttcgttggattttaatttaaaggcacacatgaaaacacattctgcagataactatcatgtgtgccagtacccagaatgtggccgaagatttacacaagaatcaaaactaagagctcatatcagggcacaacatgagaaaaatccaggtgcttcggctatgaaccatagtgcaattggagaacagcatcagccccctaagccagcaaaggtctcagcaacgcctccagctccctcagctgagcgcccttacgtctgcccctacgatggttgcgacaaggcatacatccacgagtacaagctgaacctccatttgaaaaaggagcatcccaaccactaccaggatggtggtccacaaggcgctgccccttcaaagcgcagcatctcgaagagttcccataggagcagaccggacatcactgctagaatgccaccagccaaggtctccaagcgcaaaggagggtacgcagcgccatcgccagctgtgaacctccctgaggagcaccttcccgaggagcagcagtggccaaggaaagtgatgtacgaggatgacagcgaggagaccgaggaagaagaggggggcaacaatgtcgaggatagatggaactacaacagagttgctagtagcgatgacgaggaaaccgaagacgaacaatgagcttctagcaggcgtccatctgttctgtagttgtgcatataccataaattttaaactttgagggttatagcttttgcatacatgtaaaattttaaaataaggcggacttgttgtagacagcataggttgtaggtggtctgccccttctcaatcagacatgccatgagttcagaaaggataatggatcattgttctcgtttcgcttgtttttgtgtttgtgtttgtgccttttggttcgttatcacagatgagttattactgtaaccctgatttcagtgtttggcaatcaatctcgtcagccttacatttgtaaga

SEQ ID NO: 128205 - DNA, 1773 bp, Zea Mays
cgccagcccccattgttccgctccgcaccacggaagacgaagcgcagcagccacgccccgaaaaaggcagaagaaacgcggtgcctcgagccatcagatgccccaccccaccccaccccaccgtgttgatctaggagttggagtcggacggcgctgggagtcgccgagtcggggcatggcatccatagccatacatctcctcgcggagcctggggcggagctgtcaccaccatgcccaatcctatcgcaccaaggaggactctgcctcgtgctcctcgtagtcttcgtacccacccctccacgcttcccctttccttgcacggtcccgatccctagccctgcccctctcctccagcgccgctcgccagctctctgcccccgccgcgcccagagatgcagatcccccaccgccgttaccgctgggtgaaggagtgggtctcgcaagaactggtcgtcgccggaggcccctgcgtgctgtacaagtgggtgcgagaggacagactagcagctttgaaggctaaggacaagaagcatggggcagaatctgcaactcctgaacccaactctgaggttctcttcctgtgcagctacgaaggatgtgggaagacattttttgatgcaggggctcttaggaagcatgctcacgtccatggggagaggcaatatatctgtcactatgagaactgtggcaagaaattcttagatagttctaagttgaagagacattttcttattcatacaggagaaaagaattttgtgtgcccacatgaaggttgtgggaaggctttttcgttggattttaatttaaaggcacacatgaaaacacattctgcagataactatcatgtgtgccagtacccagaatgtggccgaagatttacacaagaatcaaaactaagagctcatatcagggcacaacatgagaaagctgtttgcctgcagaatccaggtgcttcggctatgaaccatagtgcaattggagaacagcatcagccccctaagccagcaaaggtctcagcaacgcctccagctccctcagctgagcgcccttacgtctgcccctacgatggttgcgacaaggcatacatccacgagtacaagctgaacctccatttgaaaaaggagcatcccaaccactaccaggatggtggtccacaaggcgctgccccttcaaagcgcagcatctcgaagagttcccataggagcagaccggacatcactgctagaatgccaccagccaaggtctccaagcgcaaaggagggtacgcagcgccatcgccagctgtgaacctccctgaggagcaccttcccgaggagcagcagtggccaaggaaagtgatgtacgaggatgacagcgaggagaccgaggaagaagaggggggcaacaatgtcgaggatagatggaactacaacagagttgctagtagcgatgacgaggaaaccgaagacgaacaatgagcttctagcaggcgtccatctgttctgtagttgtgcatataccataaattttaaactttgagggttatagcttttgcatacatgtaaaattttaaaataaggcggacttgttgtagacagcataggttgtaggtggtctgccccttctcaatcagacatgccatgagttcagaaaggataatggatcattgttctcgtttcgcttgtttttgtgtttgtgtttgtgccttttggttcgttatcacagatgagttattactgtaaccctgatttcagtgtttggcaatcaatctcgtcagccttacatttgtaaga

SEQ ID NO: 128206 - DNA, 3771 bp, Zea Mays
atggacaccggacgacggcgcgcaaagaaggacgacgctgccgcggcgctggtggcgctggggtcttcggtgttcgtgcacgcggacaccgtcgacgtggccctgatggtgctcggtctggtcggcgcgataggcgacggcatggccacgccgctgcggctgctcgtcgccagccgcatcgccaacgacctcggcagcggccccgaccacctccaccacttcacctccaggatcaacgcgaacgtgatcaggatcatcctcatagcgtgcgcctcctgggtaatggcgttcctagagggctactgctgggcacggacggcggagcggcaggcgtcgcggatgcgggcgcggtacctgcaggcggtgctgcgtcaggacgtggagttcttcgacctgaagccgggctccacgtccgaggtggtcaccagcgtgtccaacgacagcctggtggtgcaggacgctctgagcgagaaggtgcccaacttcgccatgtacgtcaccacgttcgccggcagctacgccgtgggcttcgcgctgctgtggcgcctcacgctggtgacgctgccgtccgcgctgctcctcatcatcccgggcgtctcgtacggccgcgtcctcacgggcctcgcgcggaggatcagggagcggtacgcgctcccgggcgccgtcgcgcagcaggccgtctcctcggtgcgcacggtctactccttcggcgccgagagggccaccatggcgcgcttctcatccgcgctcgaggagtcggcgcgcctcggcctcaggcagggactcgctaagggcgtcgcgctcggcaccaacggcatcgccttcgccatctacgccttcaacatctggtacggcggacgcctcgtcatgtaccacggctacccgggcggcaccgtcttcgtcgtctcctcccttatcgtcatcggcggcgtgtcgctggggtctgcactgtccaacgtcaagtacttctcggaggcgaccgcggcagcggataggatcctcgaaatgatacggcgggtgcccaagattgactccgaaagtgccgccggtgaggagctgcccaacgtcgccggcgaggtggagttcagaaacgtcgacttctgctacccgtcgcggccagagagccccgtcttggtcgacttcagcctgcgggtgccggctgggcacacggtggcgctcgtcgggcccagtgggtctggaaagtccacggcgatcacgctgctagagcggttctacgacccctccgccggggaggtggcgctagacggcgtggacatccgccggctccggctcaagtggctgcgcgcgcagatggggctcgtcagccaggagcccgccctgttcgcgatgtcgctgcgggagaacatactgttcggcgaggaggatgcgacagaggaggaggtggtcgcggcagcaatggcggccaacgcccacagcttcatatcgcagctgccgcagggctacgacacgctgtcatgtgcgaaacgaaaacaaaaacaggttggtgagcgtggtgcacaaatgtctggagggcagaagcagaggatcgccattgccagagcgatcctgaggtcacccaagatcttgctccttgacgaagcaacgagcgcgctggacaccgagtccgagcgcgtcgtgcaggaggcgcttgacgtggcctccgtaggccggactaccatcctcgtcgcacaccgcctctccaccgtccgaaacgccgacagcatagctgtcatgcagtccggcgcagtccaggagctgggctcccacagcgagctcatcgccaagaacggcttgtactcatcgcttgtccatcttcagcagaacagggattcgagcgaggacaccggcgaggccgccggaactcgtcgtgcatctcctagtgcagggcaatgcagcagcgatgatagcaagatggcgccttcagctagctgcagatcaagttcagcacgctccatcatcggtgatgatgcaagagacggcgagaacaccgacgagaagccaaggcctcccgtgccatccttcggaaggctgcttctcctcaacgcaccggagtggaagcacgcactggtggggagctcgtgcgcggtcctctcaggggccatccagcctattttcgcgtacggcatggggtgcacgttctccatctactactccagagaccatgaggagatcaaggacaagacggagaagtatgccttcgtcttcctcgccctcgtcgggatctcgttcctgctcaacattggacagcactacagcttcggtgccatgggggagtgcctgaccaagaggatcaggaaacagatgcttgcgaaaatcctcaccttcgagatcggatggtttgaccatgacgacaactcgactggcaatatatgctcacagctcgctaaggacgccaacatcgtaaggtcactggtgggcgaccgaatggctctgctgatccagacggcttccatggtggtgattgctttcaccgtgggtcttgtcatctcctggcggctggcccttgtcatgatagcgatgcagccgttcatcatcgcttgctcctatgctcgccgtgtcctgctgaagaacatgtccacgaagtcgatacaggcgcagtccgaaaccagcaagctagctgccgacgcggtctccaacctccgcaccgtcaccgccttctcgtcccagggccgcgtcctacgcctcttcggccaggcgcaggacgggccgcacagggagagcgtccggcagtcgtggttcgcgggtctagggctcagcgcctccgtgagcctcacgatattctcctgggccctcaattactggtacagcggcaagctcatggccgagcggctcatcaccgtggaggcggtcttccaagccaccatgatcctggtcaccacagggcgcgtgatagcggatgcgtgtagcatgacgacggacatcgccaaaggcgctgaggccgtctcgtcggtgttcgcaatcctcgaccgccaaaccaagatcgacccggacagccctgaggggtacaagccggagaagctcattggagaggtggaagctgtaggggttgatttcgcgtacccatccaggccagacgtgatcatcttcagaggattctccttgagcatggtggcaggcaagtcaaccgctcttgtcgggcagagcggctctggcaagtcgaccatcatcgcgcttatagagcggttctacgatccactcaagggtgtggtgaacatagatggcagagacatcaaagcgtacaatctccaggccctgcgtcggcatattggactcgtcagccaagagccgacactgttcgcgggcactataaaggagaacataatgctggaggcggaggcggcgagtgaggcggaggtggaggaagccgcaaggtccgccaacgcgcacggcttcatcagcaacctcaaggacgggtacgacacgtggtgtggagaccggggcgtccagctgtcgggagggcagaagcagcgcgtcgccatcgcccgcgccatcctcaagaacccggccatcctgctgctggacgaagctacaagtgcgctggacagccagtccgagaaggcggtgcaggaggcgctggacagggtgatggttggccggaccagcgtggtcgtggcgcacaggctcagcaccatccagggctgcgatacgatagctgtgcttgataggggagtggtggtggagaagggcacgcatacgtctctaatggccagcggtcgctctggaacctactttggcttggtcgctttgcagcagggaggcaagcagcactga

SEQ ID NO: 128207 - DNA, 1521 bp, Zea Mays
ttccatgcagcagtccccccttcgtgtcgcactcgcacagtcgcactccataaggcaaggaggaaaacagagagacgaccaccgctccgcgccggccggccattccatccggcaatggcctccgccgccggtgctgcgttcgccgccatcaccctcctcatcctcgtacccctcaccgccgcttcggactccgaccacaagtaccaagcagcggagcctgtgacgctctgggtgaacaaggttggtccgtacaacaatccgcaggagacatacaactactacagcctcccattttgccatgcgtcagaaaaccatgtgcataagtggggaggactcggcgaggtccttggtgggaatgagctcattgacagccagatcgacataaagtttggaaagaatgttgataaggccacaatttgttcgctagacctcgatcttgtcaaggctaagcaattgtcggatgcgattgagaactcatattggtttgaatttttcattggttttgttggagaggcagacagaaacaatgataacaaatatttcctattcacgcacaagaatattgtcatcagatacaatggcaatcagattatccatgttaatcttactcaagaaagcccaaagcttattgatgtgaataaggcattggatatgacatattctgtcaaatgggaaccaacaaacataacatttgctcaccgttttgatgtgtatctggactatcctttctttgaacaccagattcattggttctcaattttcaattctttcatgatggttatctttctcactggactagtgtcaatgatactgatgcggactctaagaaatgattatgcaaagtatgcccgtgatgatgatgatattgaaactctggaacgagatgtcaatgaagaatctggatggaagcttgtacatggtgatgttttccggcctccttgcaatctagttcttctttcagctcttgttggtattggtacacagttggcagcactgattctactagtgattttgttggcaatcattggaatgctgtacattgggcgaggagctattgtcacaacattcattgtttgctatgctcttacttcattcatctctggatatgtcagtggtgcattatactcacgtcatggaggaggagcagggaaaaactggatcaaggcaatggccatgacagcatcacttttcccatttatgtgctttggaattggcctggtgcttaacactattgctattttctatggatcgttagctgccataccatttggtacgatggtggttgttttcatcctgtgggccttcatctctttccctcttgcacttttgggaactgttgttggtagaaattggagtggtgctccaaacaatccctgtagggtgaagactattcctcgccctattcctgagaagaaatggtacctcacaccatctgtcattgcgcttatgggaggactgcttccttttggtagtatctttattgagatgtactttgtcttcacatcgttctggaactataag

SEQ ID NO: 128208 - DNA, 1997 bp, Zea Mays
ccatggaaacaactgtcctgtcaaggaagcacttcagcttgtacactgggatcaagtcgatctcctctagtatttggcacaaatcttggcacgaccagcagcagattgtccacccgtttctcatgcccaccccccgccgccacctctgcttcctccgcgcactcgttgggctccgctccaccggcgctgctggcttttcctcggctcctacacgcgggtgcccactccacgccgcgctagcgcgccgcggcgcccccgcggccgccgcgctcgctctcttttccagcatccgtgccgcgacattgccgaccccctacaccttctccctcctgctcgcctccctcgccgcgtcctcctcccgctcccgcaccccctccgctgccgtctgcgatcgactcgctgcggcggggcttgcgcatgggcaggcgctcaagcacggcgcgctcgcacaccccgtcgtcaccaactgcctcctcaagctctactgcgcgctcggcatgctctccgacgcgcgcagggtgtttgatactagcggtgccacctccctggacgctttctcctggaacacgatggtgtcagggtacggcaagtgcggcgacctagaggccgcgcgggaggtattcgtcagaatgcccgagaggggcctggtttcctggagcgcaatgatcgacgcttgcatccgtgctggggagttcagtgaggcactgaggatgttcgaccagatgatgggaaatgggttcaggccagacgccgtggtgctatcgagcgtgctcaaggcttgtgcgcatctgggtgctcttgagagggggcggtgggttcataggtttctcaaagcagaggggcttgggaggagtccggataatgtcatgcttgagacggcgcttgtcgatatgtattgcaagtgcgggtgcatggatgaggcatggtgggtctttgatggagtccagagccaagatgtggtgttgtggaatgcaatgattggtgggcttgcgatgaatgggcatggaaaacgcgcacttgagttgttcagaaggatgcttgatatggggtttgtgccaaatgagtcaacgtttgttgttgttctttgtgcgtgcacccacacaggtcgtgtggacgaaggtaaggagattttcaggtccatgtgtgaccatggcatcgagccacggagggagcactacgggtgcttggctgatctccttggacgtgcaggactcctggaagaagccgaggctgtgttgctggacatgccgatggagccacatgcatcacagtggggggctctaatgtcatcatgcttgatgcacaacaatgttggtgtgggtgaacgtgtaggaaagaaacttattgagctagagccagatgatggtggacgttatgttgttctgttcaatctgtatgcagttaatggtttatgggaagatgcaaaagctcttcgtaagatgatggaagagaggggagccaagaaggagacaggtttgagctttatagagtggaatggtttagtccatgagttcagatcaggtgatacaagacacccccaaacaaggcagatctatgcattactggaagatatggagcagagattacaactgattggctatgtcaaggataccagccaagtgctcatggacatggacgacgaggaagataagggaaataccttgtcctaccacagtgagaggcttgcattagcatttggtattctaaacactccccgtcacatgcctattcgaattgtcaagaatcttcgagtgtgccgtgactgccatgtctatgccaaacttgtgtccaagctctaccaacgtgagatcattatgcgtgaccgccatcgcttccacttgttccgtggtggggtttgctcctgcaatgacttctggtgacaatgttactgactattcggtatgggcgtatggcatagttatggacatcattctaaaaacagcaactagaaaggatgatcatgacatgactattatgtatttggaggatgagataga

SEQ ID NO: 128209 - DNA, 1042 bp, Zea Mays
agtaggtttgtatggggtttgcacatttggtttgcattctatatgtctctgtttgtagcgtttgcttcagtgctaaggtgggactggaggcggggcggtggcgaatgcaacgggagattgagaagagagaggtgaaaataaataatagaatatctgataattagtatagggtagagatgtaagttaaatatgattgtggaagtttgtgagatagagtagaaaatctcgctgattatgatagaatattcggtaaagtgtgatagcctaacatcattctcacgtcttttagcacttaattcgtacaccattgaatatttaacttcgtaggtgcgattataattttgattaaagggatgtcaccagtgtgtcccgttctgttcttctgctgtgttccgtaacttccgttattcctattcttttccaacgcgactacacgtctacgcctctcctctgctttcccctctggcccttccgatggactactcgagtggcgcgacggagtcggggagggtgcgagcacgttggtgctactgccgctgcttccgccgttggtgccgctgcttctgcggctgctactgctgcaactgcttccccgacgagccccacgacgaccgccgcgccgcagcgtacgcttaggctcctggactctccactcgcagtcgcagggagagtcgcatataggcatatgagcagtatgagggaactggatttctgtcctcatgtacactaggcaaatggctaccttgttcttcaaatagatgttgaagaagatattacagcttcagagaatcagagctctcttttttggtgcttgtaatgttacaaagaagccccgacgatgatgtgaatcagagtagcacttcgtgcattctaatctgtgtactgtggttcgcgaaactaagattgaatgtgtcgagtgtttctgtgtgggcggttgtttgcctcttctgtactctgttgttcttcttctctgtttaatgaaataattcacagctctcctgcatgttatgttcgatcgagagagagagaaagagaaaaaaaa

SEQ ID NO: 128210 - DNA, 852 bp, Zea Mays
aggcaaccaaacaaagacttaaataaagtcaatgcatacagtgatgcaggatgagatagtgcgactaaccagtcaaatggatagtgactaaataacccagtgcaatggtacacggaactaatttccactgctcagcccagtaaaatgcaagggaaacaagcacaatgtcatatagacataacatatagtatcactgaaacactgattttgatagcaagtcactatgtagaacaaaggtagacaaatccttctacggcttcctccaacgggtagctcctcgagactcgaaagggaggaggacggtatgttgttgtgtaccatgatggggtggcagtatgtgctcttaaggagctccttgatgtcctcccgcgcggccttgagctgcaccgcgtccgacgctgccatgcaccgcaccacccgcaggccacacccgcgcccggccgccttctgcgcgcacgcaaccccaccaccactacgaggtcagtcagagcagctcgattcgatcttatgtaagcgacaacctcatatcgaccggcgcgagcaaattaaaagggaacctgcgagaagaggggcgggcgggagcgtaggcgcagccccgcgcgggcggagcatggggaggggaaagaggcggcggctgcggctgcgaccgttgcgcggcgggcggacggggacggcgaggcggcagggaggagggaggcggcgaggcgctccgccatggcaccgcgcgcgagagctttgggaatttggagggaagcgaggcaggattgctgcgcgccttcgcctcgccatcgaggggcttctcggcgtcggctagtcgaggactgggtgaggccgtgcgcgtgtggcgcggcg

SEQ ID NO: 128211 - DNA, 720 bp, Zea Mays
cagcccagtaaaatgcaagggaaacaagcacaatgtcatatagacataacatatagtatcactgaaacactgattttgatagcaagtcactatgtagaacaaaggtagacaaatccttctacggcttcctccaacgggtagctcctcgagactcgaaagggaggaggacggtatgttgttgtgtaccatgatggggtggcagtatgtgctcttaaggagctccttgatgtcctcccgcgcggccttgagctgcaccgcgtccgacgctgccatgcaccgcaccacccgcaggccacacccgcgcccggccgccttctgcgcgcacgcaaccccaccaccactacgaggtcagtcagagcagctcgattcgatcttatgtaagcgacaacctcatatcgaccggcgcgagcaaattaaaagggaacctgcgagaagaggggcgggcgggagcgtaggcgcagccccgcgcgggcggagcatggggaggggaaagaggcggcggctgcggctgcgaccgttgcgcggcgggcggacggggacggcgaggcggcagggaggagggaggcggcgaggcgctccgccatggcaccgcgcgcgagagctttgggaatttggagggaagcgaggcaggattgctgcgcgccttcgcctcgccatcgaggggcttctcggcgtcggctagtcgaggactgggtgaggccgtgcgcgtgtggcgcggcg

SEQ ID NO: 128212 - DNA, 830 bp, Zea Mays
actaaaaaaaataaaaactaaggttagcaatgaatgagcagtagtgcacaactaaggatacccatgtaaaaaatctaaattgaaaccccatgtaaaaatacggttgacaaactagccctaagtgtttgttagaggtacgccgattcgaaccatccagtctccgtgtccagtcgagtctcagcaaggaagatgtgggggaaaggaaagaagcgtttcggcggtggcggcagcggtgagcccgcggccaagcgccaggccgcgagggacgatggcccctccgaatccgctgaagacggtaccgtcgtagccgagatatcgaagaacaagaaggtgtccgttaggagctggaaaggcagggtcttcgtcgacttacgcgagttctacttcaaggacggcaagactctccccacccgcaaaggtatatcactccaattagatcagtggaagatactgaaggacaacatcaaagccataaatgaggcaatcgaggaaaatacatgatgggagccgccaagcagtcacgtgacgggcgagcttttgcttcttctctgtttgaggcctgatgtacggaagtagtttttgttgcccatatgctgccgtgttgcttttgtccatttgaccacctgctgttgtaggtggccgcatggccgaaaggtttggtttctgccccgtgctactagtaaacttaaacgtcggacggatgacgtaacttctcactattatcttgtagccaaaaacagcttgttaggattgcagaactaagatttagtgtaaaaatgatccggtttctttcttgctttattatgtgatcatcatgagagtattttgcc

SEQ ID NO: 128213 - DNA, 912 bp, Zea Mays
actaaaaaaaataaaaactaaggttagcaatgaatgagcagtagtgcacaactaaggatacccatgtaaaaaatctaaattgaaaccccatgtaaaaatacggttgacaaactagccctaagtgtttgttagaggtacgccgattcgaaccatccagtctccgtgtccagtcgagtctcagcaaggaagatgtgggggaaaggaaagaagcgtttcggcggtggcggcagcggtgagcccgcggccaagcgccaggccgcgagggacgatggcccctccgaatccgctgaagacggtaccgtcgtagccgagatatcgaagaacaagaaggtgtccgttaggagctggaaaggcagggtcttcgtcgacttacgcgagttctacttcaaggacggcaagactctccccacccgcaaaggtatatcactccaattagatcagtttttcttcgcagtgaaatgccaagatgcacacacgtatgccatgataacaatttctagctgctattgaactcctggcaaatggaagatactgaaggacaacatcaaagccataaatgaggcaatcgaggaaaatacatgatgggagccgccaagcagtcacgtgacgggcgagcttttgcttcttctctgtttgaggcctgatgtacggaagtagtttttgttgcccatatgctgccgtgttgcttttgtccatttgaccacctgctgttgtaggtggccgcatggccgaaaggtttggtttctgccccgtgctactagtaaacttaaacgtcggacggatgacgtaacttctcactattatcttgtagccaaaaacagcttgttaggattgcagaactaagatttagtgtaaaaatgatccggtttctttcttgctttattatgtgatcatcatgagagtattttgcca

SEQ ID NO: 128214 - DNA, 6054 bp, Zea Mays
ctctctgtcctacccttcccctatccgcctccgccgccctcgttcctcaacgcggcgacgaccgccgcctaccgcacgtcctagcccggcgccgcccctgactcccgcgtcccgcccgtcgccggagggaaacgggggccggtggcgcgggacccgacgactgcaacgcagcaggcattcgccgccacgcgggtcaccgagggttttgtaagcccggcttcggcggcgtgatcgggtgcggaggctgcggtgagggcattggatgttctagacccgtacgggaccctgctgacctcctgtcgcaatggaggagtctggcgcggccgtgcgcggcgaggaggatcgtgttgctgacgcccagcgcttggggccagcggaggtcgctctgtctactgccaccgcccctgaaccggtccatggattgggggatgccgcagtagaggtatgtcatgctccggaagctagattgtccacagagattggtgacgaagggagcaatttcgcgtttggattggtgactcctgtcgattgtgcttcttcctcccatcgaggaagaaggtttcagctaggacaggagaagggttcgagttcagagcagagggtcatggacatggatgaacggaaggaaggtagtttggctcctgcggcgtctgctgaaaatgctgctttgcagacctgtcatgaggtcaatgacaggctgtcgaataagacgataccttatcctccttgcagtgaagtggtatgttccaaggatgctggatgcctttatggcatgtttgataaaacggcagaagggagccagtttgagcatgtgggtttgacgggtgacggaggtgattgtcgtgccgtggtggaggtagtaaaggaaaccgtacaagatttactggctgctcgtaacggagcaaaatgtggttatgaaggtttgtcagtttcaatggaccatggcagcgagcaagagccacgtggcataggatctatcacgtttgctaacgatgagctgcagccaaatggtttggtatcggatattgaagctgtttcgaggccagctcatatagattcagttccttccattccagggagcattgatctttctttagatctaaaggcaggtcagtttggtggaatgtctggtgattcagggacgtgccatggggctgacagagcgatgcggaatgatgattttacccatgacagtggggacttgtcagacccagggaagcatcatttggagaaattgccatctggtgctgagggcctggcattaataactgatgctgttggcggatctgaccatttggaccaagggctcaatgcctgttatgctgctgctaatagctctgctaattttataagtaatgctaatgatggagaattacgaaacgaaaagctgacagcattgcacgtattcatacgtaggaatccaaaaagagctgtttcttcaagaagtcttaattccgagaagcaagatcaaataggcaaagggaacagtggctcacgcaaacctaaaaaagttgatattgtgagctcattacaccaaagcaccgtgaatatgttcccaaacaaaatcactaagggaagaagtggcatgaacaggccaccaaaatcctttacttggggcaatctagaacggctattagattgctgtccaagctacgggccatctacttctaattctcgtccaatttgcttggacaaaggaggatcatataacagatccgatcagagaagtcagccaagtatttggaaaagtcgaagttctagatcttcaagaagcaaacgctcttctttctctgaaatagggcatgcagctaatgaactggatgggcaaccaaccttagcaattgtggctgatatggggcatgctgctagtgaattgaatgagcaaccaaccttctcaattgcggctaatactgatatttgtttggaaagccacagaggaaacattccaaatttgtcttctgataaattgatcaatattcttgatagtactaggaaaactgcagagtctattgatagtcatcgtacagaatcaaaatgtatccagagccaaagagaaagagccttggtgagtagtggtaaagaaacatgcgctgcatacgtccacagagagtgtgctaaactgtcaacttctgaacttatggacaatgccaatggcaatgtcatgctacatgttgggttttcgccggattctgttttggagcttgcttctgttacatgtgaaggtaatgcttctgcaagccatgatgttatgttgcatgaaaacccaaccgatgctggtgcattgaatgatggtgatccatctgttttatctacttctgactatgaaaaagaacatgcttcatcattgatgaacttggagcagcatgctagaagtactttgcacgaggacaccagaaaggaagaggttggtccatctcatggcatagtagaaaatgatattgaaggaaaggcgcgggctttacagaagtcaaattctgtgagaaaaattggtattgtcagaaaggcaggttgcaaaaagaaagatggatctaaaggtgtaaaaaagaatgttataggattcagcaaagcttctccatgtgaatcttcaaaacttaggccctctaatgatccaatttcacctgggcctccagatgttgggtcttgctttgaagccttaacttcaggctcacaggatcttggtatgcatgaacatggtggcatacagagtcactctgtaatgcatggtgacaaagggcatgcatttgacagtatgaaatcaccaaggcacaagataaaggatactaatgcaagaaagaaaggtaaggtgcgagacccacataagaaagaaaaaggtaaaaagaaaaatacatcagaagagacttcccttgatcatggacttttacagttaccttctactgaacgtgcagcatctgatatgaatgaacagagtgatcttgatcctatcactgaacttccattcaagaactccagtgccatatctactaatttacctggaaatgttgcatgcaaaatggatggggcatctgtaccgccactgccaccacgtgctgcatgggtgtgttgtgatgattgccaaaagtggcggtgcatacctgctgaacttgcagatgtgattggagaaacaaattgcagatggacttgtaaggacaatggagacaagacgttcgctgactgttctattccacaagagaaatcaaacgctgagattaatgcagaactcgatctttcagatgcttcagctgatgaagcagacaatggtggatctaactccaaagcttgcaaaccaccgtcatggactcttgttaggtcaaacttgtttctgcatcgaaaccgcaggacacaatccattgatgagagcatggtgtgcaactgcaagccaccccaagatggccgaatgggttgtagagatggatgtttgaacaggatgctcaacattgaatgtgtcaagcggacatgtccatgtggagaacaatgctctaatcagaagttccagcggcgtagctatgcaaaactgagatggttccattctggcaagaaaggctatggattgcagttgcaagaagacgttactgaaggaagatttcttattgaatatgttggagaggtccttgacataacatcctatgaatcccgccaaagatattatgcttgcaaaggccagaaacatttctatttcatggctctaaatggtggtgaggtaattgatgcttgcactaagggaaacttgggccgattcatcaatcatagctgcagccctaactgttgcacagagaagtggatggtcaatggggaagtctgcattggaatatttgctttgaggagcatcaagaagggtgaagaattgacatttgattacaattatgttcgtgtatctggtgctgctcctcaaaaatgcttctgtggtactgccaaatgtcggggttacctgggtggagacatatcaattgtcgataccatcatcacccaagatgatacagaagcagatcattttgaacaaatggttgttgacaaagactccaaggagttgctgggtccaaatgagtctgattctgatggtagccacccaaatatttcagaacctgaattttctatccaaggggaagatttacatgattgctcagctgcaaaagtagaattagatctgcttgaaggaactagaggaacctcattagaaactagtgagcctgaacatcccttggaagcatggagcccaccagaagatgaagatgtcattcgtacgcctgtgcatgtgtcacggacatttgaaagttctctgcagaagttctcagtacatgacactcagtcatcagatcttttgcgtaagactgcaaattcaatggaaggatcaaaggctccaaatataacaaacggatcgacacttggttctgatttcaggggcaatctggtgcctactttcagacctgctgagagaaaaaacttaaaacaacataaaaatcagaaacgacaaccgtcttctccaattgacaatgaacatattttgggagttgaagggacactgaacagcctactggatgtggacggtggtatcagcaagcgaaaggatgctacaaagggatacttgaagctgctcgttgtgactgcagcagaagatggtagtgctgggggcacatccaaaagtctgagggatctttcgttgattcttgaggcacttctaaaaacaaaatcacattcggttctgttggatatcatcaataagaacggactgcaaatgcttcataatatattgaagcagagtagaggcatcttccaccggagacctattatacggaagcttctgaaggtacttgaatttctagctcagaaaggaattttgacatctgaacatataaatggaggtcctcggtttgctggagtcgaaagcttcagagacttgatgctgagtttaacaagacattcagacattcaggttcaacagattgctcggagcttccgtgatagatggatcccccctaataatgcaaggagtgaaccaacagaatatccacatacatcaacatttgtgcatgatatccagggaaccaatacagtctggagttctgctaggaggaaacgcaagagccgctgggactatcaacctgacgagcattataagatgccgggactaaaaatccaaaaagtttgttctggacatggtgaatttgatgttcagtttggctttatgaaaaataagttaaagaggaatcagggcgcaaacaactatcataatgatgttcttggcatggggagttcaacagagggtgaagatgatgaagcccctcctcctgggtttgagtcccagctggaccgtcggcctgcacaactttcaataggcagcgaggttgctccaggactttgcatggagaggtaccaatctagcttgagtatttcatatggggttcctgtaactcttgttcagcactttggaacccctgaatctgaaggaggccaatgccataaaaaatggaaagttgcacctggcgtgccttttagtccttttccaccattgcctccctatccgcgagggaatccttgcccctccacttcgtcttcccagatgtttcagcatgatggaataccccaagttaaacataacaattctggacaacggggaaggatcatgggccgagatgggagagtgcataggtcatggagaaatgagtcaagaacaaaatggcaataccatcatcaaggaaggagattttcgagcactcatcatagatttgaaagatccgaacctgcaagacctcaatagtgattaagggttcagggcagtgattggtaccaaccttgcagtttttgaacctcaagtagtggtggtatacatggtaattcctgcttgtcagaagtgtaacagaaactgtgtcaggctttaacgatgtttaaagagtgtaaatttcagttcattgggggtagagcgtatgctgcacataggccattttccagtgcagtgttactaattaatttggtcattgtttttctctctcccaatgagtatttttcataggaacattttttatttgatttaatcctttttacaggtgataaggataacca

SEQ ID NO: 128215 - DNA, 5961 bp, Zea Mays
ctctctgtcctacccttcccctatccgcctccgccgccctcgttcctcaacgcggcgacgaccgccgcctaccgcacgtcctagcccggcgccgcccctgactcccgcgtcccgcccgtcgccggagggaaacgggggccggtggcgcgggacccgacgactgcaacgcagcaggcattcgccgccacgcgggtcaccgagggttttgtaagcccggcttcggcggcgtgatcgggtgcggaggctgcggtgagggcattggatgttctagacccgtacgggaccctgctgacctcctgtcgcaatggaggagtctggcgcggccgtgcgcggcgaggaggatcgtgttgctgacgcccagcgcttggggccagcggaggtcgctctgtctactgccaccgcccctgaaccggtccatggattgggggatgccgcagtagaggtatgtcatgctccggaagctagattgtccacagagattggtgacgaagggagcaatttcgcgtttggattggtgactcctgtcgattgtgcttcttcctcccatcgaggaagaaggtttcagctaggacaggagaagggttcgagttcagagcagagggtcatggacatggatgaacggaaggaaggtagtttggctcctgcggcgtctgctgaaaatgctgctttgcagacctgtcatgaggtcaatgacaggctgtcgaataagacgataccttatcctccttgcagtgaagtggtatgttccaaggatgctggatgcctttatggcatgtttgataaaacggcagaagggagccagtttgagcatgtgggtttgacgggtgacggaggtgattgtcgtgccgtggtggaggtagtaaaggaaaccgtacaagatttactggctgctcgtaacggagcaaaatgtggttatgaaggtttgtcagtttcaatggaccatggcagcgagcaagagccacgtggcataggatctatcacgtttgctaacgatgagctgcagccaaatggtttggtatcggatattgaagctgtttcgaggccagctcatatagattcagttccttccattccagggagcattgatctttctttagatctaaaggcagggacgtgccatggggctgacagagcgatgcggaatgatgattttacccatgacagtggggacttgtcagacccagggaagcatcatttggagaaattgccatctggtgctgagggcctggcattaataactgatgctgttggcggatctgaccatttggaccaagggctcaatgcctgttatgctgctgctaatagctctgctaattttataagtaatgctaatgatggagaattacgaaacgaaaagctgacagcattgcacgtattcatacgtaggaatccaaaaagagctgtttcttcaagaagtcttaattccgagaagcaagatcaaataggcaaagggaacagtggctcacgcaaacctaaaaaagttgatattgtgagctcattacaccaaagcaccgtgaatatgttcccaaacaaaatcactaagggaagaagtggcatgaacaggccaccaaaatcctttacttggggcaatctagaacggctattagattgctgtccaagctacgggccatctacttctaattctcgtccaatttgcttggacaaaggaggatcatataacagatccgatcagagaagtcagccaagtatttggaaaagtcgaagttctagatcttcaagaagcaaacgctcttctttctctgaaatagggcatgcagctaatgaactggatgggcaaccaaccttagcaattgtggctgatatggggcatgctgctagtgaattgaatgagcaaccaaccttctcaattgcggctaatactgatatttgtttggaaagccacagaggaaacattccaaatttgtcttctgataaattgatcaatattcttgatagtactaggaaaactgcagagtctattgatagtcatcgtacagaatcaaaatgtatccagagccaaagagaaagagccttggtgagtagtggtaaagaaacatgcgctgcatacgtccacagagagtgtgctaaactgtcaacttctgaacttatggacaatgccaatggcaatgtcatgctacatgttgggttttcgccggattctgttttggagcttgcttctgttacatgtgaaggtaatgcttctgcaagccatgatgttatgttgcatgaaaacccaaccgatgctggtgcattgaatgatggtgatccatctgttttatctacttctgactatgaaaaagaacatgcttcatcattgatgaacttggagcagcatgctagaagtactttgcacgaggacaccagaaaggaagaggttggtccatctcatggcatagtagaaaatgatattgaaggaaaggcgcgggctttacagaagtcaaattctgtgagaaaaattggtattgtcagaaaggcaggttgcaaaaagaaagatggatctaaaggtgtaaaaaagaatgttataggattcagcaaagcttctccatgtgaatcttcaaaacttaggccctctaatgatccaatttcacctgggcctccagatgttgggtcttgctttgaagccttaacttcaggctcacaggatcttggtatgcatgaacatggtggcatacagagtcactctgtaatgcatggtgacaaagggcatgcatttgacagtatgaaatcaccaaggcacaagataaaggatactaatgcaagaaagaaaggtaaggtgcgagacccacataagaaagaaaaaggtgatcttgatcctatcactgaacttccattcaagaactccagtgccatatctactaatttacctggaaatgttgcatgcaaaatggatggggcatctgtaccgccactgccaccacgtgctgcatgggtgtgttgtgatgattgccaaaagtggcggacttgtaaggacaatggagacaagacgttcgctgactgttctattccacaagagaaatcaaacgctgagattaatgcagaactcgatctttcagatgcttcagctgatgaagcagacaatggtggatctaactccaaagcttgcaaaccaccgtcatggactcttgttaggtcaaacttgtttctgcatcgaaaccgcaggacacaatccattgatgagagcatggtgtgcaactgcaagccaccccaagatggccgaatgggttgtagagatggatgtttgaacaggatgctcaacattgaatgtgtcaagcggacatgtccatgtggagaacaatgctctaatcagaagttccagcggcgtagctatgcaaaactgagatggttccattctggcaagaaaggctatggattgcagttgcaagaagacgttactgaaggaagatttcttattgaatatgttggagaggtccttgacataacatcctatgaatcccgccaaagatattatgcttgcaaaggccagaaacatttctatttcatggctctaaatggtggtgaggtaattgatgcttgcactaagggaaacttgggccgattcatcaatcatagctgcagccctaactgttgcacagagaagtggatggtcaatggggaagtctgcattggaatatttgctttgaggagcatcaagaagggtgaagaattgacatttgattacaattatgttcgtgtatctggtgctgctcctcaaaaatgcttctgtggtactgccaaatgtcggggttacctgggtggagacatatcaattgtcgataccatcatcacccaagatgatacagaagcagatcattttgaacaaatggttgttgacaaagactccaaggagttgctgggtccaaatgagtctgattctgatggtagccacccaaatatttcagaacctgaattttctatccaaggggaagatttacatgattgctcagctgcaaaagtagaattagatctgcttgaaggaactagaggaacctcattagaaactagtgagcctgaacatcccttggaagcatggagcccaccagaagatgaagatgtcattcgtacgcctgtgcatgtgtcacggacatttgaaagttctctgcagaagttctcagtacatgacactcagtcatcagatcttttgcgtaagactgcaaattcaatggaaggatcaaaggctccaaatataacaaacggatcgacacttggttctgatttcaggggcaatctggtgcctactttcagacctgctgagagaaaaaacttaaaacaacataaaaatcagaaacgacaaccgtcttctccaattgacaatgaacatattttgggagttgaagggacactgaacagcctactggatgtggacggtggtatcagcaagcgaaaggatgctacaaagggatacttgaagctgctcgttgtgactgcagcagaagatggtagtgctgggggcacatccaaaagtctgagggatctttcgttgattcttgaggcacttctaaaaacaaaatcacattcggttctgttggatatcatcaataagaacggactgcaaatgcttcataatatattgaagcagagtagaggcatcttccaccggagacctattatacggaagcttctgaaggtacttgaatttctagctcagaaaggaattttgacatctgaacatataaatggaggtcctcggtttgctggagtcgaaagcttcagagacttgatgctgagtttaacaagacattcagacattcaggttcaacagattgctcggagcttccgtgatagatggatcccccctaataatgcaaggagtgaaccaacagaatatccacatacatcaacatttgtgcatgatatccagggaaccaatacagtctggagttctgctaggaggaaacgcaagagccgctgggactatcaacctgacgagcattataagatgccgggactaaaaatccaaaaagtttgttctggacatggtgaatttgatgttcagtttggctttatgaaaaataagttaaagaggaatcagggcgcaaacaactatcataatgatgttcttggcatggggagttcaacagagggtgaagatgatgaagcccctcctcctgggtttgagtcccagctggaccgtcggcctgcacaactttcaataggcagcgaggttgctccaggactttgcatggagaggtaccaatctagcttgagtatttcatatggggttcctgtaactcttgttcagcactttggaacccctgaatctgaaggaggccaatgccataaaaaatggaaagttgcacctggcgtgccttttagtccttttccaccattgcctccctatccgcgagggaatccttgcccctccacttcgtcttcccagatgtttcagcatgatggaataccccaagttaaacataacaattctggacaacggggaaggatcatgggccgagatgggagagtgcataggtcatggagaaatgagtcaagaacaaaatggcaataccatcatcaaggaaggagattttcgagcactcatcatagatttgaaagatccgaacctgcaagacctcaatagtgattaagggttcagggcagtgattggtaccaaccttgcagtttttgaacctcaagtagtggtggtatacatggtaattcctgcttgtcagaagtgtaacagaaactgtgtcaggctttaacgatgtttaaagagtgtaaatttcagttcattgggggtagagcgtatgctgcacataggccattttccagtgcagtgttactaattaatttggtcattgtttttctctctcccaatgagtatttttcataggaacattttttatttgatttaatcctttttacaggtgataaggataaccaagtttagcgacaatcctctgtagtctcgtttggttctttgccttttttccccttttgctttctcagtaaagcttctattttggc

SEQ ID NO: 128216 - DNA, 2340 bp, Zea Mays
gagcagtatataaaacagcatgctcacaggtcgtctttaaaagaagaagttacactttgtaacgagatgcaattttggctgtatattgttcagttcatcttgccactgaacgttactggcagtaactatacataatacggattttgttgtgtgttgttgagttgaatccagtagcggtttgagcaagaaggactgcatcgggaggtactacgccaaggatgccaccaagtacaggccgttcagcgcgctgctgcccgaggggggctggagcggcaaggtgctgtacgtcaagctcgtgctcgtcctcctcatgtgcggctccttcatgggcctcctcaactcgccgtccatccacctcgccgacgaacgccaccaccacgcgcagactgcagaggcgtggaatgcgagctggacgtcgcaccccgacgcggcgaactccgggtacgcgtcgagcctgaggatcgactggtcgcaggtccagacagcggcgaagcaggtcgctccgccggcgggcggcggcgccacgcgtgtggcgctgctcaacttcgacgacggcgaggtccaggagtggaaggcgcggatgccgcacacggacgcctccacggtgcgcctggaccacgtcgggagcgacgtcacctgggaccacctgtacccggagtggatcgacgaggaggagcactacggcgcgccggcgtgcccggacctgccggagcctaaggtggccaaggaggaggaggcgtacgacgtcgtcgcggtcaagctgccttgcgggcgcgcggcgagctggtccaaggacgtggcgcgcctgcacctgcagctggccgcggcgcgtctcgcggccgcgcgcgcgccccgcggcggcggcgggcaggcggcgcacgtgctcgtggtcagccggtgcttcccgacgcccaacctgttcaggtgccgggacgaggtggcgcgccacggcgacgtgtggctgtacaggccggacgtgggcgacctcacccggaagctggagctccccgtggggtcctgcaagctggccatgccatccaaagcgctaggcgaacattacgcgtcggcggcgccgcagcgcgaggcgtacgccacgatcctccactcggagcagctgtacgcgtgcggcgccgtcacggcggcgcggagcatccggatggcggggtccgggcgggacatggtggccctggtggacgagacgatcagcgcgcggcaccgcgccgccctggaggcggccgggtggaaggtgcggacgatccggcgcatccgcaacccgcgggcgtcgcgggacgcgtacaacgagtggaactacagcaagttctggctctggacgctcacggagtacgaccgggtcatcttcctggacgccgacctgctggtgcagcgccccatggagcctctgttcgcgatgcccgaggtgagcgccacggggaaccacggcgcctacttcaactcgggcgtcatggtcgtggagccctgcaactgcacgttccgcctgctggcggaccacgtcggcgacatcgattcgtacaacggcggcgaccaggggtacctcaacgaggtgttctcgtggtggcaccgcctgccgtcgcacgccaactacatgaagcacttctgggagggggacacggaggagcgcgccgcggccaagcgccgcgtgctggcggccgacccgcccatcgcgctcgccgtgcacttcgtcggcctcaaaccctggttctgcttccgggactacgactgcaactggaacgtgccggcgctgcgccagttcgccagcgacgaggcgcacgcgcgctggtggaaggtgcacgacgccatgccgcggcgcctccaggggttctgcctgctggacgagcggcagaaggcgctgctgtggtgggacgtcgcgcgggcgagggaggccaacttctccgacgcccactggagcgtccggatcgccgacccacgccggagtatctgcgccggcggcgacgccgaggcctgccgcgagagggagatcgccggccgccgggtggaagggaaccggatcaccacgtcgtacgccaagctaattgacaatttctgaattcagacggcagtaatagcgtcatattcatcccggccgtcggcggctggtcatccaacggcgcgtcacgcgtgctcgtgcctagcgagaagctttcgaattttggtgctatccaccatccacatccatggccatcagtattgacctaagatggtagagtgagatgatgttagcgtaaaaaacagaaactacacactaatatatctatgagatagtacgattcacatgagttgcgaccgcatacacacaaataaatattacactttattcccgtc

SEQ ID NO: 128217 - DNA, 2173 bp, Zea Mays
tcagactcaccatcgtagtggggaaaggagacattgggtcttcgatagccaccatcgtcgacgcggtcacgaggagcagatcctgtgctatcgtgatccgctgtccatgcagatcgagtcgtgtgcggatccatttgtctatcctggagcaagaactgtgccacccgatgcacataagcgcacggcagaagaaaagcaccttctttcatgtagtgctccgcctccgcgtgagcaccaaaagttttttgaggtgcctgtcaccaatgccagaaaagttcatttacaaagctacgaagctgcaaccagtgggactactttgcgtggtagaatgtttcataaaaatacacgtgcaagaacaaggagtctttccccaggcccaagagggcatgattttgcttccagttttgcaagtccaagagacgttggagttagttcaaggtcagtggttaaaaggatggatgatctgaacagtcggtcccaaccctttttcgcgagcagtctgtctcaacccttgcctcgtcctccagctcatattgctagttgtctcattccttcatctcccattgcttctgcccaatctcaatcacagtggaaaaaggggaaggcgttaggtagcggcacatttggtcaggtttacgttggattcaacagtgaaagcgggaagttttgtgcaataaaggaggtaaaagttattttggatgattcaaagtcaaaagaacgcctcagacaattgaatcaggaagtagatatgcttaggcaactaacacaccaaaacattgtgcaatactatggaagtgaactgactgatgaggcactgtccatctatcttgagtatgtttctggaggttcaattgataaattgcttaaatactatggtccttttaaggaacctgtgattcgtaattatacgaggcagattctttctggacttgcctacttgcatggtaggaaaactgtgcacagagacgtaaaaggagcaaacgtacttgttggcccaaatggcgaagtcaaacttgctgattttggcatggctaaacatataacatctttagccgaaatacactcattgagaggaagcccatactggatggctcctgaggttataatgaataaaaatgggtacagttttgaagttgatatctggagccttgggtgcacaattattgaaatgggaactgggagacatccttggcatcagtatgaacatgtacacgcaatgtttaagatagtaaacactaaggatatgccagaaatcccagagagactttctaaagaagggaaagatttccttagtttgtgcttaaaacgtgatccggcacagcgcccatctgcaactcagttgctgcgccatccttttgttcaagacaatcaggaaatcagtggggccaaatgcaacaccactttgagaaatggactatcttcgcctgcagaggcatgtcataaaaaatccaacaaagaaccttcattgaagagaagtgttgctcctctgcgggacattggagggataagagcgcgaggttttacgggatcttcctcagcatgcgtttcaccccacaaaacttccaggcacagtaacctgcatttactgaccatccttctttccggttcatcccatcacacccagtaccttgacttctgccatcatccatcctgcagcaggcatattgatgtgagagcaaacatgtctctcccggtgtctccatgctcaagcccgttacgccagctgaagcaatggaactggagctgcgttgcttccccatcacatctggcattctcctcgggatctgtggcccacaacacagtcagtgacatgcagaaccagatgagaggaagcgacccagttccagatccatggcgcgacatcagccacagacgacaaagcccatatgactccccaaagagattctgattatgatccgtacagctgtaggagactatcacttatcggtattttcacggcaaagttaggtgatctaggagatgtttgcgttgaaaaatcctcggtaactaggaatcctcatgatctgatctattgtgtacgtagatgataaaggtgtagctgatgattgtaaactatgtgcaggtgttgtaaatgctcattgtacatcctgtatagattaaatatgacgatgcaggtgttgtaaatggtcatataaataaagtaatagaaaat

SEQ ID NO: 128218 - DNA, 2035 bp, Zea Mays
tgaattcttgatccactatttcgaggagaaagagggagagagatgactagctgtagttgaagccttgcaggtccaccgtcacctcgcgccgcccggcgagtcgcaggcatttgtttaagggaagggattctcttccgccgcggctgcctctgcctggctggctgcgtcgccacaccccgcgcacatcgcgctgcccagctctgctgctgctgccgctgcgtgcgcatcactggaaagatgggcctgtggggacgggctccttctttccttcaccgcgccatgaatgatgcgccttttctctgctgctttgcttccatctggctcagctctgtgcctctgtcgcccttctccttcctctcggtgtcccctctgtcggtccatgctcgtctgctggctcctgcttgttgcttaggcgttcttggtcaggtgagcagcactggcggcgatggcgaaggagacggagtactacgacgttctcggcgtctgccccgccgcatccgacgaagagatccgcaaggcctactacatcaaggcgagacaggtgcatcctgacaagaatcccaacgacccacacgcggccgagaacttccaggctcttggagaggcttaccaggtgctgagtgaccctctgcagaggaaggcctatgacggctatggcaagaacagcgtatctagggagaacatactggatggtactgtggtgtttacccttcttttcgggagcgagctgttcgaggactacattggccatcttgcaatggcaacaatggcttcctccgagttgacaagcgataacgacacccccgaaaagcttcaggataggctcaagaatgtacaaagggaaagagaagaaaagctagctagattcctcaaggaattcctctctcagtatgttcgtggagacaaagaaggatttgctaatcgtgccgaagctgaggcaaagaagctctcatgcacttcatctgggttggatattcttcgcaccattggatatgtctattctcgacaggcagcaaaggagcttggcaagaaggccatgtacctaggagtgccattcgtagccgagtgggtcaggaacaagggtcatctgtggaagtcacagatcaccgcagcgaaaggggccttgcagctgttgcagttgcaagaggaggcctgccggcagagtagcaaggatggcaatgccaccgagcaggatgtcgacttgcagatgaggatgaacaaggacctgatgatgagctcactgtggaagctgaatgttgtggatattgaaatgactctgttgcatgtttgtgaaatggtgctgtctgaaaacaatgtcaagaaagatgatctgaaggcccgagcaacggccttgaaatttcttgggaaaatatttatgagggaaaaggaggcattgccagggccagcaccagcgccaggtccatcaggaccgtcgaaacgaacggttcttgacgacgacagcagctcagatgacagttcagatgatgacctgactcggacagcgccataccggactcctgcatttacccagggaatcggcaggctgttccgatgcttatgcaatccggcttatgatgttgatgatgattttgagccccacaaatgagtcctaaagaggaaggtaccaataccaatggattttccaaaggttggtgacttttgtcaagcgtatgattcagaacagtgtgaattcggatcatacgttgtgatcctttgcttgccttgaggatacacgtgtagatgctatttcatctctggtgaccagaccaacagctcagagatcctcatttttttcctcccatgaacagtagacctcctctccgctttttttaataaatagatccaactgaatcttgttgagcttatgtaatcgcttgctattgttgttgtcaaaaacacaaagaagtgaaagaacaagtgcctgtaaaaatccatttctgatcctgaatcgggaattcagtgtgatgaacatcaactttttgatcctgttgccggcgtattgcctgcattctgtctgcaaatagtttgcaagttc

SEQ ID NO: 128219 - DNA, 761 bp, Zea Mays
atggcctgccccgtggccacgtcgttcacgtacacgacgcaggccacgcgcatgcggtgcgtccacacctcggcggccagcacgttgcactggaggtcggcgaggaccgcgaagatctccgagaggaggcccctcctgtcgggccccttgagctcgatggcggtgtggtcgccgatggagtgcagccccaccgacctccccgctgagttgctgccctttgcgcccagcaaattgctctccggacctaaagccttctcaatgtacttgatggtcttgtcatcagtgatcttctgcccttgcttatcaacgacatggaacacatccatgaaccacccaccatcagaggtgatgtaggctttgaagatgtgaaggtccagatcgctcaggacctgcagcacctccagcagaatgccattcttgttcatgctgtcaacctgcatcaaggtgcagtcgctgcatgtggtgttgtcgatgcaaacccttggggggttgatgcgctggttgaagttctcgtactccggatcaaagtagggcagcatcttcggacggagcccgtgcgcggatccttccactcgtgtcgtctcgtctgcccgatcctttgcggcggcgccggcgccggcgcttccgatcgatcgaccgccttccttcctccttcctcctccctctgccggaatcctgcttctgcttgcttgcttgctcggttccgatgccctgttccagtcaccagctctccgtgtgcccaccacttgatgccgctatag

SEQ ID NO: 128220 - DNA, 109 bp, Zea Mays
aaaatttatatatatctaatttaggtcgtgaagtctcgtggtgttatgacatgttgtttgatttacggtgtcgtgtcatgtgtataaattttatgctttgtttgatttg

SEQ ID NO: 128221 - DNA, 3390 bp, Zea Mays
taggagaacacgaggcaacacatgaacacacacactcgcatcagagacttacgagtttttccctctctcgtccagcttgtaactcctactgcccagcttgtaactcctactacaagcaatatagtgccgctagcataagctaacaagactgtagtagtgacatttcgttcaaaccagtataatccttgtgtcctacttgcacaccatctcggccttaaaacgtgtagcacaagtttactagtcagacactcactcgaaacatcgacaattgttggttcacttgatcatcaactaagataatcttggtcagagaagcatcatgccttggagtggactaatctaacttcgttcaattttgacttcgcttctcggcgaagtatatcttgtggcttcgcttgatcaccgacaaagaggaagatttgacttcaatctctgctttgagtcttcgtgttcaggtgaagtaaccattcgccttcgccatattatttgtttcttttttgagcgaagatactcctgaaaatgtatatcaagtaaagagtagataattgttcttcaactccccggggactgtgtttatccaaagtcagagccccaacaggtaccatatacaatttaaactaaatcagaatctctgaaccttctaacgtagaattaccattctcaggaaacaatctttttttatgaaaagggaaagatcagctgacagcacagggcacatgaatattggattgtgaactcaaggaactcaaactggattggatcaaactcttgcaacttctgctgtgattgaagcctgacagattacaccatgacccaagacttggaacgttgaatcaactgcagatgattctctgggtaaacctcgttgagcacttgagctctcaaactggagattgaaaactctgcacgaacagaagcccttggctcgagctattttgcagtctcacaaagcttaacagagtgccacgaggatgctggtggcaagggagcgaacctcgcctaccatcaccatagcagtgtgccagcaatacaagagcaatgcttttatacatgggcagttccactcaagtctaaacaaaaattaagctggtgttcagtaggatcctctgctacgctcatatggtcgagaagcttccccaacatctcatatatcttgtctgcctcgcaatgagagatgtcatcagcaacgaatacatgctttgcactccgcacctcaatccaactgtaagcctgatccttcttaaggcccttctccttcatgagccccctgactcgacgtgcatcatcccactgtcctgcagctgcatagatgtttgacatcatgacataccgaccactgttcccaggctctaacctgaagagaaactctgccacttcttctgcaagctcgatatttccatgaaggcgacatgcacctaggagagctccccaggatccagctgtaccaggaccaatcctggatggcaaatctttgatgaactcagtcgcttcttccagctggtgattccgaccaagagcatcaatgaaggcagcatagtgttcagcccttggttcaacaccatggtcctccattgattcaagaacgagtcgtccattagatactagaccagaatggctgcaggccgtgaggacagcgaggaaagtgacatgagttggacgaactccagctaccagcatctcctcaaaaatagcaagtgactgctttccgaggccattatgtgagaaccccgtgaccattgagttccaagagataaagtccctctcaggcatccagtcaaatactgccatcgcagccatcatgtctccacacttagagtacatgtcaacgagtgcattgtggatgaaaatgttgaaagggacagagccaatgttccggcgtaagatgaagcagtgcaattccttcccacgtgtgacaagtccaagtttggcacatgcacccaaagctgacaccaagacaaaaggcgttggtgatactcccttggccagcatctgttcgaaaagctcaagagcggtgtcctcctctccattctgctcatgcccagatatcagcgctgtccatgcaatcctatccttatctggcatcatatcgaacacctgcactgcctcatggagcttcttcacttggcagtacccagaaatcatcgacgtccaagtgacattgtctcggatgctgacctgatcgaacaaatgcctcgcatcttccaccctccgagccttgctgtaggcgttcaacatggcattggccatgatgacggtgaactccatccctgataccactaccgcaccgtgcatttcccgcagcggcctcgcagctccgattcccgcacatgcagtcgccacgctgaccaccgtgaaccgatccatggctaaacctggccccaagaacctgtccctggccagccgggcaacgacgcggagcgcctccacctgccggccgtggtgcgcaagggacgacatgagggtgttgtaggagacgaggttgcgtgagtcggccggcattgtgtcgaacaggcggaaggcgtcggggagggtgtccggcctgcgcaagagcgcagcgagaagcgtgttgtaggagtgcgcgttcttgtgtggaaggtcgtagaaggccttgacggcagcggccggcgacgggagcgaggagtagagcgcgacgagacgatttgataggagcgtatggctggtgagcgccgtcttgacgaggtgcgcgtgcaccgcgcggccgagatggagcacgtcccccattgagatggcccgttccaggagaggaatcaactccgggatggcgagggcgcttccgccgccggcggttggaggaggtgctgggaggcatggcggcgggtggacagcgagcggcgggagaaggcggcgcatgcgttcccgactcgacggcagcatatgcgctcacagacgctgaagctatttactgggccgtgtatgatagcgggcctttgggccaatcaagcgggccaagtgggtatgtgaaggcgaacaagctcagcagcgttcgagttgttgcgaattgcaattgcagaacggaattccattccagaaccatccttcgctcgcccccgccgccgcgctgccgcggccatatacggcgaaagccctattcgtgcccgcggccgtggatagataggtcagtgacgattgagaaacccgtagtcggagcagaggaggggtagaggatggtgttcggtcaggtggtgatcggcccgccgggctccggcaagaccacctactgcaacggcatgtcgcagttcctctccctcctcggcaggaaagttgcggttgtcaatttggaccctgcaaatgacgcattgccgtatccttgactctttgagcaccacattttttcctctgtactcactctctccctatcaaaaaaaaaaa

SEQ ID NO: 128222 - DNA, 2138 bp, Zea Mays
cgagttgttgcgaattgcaattgcagaacggaattccattccagaaccatccttcgctcgcccccgccgccgcgctgccgcggccatatacggcgaaagccctattcgtgcccgcggccgtggatagataggtcagtgacgattgagaaacccgtagtcggagcagaggaggggtagaggatggtgttcggtcaggtggtgatcggcccgccgggctccggcaagaccacctactgcaacggcatgtcgcagttcctctccctcctcggcaggtaagtacgccgtttagttcctcaccgttgctttggctgcccctcaagctgctctagttaagtcgaacacgcttgaccttgatttgacccgctgcgtgatgccgtgattcgattagtagttgcttcggttgcccctcacaagctgatctaggactctaggtaagtggaatacgcttgaccttgacttgacccgctgcgtgattcgattagggtaagtggaataccttcctctgctaaggttgatcgagaatgttagctgataccatattgcttgtagcagaagttgtgccgagagtttaaacttcacccttggctttgttttggttggactaaagctgaagttgataatttgctcacacggatggcttctttatgtgttttccttgtggcaggaaagttgcggttgtcaatttggaccctgcaaatgacgcattgccatatgagtgtgccataaacatcgaggacctcataaaactcagtgatgtcatgtctgagcattcgcttggccctaatggagggcttgtgtattgcatggattacttggagaagaatattgattggcttgaagaaaaactgaagccttttattgaagatcactatctgttatttgattttcctggtcaagtggaattgttcttccttcactcaaatgccagaagtgttattaataaactcatcaaaaagatggacttgaggcttactgctgttcaccttattgatgcccatttatgctgtgatcctggaaagtatgtcagtgctttgcttctttcactatcaacgatgctacacttggaattgccacatatcaatgtcttgtcaaagattgacctcattgagaactatggaaatttagcattcaaccttgacttctacactgatgtccaagatctttcttatttgcaatatcatcttgagcaggatccccgctcagccaagtacaggaaactgactaaggagctctgtgatgtgattgatgattttggtttagtcaatttttcaactttggacatccaggacaaggaaagtgttggcaatcttgtgaagctgattgacaagagcaacggatatatattttcttctattgacagtagtgctgttgagttcagcaaaattgcagcggcgcctcttgattgggactactacagaacagcggaagtgcaggagaagtacatgaaagatgatgagtttgcgcaactgacaagcaggatgcaatgaggctggcggtgccgtcccgcacccccactttggtagcactacgggtgaaccacgacagtgtggcacgttgaacttcggttgccagaacgatgtgaaacctgtctaaattcatgtagctcagttgtaggtgtttactgaagctgattgctgtagttgcctgatcttctgggagtaccctttgggcagtaaaaaaatgcacttgtcaccggtgaccaaccggtcatgtcctgttttgtttgttcgcttcaacctaactgttcgactgcttgtttgaactgctgcagctataatctttagagacaaaacattgtagtgtttggactactgcagttgtaatctttagaagcgaatttttagaaaaaaaaacagaattttgaactttgtcaacattcaaaattaggttagcttaaattggatgttgatatgacgtgccatgatgtaacgtactaataaaagtttaggggtccatgacactaaatgctaagtttagggcttattctcttttttgtgaggggctgcaaatagcctggtttgcagtcgggctgcaacaatttttttcctgtaatatagcatgtcaagtttaaagacttaataccaagttcgaggatccatggcatatagcatgccaagttaggagacctaatatcaaga

SEQ ID NO: 128223 - DNA, 1567 bp, Zea Mays
gttgcgaattgcaattgcagaacggaattccattccagaaccatccttcgctcgcccccgccgccgcgctgccgcggccatatacggcgaaagccctattcgtgcccgcggccgtggatagataggtcagtgacgattgagaaacccgtagtcggagcagaggaggggtagaggatggtgttcggtcaggtggtgatcggcccgccgggctccggcaagaccacctactgcaacggcatgtcgcagttcctctccctcctcggcaggaaagttgcggttgtcaatttggaccctgcaaatgacgcattgccatatgagtgtgccataaacatcgaggacctcataaaactcagtgatgtcatgtctgagcattcgcttggccctaatggagggcttgtgtattgcatggattacttggagaagaatattgattggcttgaagaaaaactgaagccttttattgaagatcactatctgttatttgattttcctggtcaagtggaattgttcttccttcactcaaatgccagaagtgttattaataaactcatcaaaaagatggacttgaggcttactgctgttcaccttattgatgcccatttatgctgtgatcctggaaagtatgtcagtgctttgcttctttcactatcaacgatgctacacttggaattgccacatatcaatgtcttgtcaaagattgacctcattgagaactatggaaatttagcattcaaccttgacttctacactgatgtccaagatctttcttatttgcaatatcatcttgagcaggatccccgctcagccaagtacaggaaactgactaaggagctctgtgatgtgattgatgattttggtttagtcaatttttcaactttggacatccaggacaaggaaagtgttggcaatcttgtgaagctgattgacaagagcaacggatatatattttcttctattgacagtagtgctgttgagttcagcaaaattgcagcggcgcctcttgattgggactactacagaacagcggaagtgcaggagaagtacatgaaagatgatgagtttgcgcaactgacaagcaggatgcaatgaggctggcggtgccgtcccgcacccccactttggtagcactacgggtgaaccacgacagtgtggcacgttgaacttcggttgccagaacgatgtgaaacctgtctaaattcatgtagctcagttgtaggtgtttactgaagctgattgctgtagttgcctgatcttctgggagtaccctttgggcagtaaaaaaatgcacttgtcaccggtgaccaaccggtcatgtcctgttttgtttgttcgcttcaacctaactgttcgactgcttgtttgaactgctgcagctataatctttagagacaaaacattgtagtgtttggactactgcagttgtaatctttagaagcggtagaaaccggtatgaattaaagccaaacgaataggcttagccttttaggggaacttcctctataaaaaaatataaaaatataaatcttgttcttagaagtcaaagaaacttatagaaaaaatataaata

SEQ ID NO: 128224 - DNA, 771 bp, Zea Mays
aggtataatatactgacaatatggagtaagcattagactttctttgcagatgatgcatctgcatgccattaaattttgcagcaagcatgtggtgaatagatcgcaagccaaaccacgcgaaattgcagccaagtatgttgttttatcaccagcttactattgctaagtcgagttgtgaaatctggagtaatatttctctgttacgtatgtggtatgccttagaatatatgctgttgcaccaatatcttgcaaattgtctttctttccttgacgtgtggatacaacagcggaagtgcaggagaagtacatgaaagatgatgagtttgcgcaactgacaagcaggatgcaatgaggctggcggtgccgtcccgcacccccactttggtagcactacgggtgaaccacgacagtgtggcacgttgaacttcggttgccagaacgatgtgaaacctgtctaaattcatgtagctcagttgtaggtgtttactgaagctgattgctgtagttgcctgatcttctgggagtaccctttgggcagtaaaaaaatgcacttgtcaccggtgaccaaccggtcatgtcctgttttgtttgttcgcttcaacctaactgttcgactgcttgtttgaactgctgcagctataatctttagagacaaaacattgtagtgtttggactactgcagttgtaatctttagaagcggtagaaaccggtatgaattaaagccaaacgaataggcttagccttttaggggaacttcctctataaaaaaa

SEQ ID NO: 128225 - DNA, 447 bp, Zea Mays
ctggtggttctccctgaactcccggtgccgctctgcggccaacttctcgatctcctcggtgtaaggtgcaaccttcaccatggtcagcagaacccggctgtaccgaaagctcaggatctgctcagaggaggtgattaacttgaagcaggggtgctcagggaactgcgggttcgcagtgccatcttcacctcgcagtacagggtagaagaagacgagcctgccacccatgactaccatccttgcggcaaggtggaggaggtcatggacgcactctgcgaggctatatggggcggttgatgggatgtgattgtcccgtttctcatcaggcactgtgtaagggcctttgacgccttttatgagcttccgaccaccagacttccggccaccggcccggactccatatggtgggtcacaaattattgcatcgaacatctgattgatgacaag

SEQ ID NO: 128226 - DNA, 3097 bp, Zea Mays
attctttcactcactctccagatccggtgcttgtgggagcctaacacgccccccgcctccctctccgccgtcgccgagtccctcgccggcttaccccgtcgctggcgaaggcactccggcgtggacgcctcgccgccccgcgggcggcgtcgacggtcggttttaggcctcccggaggctgcatcccgtgtcgattcgaggtgatttaggggcgatcttggccctaggcgtgagatctcaccagctccggcactggtgccttgcacagctccatggcaagaacacaggggtcttgaaactggaacaggccccaaagtcacagtccacgctcgcctcttcggtcccattggagaatcatgttaacctccatgacgctactggcgcctgccaagcgttcgacgaaattccccacaaggacaccctggactatgcccttctcgacgacatggcagggtttcgtccaccaggcgctagaccacttcttggatgcgcaccgccgccagggcaggtgtgttggcggtggggcactgttaggcatcatcaaaatctgtgggtcagtgccagacagagtactggggaagcagctgcatgccctgtgcgtcaggtgtggacatgatcatggcgacatcagggtcggcacgtctcttgttgacatgtacatgaactggcacagtgttctggacggcaggaaggtgtttgagggaatgctcaagaggaatgttgtcacctggacatcgttgctcactgggtacatccaggctggagtgttattggatgttatgtcactcttcttcaggatgcgtgctgagggggtctggcccaatccgttcacattttcgagtgttctctcaatggtggcgagccagggtatggttgatcttgggcagcacgtgcatgctcaatcaattaagtttggttgctgctccactgtgtttgtgtgcaattctctgatgaacatgtatgcaaagtgtggactggttgaagaggccagggtcgtgttttgtaggatggagaccagggacatggtgtcgtggaacacattgatggcgggccttgtgttgaacgggcgtgatcttgaagccctacaactgttccatgattcacgatccagtattacaatgcttacagagtcaacatactcaacagtgatcaacttatgcgcaaatcttaaacaccttggcctggcacgtcaactccacagtagtgttcttaaacatggttttcattcgtatggcaatgtaatgacagccctcatggatgcctacaacaaagcaggtcaactggataaggctctggatgtatttttgttgatgtcaggatctcagaatgttgtttcatggactgctatgattgatgggtgcattcagaacggtgatatacctcttgctgctgctctttttagcagaatgagagaagatggtgttgctccgaatgatttaacctactcgacaattctgacagtgtcagaggccagctttcctccccaaattcatgcccaggtgatcaagacaaactatgagtgtacaccaactgttggaactgcacttatggtctcttactctaagctttgcagcactgaagaagctctttctatattcaaaatgattgaccagaaagatgttgtttcatggtctgcaatgttgacttgctatgcgcaagctggtgattgcaatggtgccacaaatgcattcatcaagatgaccatgcatggcttgaagccaaatgagtttacaatctctagtgctattgatgcttgtgctagtccggcagctggagttgacctgggtaggcagttccatgctatttctatcaagcacagatgccatgatgcactctgtgtgagcagtgcacttgttagtatgtatgcaagaaaaggaagcatcgagaatgctcagtgtgtctttgagaggcaaacagatagagatttgctgtcatggaactcaatgctatcagggtacgcacaacatggttacagccaaaaggcccttgatgtatttcgacagatggaagttgagggcattgatatggatggtcttacattcctttctgtgattatgggatgcgctcatgctggtcttgttgaagaaggtcagcaatactttgatttgatggtcagagactacgggatcactccaacgatggatcattatgcatgcatggttgatctctatagccgcgcaggcaagctggatgaaacaatgagcctcattgaaggcatgccattcccagcaggtccaacaatatggcgcgcattgctaggagcctgtagagttcacaagaatgttgagcttggaaagttggctgcggagaagctgctgtcacttgaacctcttgactcagctacgtacgtacttctctccaacatttattcggctgcagggaagtggaaagagaaggatgaagtgaggaagctaatggacactaaaaaggttaggaaagaagctggatgcagctggattcagatcaagaacaaagttcatttctttatagcttcagacaagtcgcatcctttatcagaacaaatatatgcaaagctcagggcaatgacagctaagttaaagcaagaaggttattgtcctgatacaagctttgtgcctcatgatgtggcagaagaccagaaagaagctatgctggcaatgcacagtgagcgcctagccctcgcatttggtttgatagctacaccaccagcggcaccccttcacattttcaagaacctgcgggtgtccggggacggccacacagtgatgaaaatggtctctgaaattgaggatagggagattgtaatgcgagattgctgcaggttccaccacttcaaatcaggggtctgctcttgtggcgatttctggtgaatggattttgaaaaaaaatggttgtgcattcaatgctcagccagtgtcccccttgaacaatatcactggtaagttggcttctagatgttttattgcctttcgtctgtcaggttggatgttattcctaacagaaaaggagtgagttagcacttattccaggtaatattcagatatcttagattccgacatgtaacattgcactaatcactcagcatcagggaatagtcaatcagtagcaacaggtagta

SEQ ID NO: 128227 - DNA, 539 bp, Zea Mays
ccacacgcacaccccgccgtcccgtgctcccggccgccaccgcacacacgcacaggccacaggcgcaccgcgcagcgcgcacagcacagcagccgagcagcgcttggacgagcacgaacgccggtcaccggctcaccgctggcactggggccgtcatgattctgcacttctgcttcttggtctcttggatcttggtagtgcagcggccggccaggggatctttcggggatggactttgctgatttgagatgaaggcctgatttcacgaggaagatttacgttgttgttgccctcacggtcatgtgcataatcatgcagttcagcatacaagggcaaaagaaccttatggggccgcacttcagtatttgaaaatgttttgtatagttctataaattagtatcggtagcatagtcttacaattttatgcaaaccagtaattagtttcgcaggcagtctgtaacaattatcaaaagatcacctttgcaattagaggcatttgagaagtgtgctaaagaatgtgaatatgtattgcttaattt

SEQ ID NO: 128228 - DNA, 390 bp, Zea Mays
atggagcagggagaggcgtcgaccacggcaggaatggggagtggagactgggcggccatggacaccgaaggggcgagctccaaccaggacacagggaaacgtgcttggcagctcgcgcgcacagagagaaattcgagctggggcgagcagcacagcaagaggggtgagctcaggaggacggacgccatgggaggaccttgggcgcggccatggaaccagaggagctcggaagagagagagagcacggcagagagctcacggcggccatggcgtttggggccgggcagaggagagagagatgggcgctgggagagagaagcaaaagagatggggcggctggtatatgcggcagtgagaggaggaagaagatgtgctctacggttgaaatag

SEQ ID NO: 128229 - DNA, 413 bp, Zea Mays
atggagcagggagaggcgtcgaccacggcaggaatggggagtggagactgggcggccatggacaccgaaggggcgagctccaaccaggacacagggaaacgtgcttggcagctcgcgcgcacagagagaaattcgagctggggcgagcagcacagcaagaggggtgagctcaggaggacggacgccatgggaggaccttgggcgcggccatggaaccagaggagctcggaagagagagagagcacggcagagagctcacggcggccatggcgtttggggccgggcagaggagagagagatgggcgctgggagagagaagcaaaagagatggggcggctggtatatgcggcagtgagaggaggaagaagatgtgctctacggttgaaatagagaggagaaatatctgcacaaca

SEQ ID NO: 128230 - DNA, 1245 bp, Zea Mays
cccaggcggtccagcgccgccgccggaatggagccggattccgatcagccaaaggctgccgcccgtgggggccaccgcaagcacctggccatgctcgagcgcctctccaagcgctcctcctcctcggtcggcgccccaccctcggactcctctgatgcctcccccgtcgaagccttcctctcccgcttcgccgacgccaagctcgccgcggagtcagcactctccgcctgccgctcctcctcccccgaagacgacgcggccgcatctctggcggctgctgcggccgccatcgatgacatcgatcgcctcatcgccgaggcgtcccatgcactgcccccctacgagctccgcgccgccctcgccaccgccgccgacctccgcgcggcacacagtgttgccgcctctgagctccgtcccaagaagtccttctccttcaggaacaagagcaggaatccgaggaacccgcctcaggatcgtgtcaccgcatcaccaccgcagccacctcctccggagcagccgaaacctagtcttgacgcgatcctaccagggttcgggttccggggcaggaacggcgccaccttcgtgaaggatctgcgagtctccaacgacaaggatggggatttcacgctcgcggatttggtttcctgcgaggtctatctcaagggcaaatgccgggcgctgtacatccataagctgagagattgccgtgtgttcgtcggggctgttcttggttctgttcttatagaagacgtagatggctgcatatttgtgatggcagcacaccagatcaggatccatgaggcgagggtgacggatttctacttgcgggtgaggagcaggcctatcattgaggactgcagtggtgtgagatttgcaccatatgttttgaattatgaagggattggagaagatttgaaggactccggacttgaggaggagactggtaattgggctaatgtggatgacttcaagtggctcaaggcagtgcagtcaccaaattggcggttagttccagaggaagaacggttgcaaactgtgaacatttcggagcttcataaacaggaagatgatagctgacaaggattgctgtcaggtctcattttggttttcttctctggattcattagtttatttgtggttgtggggataatgtttcggttgtttaaagttgattgcttgtaattgtaccaagagctttctgaattcacaatatgaagcttgaaacaatttggtgtcctaaacaag

SEQ ID NO: 128231 - DNA, 133 bp, Zea Mays
cttgtgtaccttactaaactttgtaagtttccagttaccctgtgtgagtgtgagcaacaacaatcaactactcctccgttctcgaatatttatcacttgttagttcatttttcggcggcaaataaaaaaaaga

SEQ ID NO: 128232 - DNA, 847 bp, Zea Mays
ttttgaaccctgagcttgttaaagagccatggttgaaagaagttagttctacatatctctggtttggatttatttcacttttcttgaaacaaacaaatgtcattttggttattttactgaattatattatataccacatgattcttttattatttcttttttttaaaaagtcggggccattactcagatggtaaacaaacttgggccaaagaaatggtcaaccttgcccaaactatacctggacgtattggaaagcaatgctgagaaagctatgccatgaaagatatttgtagcagtgttacatgatggcatcaagtgctgggcaaatatttattagtttgtggtttcacttctatggaatataggagtcatgattttatgcatttgatcggagaccacattaactagaggatactttcttttttcaagattacaaagacctatgtgccgctatacctgtttatctgaagacatatcacaaagaccataggttaatgcagtacacttgctccgttcttgtcatacataacattgctcaataggtcgtttccttctcatgaacttgggttgtgatcctgtagatgaattcccgtacatgaacttgcctcaagactaccttcaacattttgagttgtacgatcctgttagtgtcgagcaagccaatatctttgatgtgggtctgaagatggcagatcgagtggtgactgttagccgcggctacttgtgggagctgaagacagtggaaagcggtcggggcctccacgacatcattcgttctaacgactggaagattaatggcattgtgaacgacatcaatgcactcgacaacaatttttgtatcagttag

SEQ ID NO: 128233 - DNA, 2247 bp, Zea Mays
acgtacccacccacctgtgcacacagcgccgtcttctggagcagcgtccgaaagtgtgtggagaacctgcccgatccctcccgccgcctccgacctcaccgtcggcgggctcagcttgttcctggggtctgatcagccatgttcaagaaacctgttgatgtgaaaaccatacagcgcttgtctggggcagacaaaaagaagctaagaagaactgccaagggaaggtttccacaggcttctgatgctgaccttgatgccatccttcctcccaaggctgagataacagttgctaagtacccgaaccatgttcttgtatatggcatagagggagagttcccaatgattttcaacactgacgcaagaggtcatgaactgtttcctacagtttatgcgctttggaaggtcccccatctgttgccagcttttacgcttaaaggtggtgaggtttcacgtttcgtgattggtggcgctgatctgatgtttcctggtatcagcatacctccagaagggtttccatcttttgaagctggccaaccatgggcagtaaaagttcctggtaaccctgctgcaattgcggttgggagcacaactatgagtagtactgaagctttgaaggcaggactacgtggcaaggctttaaagattttacattactacagggatatgttatgggattcggctgatggttgttatgtccctaatgaaggattttttgatgacattgttgttgaagatcctaatcctgtttcaacatctcaggctcctgattctgctgaagaacctgaagtcacgaatgatggtagtgtttcggctgaagatgcaggagtcgatatttcagacaatcatggtacaaatcctggcatccagattgaagcagtggaagagataactgatgttgttaacgaactaaaacttcccgaagataaaactactgaacaagcacctgttgaaatggaacatcataatttgagaactgaggaaattgattctctcttggacaaatgccttctgcaagcgctatacacaagcataaaagaaaaagatcttccaatgccaggaagtacactatgggcaaatcacatactaccgaacagacctcctggtgttactattgatataaaaaagtcatcacacaaaaagttgtcgaagtggttacaatcaaaatcttcatctggccttatttcagcaaaggaggacaaatataagaaggaagttgtattgcttgctatcaatcacaagcatccagactacatggcctttagaccggaaaagagggtacaggagcttgttgaacacgaaaaggatgttgctgaaagtagtgtcactaagcaattggaggttgcagagatttataagccaagttctcatgttaaacccatatttgtggctgtcgaagctgacatggagaagtattacagtgcaccagaggcttcagatatagtcttcaggtacgtcgaaaaggaaaaattggttaaacctacagacagggccaaggtgattcttgatgttacattatgtgatgcattgtacaaaggggctatcaaaaagggctcggcatacccaactgaaatccacaagaaagacttaggttcagcattcttaaaccgcatgcaagttcaccacaaggtatcgagaggaactcaggaggtcatacgcaagggtgccataagaactatccagatcatgacagaaagaagacagggcaacaagaagatgactcggctttctgggctcgagtgtttcctgatggatcctgattcattggcttctgagctccagaaaaaatttgcttgcagcaccaccacagcagagcttccaggtaagaaagggcagtacgaggtcttggtacaaggtggagtgattgatgaccttgctaaacaccttgtcgaccattacgatgttcctaaaagatacatcgaggtttatgacaaaacaaagaggtaggaagtgggggctgatcatgtccgtttaggtgttggagcgcttggatggtctacgaaatgatcccaggattgtttcatgatactttttgtcatcacatgtctgagcaatattacgacattgttgatctacgagtaccttacgatatttgttttcgttcctgcctttggttgatggaaaatgctattgtgcttactgaagaaatatggttacaggatggataatgaggtttcctcatgcttttggtgctgcagcttttcatgtccagtctgtcatcttataaagataacaatttgtagttcgtgc

SEQ ID NO: 128234 - DNA, 1892 bp, Zea Mays
ggcttgttcgccaaattggcagctcgccacgttcttcttctctcaaccttcccctctttctctacttctcgtcccaactcccaagttgcaacccagccacctcgtctcctcccctccaactccaagcctactcccacccgatcccccctgccccgccccgggcgccgccggttctcgcattcgcggcagtccatctcgttgccccttcccggcggcctctgatccgtgctgctcgtcgcccacgcgaaacctgccgcctcccttgttgccgcgaccgcgagccctctcccctcccctcgcggccctgatctcagttccactgtgccccgaccgtgatccgtccgcacccgcttcatgcccagcagcgttcaacccgtcccctaaatgccgctgcctccaaatagttctccgtgtgctggttcttgcggattgcgctgtcaggtctacataatattgggggcggtgcagagtgtcctccgttttttcctctctcgcacctaaagttttcgggagcagttagttagagtatattcgattccccctgatatagtttgtttatttcacactacgaagtctatgcactcgagagaaaaatcactggtagcgacggcatcaattcttgtgacgtttagtagctagaacaccctcactagcgctcattcatgtttactcgaccttgtccttttcccttccatcttccgtgtgctggtatcaatttgttgtaatttggggagaccaggagttttctcgccttcttgcccttgttctgcccgtagtaagtgcttgccgtttggttgattggaactcccaagtgttcgtcggtcacatttatatagctttacctcactaggataatcataagcaaggtttccccaaaattcttagaccagttgggatcaggacccgaaggtagattgtgttggctatttgccggtagggcattgtgactccgtgatgtcttgcacctctccagatccaccagactactgctcagccgaatcgcctgagctcaagctataccaggccttcatcttctcggtgcctgtcttcttcacgttcgtcttgcttctcttcttctacctcttctacttgaggcggcgcagggccaattggcagtccttgcggatgaggacaaataatttgatacgaggagataatgccagactggagtgtggcttaaagaaggagatgcgggaaatgttgccagttgttatcttcaaagagagtttcttgatcagggagacacagtgctcggtctgcctagcagaatacgaaccggacgagaggcttcagaagatacctccctgtgggcataccttccacatcaactgtatcgaccactggctctccacaaacaccacctgccccctctgccgagtatcgctccttcccgcccccaaggcaaccagcaccggactggatctggaagcacagactgcggtagaagaggagtctccgaacgcacatcatcgccaggaggagggactcgttgatgccaacacaccacaggaaggtgaggcggccggaggtgacggatcaagtagcgtccaggttgaagaactgcacggcgatgcggccgagccattggcggtgacggtggtcgctgtcgctgcgcctcaggctgacgctgaaggttcaccgagtacagcatgccaaactgttaaagggaagaaataaggatagcctagcccatcgatgtatttctattaccattgtgtgtttagctgggaaaggaaaaaaacgcataaagatggggccattgatgttatgattgccatttttctggggaggaagaagaagagcaagagttcagttgtggggaaatcttattgatacagcacttaacataaccgagattagtagtacttgtgagctgtttttcatctggtaaa

SEQ ID NO: 128235 - DNA, 1386 bp, Zea Mays
cagggttaaaaaaaatcctcggtctgtccatgccaaatcacaagtttaaagtctggcctcggccatgatcattctcatgtgggctatagtaccgctgtatgtggaatgtggatggagcaagggttcagtggttttttcagtttgtgtgacaagttatctttaatgcaatactcaaggactgtcttacccccaacaggttgagtttattttaggagatcaatcaatagcctccataccggtattgcttgctactatttagataattgataggttgaaaaatctttcatcaaaccgtatcagtgaaagaatattgcaatggcaattgccaactcagttactcagtaacaaaaagggatccttccaaacacatgccctacctttctaatataggcagtggtagcgctagatttagcaatcagcgtgtaatagcatgtttgggttcagatatactgtctgtgaaataatcttttggacagatgttttggacatcttgatacctaaatcttatatgaggaaaattcataatcatatactgaaggggtcccccccccccctacatctgttgtttccccccattctgcttgctggacaggggacatatacaaaaacacgactttatgaaacacgcctgtgtgaccattttctattgatattaagacatttctttgtgctgccatttgtccctgtattgttattctattatgttgtgttatcttctgaacacgtggtcatggttgacaggtgctcggtctgcctagcagaatacgaaccggacgagaggcttcagaagatacctccctgtgggcataccttccacatcaactgtatcgaccactggctctccacaaacaccacctgccccctctgccgagtatcgctccttcccgcccccaaggcaaccagcaccggactggatctggaagcacagactgcggtagaagaggagtctccgaacgcacatcatcgccaggaggagggactcgttgatgccaacacaccacaggaaggtgaggcggccggaggtgacggatcaagtagcgtccaggttgaagaactgcacggcgatgcggccgagccattggcggtgacggtggtcgctgtcgctgcgcctcaggctgacgctgaaggttcaccgagtacagcatgccaaactgttaaagggaagaaataaggatagcctagcccatcgatgtatttctattaccattgtgtgtttagctgggaaaggaaaaaaacgcataaagatggggccattgatgttatgattgccatttttctggggaggaagaagaagagcaagagttcagttgtggggaaatcttattgatacagcacttaacataaccgagattagtagtacttgtgagctgtttttcatctggtaaa

SEQ ID NO: 128236 - DNA, 204 bp, Zea Mays
atgcaggatttcttcaaatgcgagactggatacgaggctagggcggatgtggtggccaccacgagctataagaagctcgtcgtggacatgcactatgaggcccgaatccaggccatcgtcagctaccacggctccgtccttggggagagggcgtccaagcagcaagcccgaaccatgtcgttgaccagggagcagtacatgcag

SEQ ID NO: 128237 - DNA, 1164 bp, Zea Mays
gcgacaacttctcgacgccttccctcggggcctcccacgtcgccgcgtcaaccattctcaattcatcatatatatatgctcgagctttccactctcgagggctcgctatctacgaagcacagaaaacaccatgacgcaaggttccgacgaaggtgccggcgctgcgcacccgtcgtggccgagcggcgccgacgccgacacacccgtcgcgcccacggcgggtgcggcggccgccatgactctcggcagcatcctcaccgtggccggcatcttcctgctcttcgtcatcttcgccttcgccctcgcttccctccagtactgcttcgagtcccgcagggacagggacagggacgcacggaccgggcggcggggcggtggtagcaggggcggcggcgtcgacccggagctgctgcgctcgctgcctgtcacggtgtaccgtgcgccgccgcaaggttcgtacaagggacggcagcagggcgtggtactggagtgcgccgtgtgcctcgccgagctccaggacggcgaggaggcccggttcctgccccgctgcggccacggcttccacgccgagtgcgtcgacatgtggctcgcctcccacaccacctgcccgctctgccggaccaccgtcaccaagcccgacgcatcgcctccgacgccttctttggctcttccacccgtaccgccggagcccgcgaactactacgccaccgccagcttgcccgccaccagcgtgcttctcggcgtgtcggctggccatagcgcggtgaccatgaccaccgacgtgcccccgaacccatccactggctccacggcctccatggtgatcgagataccggacttggccgcgccaacgccgacgctgacccctcgcgacgctgccaggtcaccgggctcggcgaggctcagatcgataaggaggctgtggagctttggaaggctaggggcgggggcgacttcttcctgctcctgtgccggtgctggtgccagcgaaggagtcgacttggaggcttggagcagggtttaagctagccagtagcgtaaacgttaccatagcacggccaccgctccggaacagggtatacagtcggggagcagcaccaatttctgcgctctctgcaatggagcagatgtatagtcaattactggaccatttcataattttag

SEQ ID NO: 128238 - DNA, 839 bp, Zea Mays
gcgagcgagacatcgagtagacgcccacggacggacgacggaggacgtacggaccaagtagaagcaagtagtaggcatggcggaggcagaggcccatggcatcgtcatcgtcggcggtggcatctgcggcctagccaccgctcttgctcttcaccggaaagggattcctagccttgtgttggagaagtccaggagcctgcgagcggacggcgcgggcatcggcgtgcacgccaacggatggcgagctttggagcagcttggcgtcgccgcggagcttagagagactgcacagcttatcaccgtgtaccatgacgtgtggcagcagggagacaaaacgagccgggaaaaggttccagtaaggatggagctccgatgcttaaacagaaaggacctgatcgaggcactggccaaggacatccctgcaggcgcgatccgattcggctgccgcgtcgctgccgtcgctgcggaccccggcggcggtcacggcgccgtcctgacaatggcggacggtactgccatgaaggccaaggttaaacttgcatgcaatcgatggtcatacatacagtatcatatatatatatatcctctgcctgaaatcgagctctttcaggtcctgatcgggtgcgagggcacatactccgcggtggccaggtaccttgggctgtctccggtgaggacgatcccgcgcccggtgctacggggcttcacctggtatccgcacggccactccttcgacacggagttcctgcgcctgcgcgttggaggcttcttcatcggcaggctgaccatcacggacaatctggtccatttcttcgtgacgatgcccaaacagcccacag

SEQ ID NO: 128239 - DNA, 800 bp, Zea Mays
gcgagcgagacatcgagtagacgcccacggacggacgacggaggacgtacggaccaagtagaagcaagtagtaggcatggcggaggcagaggcccatggcatcgtcatcgtcggcggtggcatctgcggcctagccaccgctcttgctcttcaccggaaagggattcctagccttgtgttggagaagtccaggagcctgcgagcggacggcgcgggcatcggcgtgcacgccaacggatggcgagctttggagcagcttggcgtcgccgcggagcttagagagactgcacagcttatcaccgtgtaccatgacgtgtggcagcagggagacaaaacgagccgggaaaaggttccagtaaggatggagctccgatgcttaaacagaaaggacctgatcgaggcactggccaaggacatccctgcaggcgcgatccgattcggctgccgcgtcgctgccgtcgctgcggaccccggcggcggtcacggcgccgtcctgacaatggcggacggtactgccatgaaggccaaggtcctgatcgggtgcgagggcacatactccgcggtggccaggtaccttgggctgtctccggtgaggacgatcccgcgcccggtgctacggggcttcacctggtatccgcacggccactccttcgacacggagttcctgcgcctgcgcgttggaggcttcttcatcggcaggctgaccatcacggacaatctggtccatttcttcgtgacgatgcccaaacagcccacaggcacgtacgcacgggatttatttatctagagaaatgcttatt

SEQ ID NO: 128240 - DNA, 1472 bp, Zea Mays
gcgagcgagacatcgagtagacgcccacggacggacgacggaggacgtacggaccaagtagaagcaagtagtaggcatggcggaggcagaggcccatggcatcgtcatcgtcggcggtggcatctgcggcctagccaccgctcttgctcttcaccggaaagggattcctagccttgtgttggagaagtccaggagcctgcgagcggacggcgcgggcatcggcgtgcacgccaacggatggcgagctttggagcagcttggcgtcgccgcggagcttagagagactgcacagcttatcaccgtgtaccatgacgtgtggcagcagggagacaaaacgagccgggaaaaggttccagtaaggatggagctccgatgcttaaacagaaaggacctgatcgaggcactggccaaggacatccctgcaggcgcgatccgattcggctgccgcgtcgctgccgtcgctgcggaccccggcggcggtcacggcgccgtcctgacaatggcggacggtactgccatgaaggccaaggtcctgatcgggtgcgagggcacatactccgcggtggccaggtaccttgggctgtctccggtgaggacgatcccgcgcccggtgctacggggcttcacctggtatccgcacggccactccttcgacacggagttcctgcgcctgcgcgttggaggcttcttcatcggcaggctgaccatcacggacaatctggtccatttcttcgtgacgatgcccaaacagcccacagcggatgtcatcaaggacctgaagcgagtgagagatcacgcgctgaaggatctgcaggacgtagaatgccccggcgagatcatcgagatcgtccgcgggtcggacccggagtccctcaacttggtcacggagttctggtaccggccgccgtgggaggtcgtcctgggcagcttccagaggggcgccgtgacggtcgccggcgacgccatgcacgccatgggcccgttcatcggccagggcggctcggcggggctggaggacgccgtcgtgctcgcgcggtctctggcgcgggcggccgtggacgacagcgacaacgcgcgcgagaagaaggtggtcggcgaggcgatcggggagtacgtcagggagaggaggccgcggctggcgctgctgtccctcgagtccttcgtcatgggggcgctgctggtgcgctcgccgtctccggtcaccaagctggtctgcgtcgccgtgctcattctcttgggcagcaagtcgttaaggcatgccaactatgactgcggtcgcctctaggctcgagctgtagtggcccgggtactgcctgctggggtccaggcaccaccgtctgctaggagattatcataacaaggcggacttctccactccctgtctgagtgtggtctcataagcctgggctcaaaggcccataatcgtgggaatggtacctcgatgaataatgatcagcgccaggaggtcctct

SEQ ID NO: 128241 - DNA, 1596 bp, Zea Mays
gcgagcgagacatcgagtagacgcccacggacggacgacggaggacgtacggaccaagtagaagcaagtagtaggcatggcggaggcagaggcccatggcatcgtcatcgtcggcggtggcatctgcggcctagccaccgctcttgctcttcaccggaaagggattcctagccttgtgttggagaagtccaggagcctgcgagcggacggcgcgggcatcggcgtgcacgccaacggatggcgagctttggagcagcttggcgtcgccgcggagcttagagagactgcacagcttatcaccgtgtaccatgacgtgtggcagcagggagacaaaacgagccgggaaaaggttccagtaaggtcagtacgtatagtacttactccagtcagtccaggagcaaatgcaaagctagcacctagcagagtgcctgtatgcaaaccttctttgttgatttctgattgcctgttcgcgcgctgctgcaaggatggagctccgatgcttaaacagaaaggacctgatcgaggcactggccaaggacatccctgcaggcgcgatccgattcggctgccgcgtcgctgccgtcgctgcggaccccggcggcggtcacggcgccgtcctgacaatggcggacggtactgccatgaaggccaaggtcctgatcgggtgcgagggcacatactccgcggtggccaggtaccttgggctgtctccggtgaggacgatcccgcgcccggtgctacggggcttcacctggtatccgcacggccactccttcgacacggagttcctgcgcctgcgcgttggaggcttcttcatcggcaggctgaccatcacggacaatctggtccatttcttcgtgacgatgcccaaacagcccacagcggatgtcatcaaggacctgaagcgagtgagagatcacgcgctgaaggatctgcaggacgtagaatgccccggcgagatcatcgagatcgtccgcgggtcggacccggagtccctcaacttggtcacggagttctggtaccggccgccgtgggaggtcgtcctgggcagcttccagaggggcgccgtgacggtcgccggcgacgccatgcacgccatgggcccgttcatcggccagggcggctcggcggggctggaggacgccgtcgtgctcgcgcggtctctggcgcgggcggccgtggacgacagcgacaacgcgcgcgagaagaaggtggtcggcgaggcgatcggggagtacgtcagggagaggaggccgcggctggcgctgctgtccctcgagtccttcgtcatgggggcgctgctggtgcgctcgccgtctccggtcaccaagctggtctgcgtcgccgtgctcattctcttgggcagcaagtcgttaaggcatgccaactatgactgcggtcgcctctaggctcgagctgtagtggcccgggtactgcctgctggggtccaggcaccaccgtctgctaggagattatcataacaaggcggacttctccactccctgtctgagtgtggtctcataagcctgggctcaaaggcccataatcgtgggaatggtacctcgatgaataatgatcagcgccaggaggtcctct

SEQ ID NO: 128242 - DNA, 1677 bp, Zea Mays
gcgagcgagacatcgagtagacgcccacggacggacgacggaggacgtacggaccaagtagaagcaagtagtaggcatggcggaggcagaggcccatggcatcgtcatcgtcggcggtggcatctgcggcctagccaccgctcttgctcttcaccggaaagggattcctagccttgtgttggagaagtccaggagcctgcgagcggacggcgcgggcatcggcgtgcacgccaacggatggcgagctttggagcagcttggcgtcgccgcggagcttagagagactgcacagcttatcaccgtgtaccatgacgtgtggcagcagggagacaaaacgagccgggaaaaggttccagtaaggtcagtacgtatagtacttactccagtcagtccaggagcaaatgcaaagctagcacctagcagagtgcctgtatgcaaaccttctttgttgatttctgattgcctgttcgcgcgctgctgcaaggatggagctccgatgcttaaacagaaaggacctgatcgaggcactggccaaggacatccctgcaggcgcgatccgattcggctgccgcgtcgctgccgtcgctgcggaccccggcggcggtcacggcgccgtcctgacaatggcggacggtactgccatgaaggccaaggttaaacttgcatgcaatcgatggtcatacatacagtatcatatatatatatatcctctgcctgaaatcgagctctttcaggtcctgatcgggtgcgagggcacatactccgcggtggccaggtaccttgggctgtctccggtgaggacgatcccgcgcccggtgctacggggcttcacctggtatccgcacggccactccttcgacacggagttcctgcgcctgcgcgttggaggcttcttcatcggcaggctgaccatcacggacaatctggtccatttcttcgtgacgatgcccaaacagcccacagcggatgtcatcaaggacctgaagcgagtgagagatcacgcgctgaaggatctgcaggacgtagaatgccccggcgagatcatcgagatcgtccgcgggtcggacccggagtccctcaacttggtcacggagttctggtaccggccgccgtgggaggtcgtcctgggcagcttccagaggggcgccgtgacggtcgccggcgacgccatgcacgccatgggcccgttcatcggccagggcggctcggcggggctggaggacgccgtcgtgctcgcgcggtctctggcgcgggcggccgtggacgacagcgacaacgcgcgcgagaagaaggtggtcggcgaggcgatcggggagtacgtcagggagaggaggccgcggctggcgctgctgtccctcgagtccttcgtcatgggggcgctgctggtgcgctcgccgtctccggtcaccaagctggtctgcgtcgccgtgctcattctcttgggcagcaagtcgttaaggcatgccaactatgactgcggtcgcctctaggctcgagctgtagtggcccgggtactgcctgctggggtccaggcaccaccgtctgctaggagattatcataacaaggcggacttctccactccctgtctgagtgtggtctcataagcctgggctcaaaggcccataatcgtgggaatggtacctcgatgaataatgatcagcgccaggaggtcctct

SEQ ID NO: 128243 - DNA, 1221 bp, Zea Mays
cgtctctttaccctaaccgacagcagccgccgtttcttcatcttcctcgcagcggcggctctccgtcttccgctcctccctcccacgacacgcgctcggcacgcaggcgacggcggcagcgctcaggctcgggctctcagcgacggtggggcagtcccagactcggcggcggcgtcagcggctccccctcccgaatctcgccaatcgccttgcgccctcgcctccggtcctccgcccaacggccggcgaccctgcgtgcgcgcttcccgctcccctgccgcctccggtggaccgtagacggcgctcgaccccggcggctgcactgcgcgccgcgtgcgaccggcgggcagcgggatccagctgctgctgctccacctaggcggctgcgccgatttggtagcgcttatgccccaaacgaagtgttacccgtccgcttagggctgaagcgtgcgcttagtgacgctttttagaacctaggcaattaatcagtttggggttctcatatatctctttggagatgcatccacatctgactttacataggcatcctatgtgtgccgaggtaacttgctattattttttttattttgtcctggccttcttcatatatatgttgttgcactactttagtaaaacttacaattatgatgtacttgtccagattattgaagaattccagaagtgccatctggatcaccctgtcaagaagttcttcggagagtgcacagaccttaaaatcaagctagatcgctgcttccgacaggagaaagctttgaagagaaaggcaaactttgaagagagcaagagatttaaagaacagttgaaggcttacaaaagggaaattgcagagaaaagcgaggaatgataacttggaacggaggacaaggccgtagaggctcttaatctgtgatgacctgcccttgattttgtgaaggatctgtcgagtgtttttgaatataatgtttctaaaaaatattatactcttttcctagtagcagctaaactttaacagcttaaagtttcttccatgactaccgaatatgtttccaatttgttcatgcatgcgtgcaggagtcctctgtatcaaatttggacaacccactcttgttgcctagtataagcagtttattggcgagttccttttatttatgctatttattctatgttgatgtaatgggtataacatttgaatttataaatccaaataaattgttctgtaga

SEQ ID NO: 128244 - DNA, 1113 bp, Zea Mays
accctaaccgacagcagccgccgtttcttcatcttcctcgcagcggcggctctccgtcttccgctcctccctcccacgacacgcgctcggcacgcaggcgacggcggcagcgctcaggctcgggctctcagcgacggtggggcagtcccagactcggcggcggcgtcagcggctccccctcccgaatctcgccaatcgccttgcgccctcgcctccggtcctccgcccaacggccggcgaccctgcgtgcgcgcttcccgctcccctgccgcctccggtggaccgtagacggcgctcgaccccggcggctgcactgcgcgccgcgtgcgaccggcgggcagcgggatccagctgctgctgctccacctaggcggctgcgccgatttggtagcgcttatgccccaaacgaagtgttacccgtccgcttagggctgaagcgtgcgcttagtgacgctttttagaacctaggcaattaatcagtttggggttctcatatatctctttggagatgcatccacatctgactttacataggcatcctatgtgtgccgagattattgaagaattccagaagtgccatctggatcaccctgtcaagaagttcttcggagagtgcacagaccttaaaatcaagctagatcgctgcttccgacaggagaaagctttgaagagaaaggcaaactttgaagagagcaagagatttaaagaacagttgaaggcttacaaaagggaaattgcagagaaaagcgaggaatgataacttggaacggaggacaaggccgtagaggctcttaatctgtgatgacctgcccttgattttgtgaaggatctgtcgagtgtttttgaatataatgtttctaaaaaatattatactcttttcctagtagcagctaaactttaacagcttaaagtttcttccatgactaccgaatatgtttccaatttgttcatgcatgcgtgcaggagtcctctgtatcaaatttggacaacccactcttgttgcctagtataagcagtttattggcgagttccttttatttatgctatttattctatgttgatgtaatgggtataacatttgaatttataaatccaaataaattgttctgtaga

SEQ ID NO: 128245 - DNA, 195 bp, Zea Mays
aagtgaaggtacggtgggaaggtcctacagtaatattattaaaacaataaaaatgagtttagaaatgagtttaaggaggagaagggagattacaaagaaatggaagaaagagagagccgaagggaacaagttatagccctaaattaagtagccaagatgtaatgtcttctttaagagcaggcttgacgcgatggc

SEQ ID NO: 128246 - DNA, 384 bp, Zea Mays
caaaagagtacaatcacaatgacaaacagaacaacaactctgaatctcaaaacgatggcggcacaacacagttgggatttgtttgggatgaaaaatcttgttactactatgattccgcagttggattctattatgatggaactactggtctttactttgactgcaactctagaatttggtattcatatgatcaacagactcaacagtatgtcccttgtaaatggtaggatcagagtgcttctgctatgtcatcttcgacacttcctgtggtctggtctctgtgtgagcattggtttagaggatcttgaagctatgcggctcttctttcatgttcaagatgaagttcatgaagcttggatcggatctggatacctttcaagatga

SEQ ID NO: 128247 - DNA, 2303 bp, Zea Mays
ccctgtccattcccggcacaccgcgacagcatttaactagcgtgcgtcacctcccgtcctactgcttcctctcgaggctccgagccgcccgttagtagtgtagacctgcctccgccttctcctcgccaacgcgccaccgcagtaaagagcgcggattaattccagggcgaggggggagactcacctccattacgctccgtcccccttccccggcgtgcaccgtgcagtaggtatctgtgcattcctgccctgctgtggttggctaggtaggggtggtaactggtaagaacagcaagaaccaaccatggctgctgatgttgggcttcggttcaacggctggtcatactcggatttgccttacaacgaccacaatgcacaggattcatcagttcaggaaatggtgctcaaccatggctcggtgtcattcggtagatttgctgcagaatcattgtcatgggaaagaaggtcagtgtttgaacataacagacgccaagaggaactaagcaagctcacagcccctggtttggttgcacaaaagaaggctttctttgaagaatattacaagagggcaagacatctcaaggctcagggggtattgcaccaggctggagccgcagtggaggagaacgatagcagccaggcagatgaattgccagcagctatgtctgaagatccagtagccactgctccaagttctagttttgagccttccactgatgttgagagcaaatgccaggatgctcatgagcacgggtacttgacatttaatcctttattttctcagacagcaagcttgccaaacattcaggaggagagttctagctctggtcaaaagcatggattcagttgtgaaactattgagagaaaagttcttgcaccaagacgtgtggcatcaaatgataatgatcaaagcaatattgctggatcaaggattgtcttaccaatagtcagtctacaatcagaatacctcaaagctgatcctgagaagagtgaggcaagcaaaaatgtacctattattaataggtcaaaaaaggtatcaaaggacctggcaacttctgttatcagcatcccaagggtagatttaagaaggaattcagaaaacggaccctctcgagacttggaggatccattccacaagagagttgagatgaaattgcgtgctttatctgatcggatggatgctgacagaactacggcctctagtagatcatcctcttaccaacctcctgagagagctatgacctcagctagatctgcatatcaagatagactagcaatatcttctagatccagtgtgtctcagaacactagtaaagccttggcaccttctaaattagctgctcaagcttcccataaatttcttaaaggtgtgcagcgtttagatgccatgccccgtggtattttcgttaataaaggatcaagtgcttctcttgttgcttcttgcaacagtagtgcaactgggaagttgtctgccaagattttggtggcacccagttcgtctcaagttggtgcaaagacttccaggactgctcaggttacaccgaaaagagcagcaggacctaccagtgtaaacaatgtgtcacacaataaaaggaagcacacaccggtcgcattgggtgaaaaatacccaaagagagagtatgtgcgcagatctgcacctccaagtgcaagaagcagctccgagaatctccctcgtgctgcaaaggcgcctaagatatcaaaagtgatgaatgcggtgtccaaggctgaagctgtgcagaagtcaaaatcatcaagcaatcttgttggaggaagaaatttatcgacaaagcgctccgcaaactgcaatgaagaaaacagaaaggcgatcccgtcgcgcaaggtaaacatggctgaatgcacgaggagcaatctgaaaggtggcccatcactgactaagaacaagccacggcaagagaggccacggtggagatgattgccaggcgagagaagccacgaatccaccacggtgattattaaatagtcttgagaagcatcgatcacctggagcctcaaacgtgtacctctggttagttttgcaacacgaaattgagtgccggccatcaaaagcatacagcaccaagacttgccttgtcttgtagctgtagcatacagtggctggctgtttgttccccttgttgttgtaatccaacaacagtcgcaagagaatatctggatgtgcaaggcagtatcgtgccgctgctgtgctgtcgttacggcccgtgacatttctggccgtcgcgtttgttgctgctttgcgaaggggatacaccggaaccatttga

SEQ ID NO: 128248 - DNA, 2074 bp, Zea Mays
gcctagaccgaaatcgccttcactgccactagcgggtccatgacaacctggccccgctgctgagtatatttggagggcccacttcacactcagtccaatggactccggccgctccggctccgctgcgtgaacggtagtcgcgcgcttttctcgttatccaacactcggggctgctacgtgtcccgcatgggcctcccccactcaccttttgtctcgcccacagccgcacagccttctggtctatgcccgctgggtccgccagcaccgggccccacttaattggcttctctcctgtctcctcctcggctctgccccacaccgccgttcccttcggtcagtcagttgtcccctcccccgcttccctttccttctcggaagagacgggcagacgaccatgtccatggaggacgacgcctcgaagatcagcgactgggaggtgctctctgccacctcttcccgcgggggcggcgacgacgatgaggtattaactgtctccggcgggggcggtgacgtcgtcctccttgaccacttcgtcctcacccccgaccccgcagcctcctgtcccggcgacggcgagggctcgtggtcggacgaccggggcgcctggcaagggttagaattattggatggattcgatccgattccggaagcaagtttcgatcttgcagttggtgttaggagccaacaactgctgataagcgacgtggatgacgcccgcgaagaaggctcgattgttcaagccaccgtggcgcgcggtgcgacccgtagcgcagaaggaaatcaagatgatgtggtagaggtcgagattgagcaggagagcagttccgtgattagccgcggtgcattgtgcccggtgctgcaggtggcggcggatcatggcgtggaagaaactctggattctgaggcagttacacctacaggtggctcgctccaaagccaggtatcagagagttcccttgtgcaactggatgatggaggaattggtgctggtgaaaaaagatcatgccttgaggatgctgtgtcaagtgatgagattcatggtgaacaagaagagcaggagcaagggagcaacgctaatgctgccattggttgcgatgaaccagatggagaggccaaggatgatgctttgccactggctcacacgccaggtactgaagagggagagaagtaatttgttgcctggtggaggctgccattcaagctgatgcactacaatgcttggaaggtgaagccagtatggtccttctccgtcgcagcggcacttctcggcctggtcgtgctggggaggaagatgtacaggatgaagcacaaggcaaggggcttgccccagattaagattgcgtttgatgataagagggcctcccagtttgctgatcgcgcggcgcgtctcaacgaagccttcctggtagcgagacgtgtacctatgctaagaacatcatctggtggtgcgacgcttccatggtcaatggttcaggacagatgagtgaagctgctcagagtcagggcaccgtaagaaggctcccgcaagcaatattctggatggtgaacgagcatctgaattggcttttgcctataccttctgtttttagatgacgcgtcaaggtggatgccaatgttgatggcagtggtctctctttctcttcttttttttttcacttagttttttcttttttaaggaaccacttattgtgctcctgatttccttttttttaatttttttgcccctactctgttttttctaacctctacatctagttctagcgggagtgggtgtctgcagccttgtattcagtatgctccagcttgaaagctcatctgaagtgttgtttcatctcagctggttcacaggccctactgggtgcgcaacattttctgtatgctgcagcttgaatgcctacagtattgtgtaatcagatctgtgttggtcccctgctgtctgttactatgcatagatcatctgggtgctctcaaggtgttaagaaagcaaggattggtgctcgtatgtaaggccgtaacagagttgtgaactgaactttttggtttacattgaacagaactgagcagcccttggtgg

SEQ ID NO: 128249 - DNA, 650 bp, Zea Mays
attattttatcgagcatataataatttcaatcattcgtggtgataaactgaccatgaagaagggagaggaacctttcttctctcttttttttttcctcaacgatcgatgtcttcatatcttttattacctccacacaagtcggccgtggttaataacgtcagccgccactgatgggcggtatgacagcgagctcgtcgccgtcggcgaccgcggccgagtcggccgcgtactcctcgttgagcgcgagcacgacggagccccggatctcctccagcttggggaactgggctaggacccgcgcgaggcactcccccgcggtgctccccggcggcacctccaccgcggaatccgccacgcccgttaggtcccgcgcgcgggcgaagaagagcaccttcaccgtcgcggcaggcgctgcctgttcctcggccgcggcgggcatctcctcctccggagcggcatctgggagcagcaacaggggatgagatggtatgagcggttggctcacatcaggtgagggataaaatcgatcggtgatggttcgttgaggcccgcagtgagaatcgatcggtaggttacctttgggattcttcgccatcgccggaggaaaggaagctgctgtgctgccgcctggactctgattacttaccgg

SEQ ID NO: 128250 - DNA, 1287 bp, Zea Mays
atgcaggggaacctcggtgtccgatccagagcgtcgctgcgggttctcctcccgcggcagctaaccgcgcgggcaagatggctgcagggcagcgggcggacagtggcctcggaggaggacgaggcggcggtcccgtacgtggacgtgcctcgcgctggtaggaagtgggagcggaagccgtacgtgacgccgatgaaggtgctcatccggcgggccaaggaggagaggcaggcccgccgggagaacccgtgccgcgtgctcgagcacccacccgacaacggccttgttgtgccgcacctcgtcgacgtcgcccggcgcgtgcacgccgcgagggaggggctcctcggcggcctgaccaggctcgtggagggcgctgtcccggtgaagcgatgcaggttttgctcggaggtgcacgtcggccgcgtcggccacgagatcaggacgtgcgaggggcgtaacagtggcgcgaggaactccctgcacgtgtggcggccggggaccgtgcgggatgtcgtcggcttcccctactgctaccacctgttcgaccgcgtcgggaagcccagagtcgtgcacaaggagaagtacgacgtgccgaggctcccagcggtcctggagctctgcatccaggccggcgtcgatgtccagcgctacccgaccaagcggcgcaccaggccagtctactccattgaaggcaggatcgtggacttcgagcccgacgtcgacgacgacgaagcagccaggacgttacatgaaccgccagcgtgcagaccatcgctgcctccagcggtggcaatcgccgcgatcggaactagttcttcttcttctgctgctgttgttaacggagagggggaagaggcggagatcaccgtgcctgagctagcgtcgaggacactgcaatcgtggctggacatgaaatccggcgcagcgaagctgatgaagaagtacagcgtgcacacctgcggctactgcccggaggtgcaggtcggtcccaaggggcacaaggtgcggatgtgcagggccaccaagcaccagcagcgggacggacagcacgcatggcaggaagccacggtggacgacctggtcccgcccaactacgtgtggcacgtcgcggaccttgccggcgaggaatcgcctttggccaacgagctcaagcggtactacggtaaggcccccgcggtggtggagctgtgcgtgcaggctggcgcgcccgtgcccgtggcgtaccggagcatgatgcgactcgacgtcgtgccaccagcgcgcgacgaatacgacctcgtcgcctaa

SEQ ID NO: 128251 - DNA, 2228 bp, Zea Mays
gggaccaaccgttgcggatgatttcctctcgtctcgtcccatactcccgtcctgtccgtcttcacctgcgttccccgggtcccgacacgccgctgtaccagtcccgcccgcctgcgcacttctcccacccccgcgccgcctccggcgccggcgagccctcccgacgctcctcgaacgatccgtccctgtcgcggcccttctctctgccgcttccagcccaaggggaggagagggagaggatgtggtcgtcgagccaggcgagcacgaggggcgtcgtggagatggggagggtggaggccgggccgtcgcatttccctaagagacccgcgcctcagaactccgccagggtcaatctgtcaaggacacacacagtcaaacctacctctgctggcgaccgttcaggaatttctgttaaatgcaacttggggtggtcttctcaaccatcgcctgacttgaggcatcactttagaggatactcatcagcatcagaggcagttcttacttcccaatctgatgtgagaaaactgtttgttggcaatgaaaaaatcggtgttctcttgctgaatcttgggggcccagagactcttgacgatgtgcagcctttcttgtttaatctttttgcagatccggacattatccgtcttcctaggctctttcgctttctgcagaagccacttgcaaaattcatatcagaagtgagagcaccaaaaagtaaggaaggttatgcatccataggtggcggttctcctctacgacaaattactgatgcacaggctgaagcacttagggaggcattacatgggaaagatgttcctgccaacgtgtatgttggaatgcggtattggcatcccttcactgaagaagccatagaacaaataaaacgggatggaatcacgaaacttgttgtgttgcctctataccctcagttctccatatcaactagtggttcaagtctccgtttattggagagcatattcagagaggatgagtatctcgtgaatatgcaacatacagttataccttcctggtaccaacgtgaaggatatatcaaggctatggcaactttgattgaaaacgaattgacaaaatttcaagaaccccaaaaggttatgatatttttcagtgctcatggagttcctctggcatatgttgaagaagctggtgatccatataaagcagaaatggaagagtgtatcgatcttatcatggaagaactggaaaaaagaggaataacaaatccgtgcatacttgcttatcagagccgagttggaccagtggaatggctgaaaccgtacactgatgagacaattattgagcttgggcagaaaggggtaaagagcctgcttgctgttcccattagttttgttagcgaacacattgaaactttggaagaaatcgatgtggagtacaaagagttggctttagaatctggcatcaagcactggggacgggttccagcactaggttgcgaacccacattcatttcggatcttgctgatgctgttattgaaagcctaccttatgttggcgcaatggcagtttccaatcttgaggctcggcagtctctcgtacccctcgggagcgtggaggagctgctagcagcatacgactcgaagcgcgatgagctccctccaccggtaatcgtgtgggagtggggctggacaaagagcgcggagacctggaatggtcgtgcggcgatgctggccgtgctggctctcctggtgctggaagtgaccaccggcgaagggttcctgcatcaatggggaatcctgcctctgttccgctgagccgacagttctgttcatgatggggtcataattttgctgcagccgaaggaagttttgaacttctgatgctgtatatgaatcaatttgccttaaatcgtcgatgggaaaagaggagaaaatggtaaaatatggacagaattcgacggtatatcatgttatattgtacctacctacatgacatgggacatgaaatagggctcagacatgcgctatggaacttggaatacacacaaacctaacacgccacatgctgcacaaactcctgcctactgccactagtaccttgtctgtccataagtggatgcgcgttgcttttagagaataatcatatgagcggatgagcctctgcattgtcatgtggatgctatatcaatccagcattccagctcaacaatttcagggttagctttagctcaagcagattaatttttcggttggctg

SEQ ID NO: 128252 - DNA, 3239 bp, Zea Mays
cgcttccacagccagctctccccaggctcactcttctccccagttgcgttttctttggaagcttccatacacaactcgcatcgttcatcttccactgatgctatataaggagagagagagagagagatagagagagagagagagagagagagagagagagagagatgatctgatgatgcatgctgtaacagctcctgaactgcacaagttgtagtttggctgctggataataagttcatccatccatcaacgctacaaatcaaggctctgctcggacattgcgtaatccaagagaccgtcaaggcaaggcaaagccaacaccagacgagtcgagaacaccgcagcagagcgcggcgtccaatggacatggacggcaactccccgcggcggcctccccgccggcctgagcgggaggggagctacggctacgacatcgagagcatggacggctccggggccgggggcccgccgccgtggagcgcgcaccacaacggctcctccgaggccctgctccgctacgacgacggcggcgccgaccgcgggagcacgcaacagccgctgctgcggaagcgcaccgtgaacacgacctcgcagatcgctatcgtcggtgccaacgtctgccccatcgagagcttggactacgaagtcgtggagaatgaccttttcaagcaggactggcgatcaagaaagaagaagcagatatttcagtacatcgtactcaagtggagcttggtgctccttattggcctattaactggatttgtcggcttcttcaacaatcttgcagttgagaacattgctggattcaaattgctgctcacgagcgatcttatgctcaaggggaggtatattagagcattttttgtgtatggaggttgcaatttagttttggcagcagctgcagcagcaatctgtgcttatattgcacctgctgctgctgggtctggtattcctgaagtcaaagcttatcttaatggggttgatgcctattctatattagctcctagcacactctttgttaagatttttggttcaatacttggagtttcagctggattcgtgctaggaaaggaagggcccatggtacatacaggggcatgcattgccaacttgcttggtcagggtggatcacgcaagtatcatcttacttgtaactggctacgctactttaagaatgacagagacaggagagatttgatcacatgtggatctgcagctggtgtggcggctgccttccgtgcacctgttggcggtgttctgtttgctcttgaagaagcagcatcatggtggcgaagtgctcttttgtggagaacattctttacaactgctgttgttgcggtggtattgagggggctgattgagttctgtcgtagtggaaaatgtggtctctttgggcaaggtggattgatcatgtttgatctcagttcaactgttgcagtctacagtactccagatctaattgcaattatagtccttgggataattggtggaatctttggaggcctcttcaactatctgttggacaagatcctccgagtttatagtattatcaacgagagaggtgctccattcaagatccttctcactataacaatatcaataatcacatcaatgtgttcctatggtcttccttggcttgctgcatgcactccatgccctgttgatgctgtggagcagtgtcccactgttggccgctccggaaattataagaacttccaatgcccaccaggacattacaatggtcttgcatcactcttcttcaacacaaatgatgatgccatccgcaatctcttcagcaacggcacatcgactgagttccaaatgtcatctcttttcatcttcttcactgctatttactgccttggactagtgacttacggtattgctgtcccatctggtctctttatccctgttattcttgctggagccacgtatgggcgcatagtgggaactcttcttggatccatatctgatcttgatcctggcctttttgccctacttggcgcagcatcttttcttggtgggacaatgagaatgactgtgtcagtctgtgtgatccttctagagctcaccaacgatctccccatgctccctttagtcatgcttgttcttctcatatccaagaccatagcagatagctttaacaagggagtttatgatcagatagtggtgatgaaaggcttgccgtacatggaggctcatgctgaaccatacatgaggcacttggttgctggtgatgtggtgtctggcccactaatcaccttttctggggttgagaaggtggggaacattgttcatgcattaaggttaacgggccacaatggtttccctgtgcttgatgagccacccataacggaaaccccggaactggttgggcttgtgactaggtctcatttattagttttgctgaacagcaagaatttcatgaagggacgggttaaaactagtggtagcttcgttctgcgaagatttggtgcatttgactttgcgaaaccaggttcaggtaaaggtttgaaaattgaggacctggatttcactgatgaggagatggacatgtatgtggatctccacccgatcacaaatacatcaccttacacagtggttgagacgatgtcactggcaaaagcagcaatccttttccgggaacttggtttgaggcaccttttggttgtgccaaagacaccagacaggcctcccatagtcgggattctcacaaggcatgacttcatgcctgagcacattcacagtctgttcccaaacctcaatcctcacaagtaccattcagcatcaatggcaggttgacaaggagactctttctgcttctcatctatttggcattattcgggtgctggctgtatgtaaattgcaaaggtgtatgcgtatctggttttcaattggatccatctcatcttctctacatagttttgtttgtgtggattttgtagcatatgctctttttgcaataaaaaaaatgtggcagttgtttggctggtgactgcctattatgagcctgcggcaataaatgttcagcaaattgcggagtaaacattgagagctccagaacatggagagaaagtgtgtattgtatatttgcgttgttcctgtaaagcatgtttagtcaaactcgaatattgtctataacaccgagtaaatctcaggcggaaacatgggcgagctttctaagtacagatttcttgctattgtaagtacttgaattgagattcgtaacatttctgctc

SEQ ID NO: 128253 - DNA, 2683 bp, Zea Mays
caaccacgcactgacacacggaccctatgctgccaggacccgcttgtcattgtccgtccgggccggacctccgatcgtgggtccggagagccagcgagtgagagccgtgccggagtggcttgcggccaggtagacgaagcacgggaagtaaacaatcgcaagagggaagggaacacaacaagcacagcagacagcacccccgcagggccgcagaacggcgctcccccctgctccgccacactccccagaggttctgaacgcagatctctcgccgcagctcggcctcgcgattccgctggagactgttcagctcctcgccggcggcgctgattcgatctgacgcccacgcagcagaaggctgaaggagggcactgggagccgagggggaggctaggggttaggattccggcgtgatgcagcgcccgggacgacttcagcggtcggggtccaagcgcgggctggaacccaccggtggcggcgacgacgacgaccatgcgcccaagcgcccgcgcgtccccgccctcgctagtgtcattgtggaagctctcaagatggacagtttgcagaaactctgttcatcgcttgagcctattctccgaagagttgtaagtgaagaagtagagcgtgctttagccaaactgggtcctgctagaatccaaggaagatcctcccctaaaagaattgaaggccctgatggaagaaatcttcagctccagttcagaagtcagttggctcttccaatcttcactggtggaaaagttgaaggtgagcagggagcagctatacatgttgtgctgttggatgcaaacactggatgtgttgttacttcaggacccgagtcatttgcaaaattggatatccttgtgcttgagggtgactttagtaaagaggaagatgaggattggacagaagaagagtttgaaagtaatattgtcaaggagcgtgaagggaagaggcctcttttgacaggcgacctgcaagtgactcttaaagaaggtgttggaaccataggggagcttacattcactgacaactccagctggataagaagcaggaaattcagacttgggctgaggattgctcctggcttttgtgaaggtatccgtgtccgagaagccaagacagaagctttccccgttaaggatcacagaggagaattgtacaagaagcactacccacctgcgctgaaggatgatgtttggagattagaaaagattggcaaggatggcgcattccacaagaagttaaatgccagtgggatctatacagttgaagatttcctccggcttcttgttagggatcagcagagattacgtagcattctgggcagtggaatgtcaaataagatgtgggacagccttgttgagcatgcaaagacatgtgtcttaagtggaaagcattatgtatactatgctagagactcaagaaacgtgggtgcaatattcaataacatctacgagttcactggtttgattgccgatgatcagttcatttcagctgaaaatctcacagacaaccagaaggtctatgctgatgcattggtaaagaaagcatatgaggactggatgcaagttgtagaatatgatggcaaggcactcttgagcttcaagcagaaaaagaaaactgtcacgacaagaagtgacgttgcatctgcctcaacaagcaatcctgcttcatatggttcggccaattcacagaaacagttgtctcttccagcaaaagctggacaaacttcctcagcgggtactatgaatgaagcagatggaactagaaatgcatacaacgcaaatggaaaccagtcagcaagatatgcagccaacactcagagcattcctgcaaacgtcggcatgcaatacgacgggagtgcagtgtcgcctgaaatccagtttagtggttcatcccttcagagtcagtcttcaagagggtccaacatgctagcattgggccctccgcagcaacatcaaagtttcgaattcccagcgctcggccagcccgttcagccaacaggcctgaaccctttcgaagagtggccgcagcagcaggagaaccgtggcggcggtgtcgacgactacctgatggaggagatccggatgaggagccacgagatcctggaaaacgaagagatgcagcagatgttgcggctcctgagcatgggcggtgccggaaccagcctagccgaagacggcttcaatttccctccgtacatgcctgcgccttcgccgaacgtgagctacgaggacgaccgcacccgcgcgcccgggaaagccgtcgtcgggtggctcaagatcaaggctgccatgcggtggggcatctttgtgaggaagaaggcggctgagagaagagctcagcttgttgagctagacgactagaaagtattgaaccctcgagctgttcatgtaccagagttttcattgttgatggtgtttgtggatccggacggggctcggctatggccctgccccttaggaggacagcagttctggtcctgagcttaattctggacaaaactattttccgtttcccccctttttgtatgtatagcttttttttaccattttaaatgcgttgcttgtttagtgtgatgccggtagtcctgttgtgaaccttagcctgagctctgtacatccatctgttacagaattcaaatcgaaacaggtaaacattggcacttgctgggctgttg

SEQ ID NO: 128254 - DNA, 1701 bp, Zea Mays
cgcaacatatacattttcgcaacacttatatgttgaacatgttgtctttttgtagaccaacattttacaccatacaacatagtttatctaaccaccgttgtataaaacttttctttagcttctatggtaccctcttgtcgtactagatgtttgacgtcactttatctgctctgctttgcttctatagctaacatatccattggtatctcagtctttctgtagcattgatcctaaataccgaaatgtatcctctctggacactacttgaccatccaaaataacatatctttcctcgtgtagtagtgctaaagtcacaactcatatatttggttttagatttattgagtctagaacctttggactctaaagtctcctaccacaactctagtttcctatttactccttcccagctttcattaactagcactatatctccgtaaaaagcatacaccaagggatatccgcttgtatatcccttgtgagcttatccattaccaaggcaaaggctcaaagctgatccttgatgtagttgctttatgacattttaaatacttattagtcaacagttgttggttaagtatagaaaatgatactgtttatgattatgtgatatggatgtgcagttcacacgagtcatgaatttaattaatttaccacacgtatagaaaatgatagtgcttatgattatgggatatggatgtgagtttgcatgagtcgtgtatttgattagtttattaccatgcgtgtgctgtactgacataactgaattacatctgttcagcagatggaactagaaatgcatacaacgcaaatggaaaccagtcagcaagatatgcagccaacactcagagcattcctgcaaacgtcggcatgcaatacgacgggagtgcagtgtcgcctgaaatccagtttagtggttcatcccttcagagtcagtcttcaagagggtccaacatgctagcattgggccctccgcagcaacatcaaagtttcgaattcccagcgctcggccagcccgttcagccaacaggcctgaaccctttcgaagagtggccgcagcagcaggagaaccgtggcggcggtgtcgacgactacctgatggaggagatccggatgaggagccacgagatcctggaaaacgaagagatgcagcagatgttgcggctcctgagcatgggcggtgccggaaccagcctagccgaagacggcttcaatttccctccgtacatgcctgcgccttcgccgaacgtgagctacgaggacgaccgcacccgcgcgcccgggaaagccgtcgtcgggtggctcaagatcaaggctgccatgcggtggggcatctttgtgaggaagaaggcggctgagagaagagctcagcttgttgagctagacgactagaaagtattgaaccctcgagctgttcatgtaccagagttttcattgttgatggtgtttgtggatccggacggggctcggctatggccctgccccttaggaggacagcagttctggtcctgagcttaattctggacaaaactattttccgtttcccccctttttgtatgtatagcttttttttaccattttaaatgcgttgcttgtttagtgtgatgccggtagtcctgttgtgaaccttagcctgagctctgtacatccatctgttacagaattcaaatcgaaacaggtaaacattggcacttgctgggc

SEQ ID NO: 128255 - DNA, 783 bp, Zea Mays
agctcgtctcctcccctgcagtgtcctgcgctgatgaccatagtagatagatcacttcgtagccggccgccgccgccgccgccgcaaaacagcttcttctcctgaaacagctagctagctagttccgacttgctgttgctgtttgcagctggataaagaaagatgcgcttctcctcgccttggcctcaccggcatcgccagcttgaaagcgttcgggagggaaggacgaagcgacaggtgagaggggctaggggcggcagacctgcagcgccgccatcgccggtggagcggcttgggcacaggtgaatgccgtcatcgtcgcagacaccgccgccgccggtcgggaggactgctgctcacggcggccggcacaagcacgacgatgacgacccaagcacgccgaggggcttctgcgccaagtacttctccagggagtcgtgcctcctgctcgccctcgtcaccgtgctgctggtggtgctcccgctcgtcctgccgccgctcccggcgccgccgttggcgctgctgctcgtgccggtcgcaatgttggcggtgctgctggtgctcgcgctcatgccggcggcggcaggtggccggaacgaggctgtggacccggcgtcgtacttgtagtcttgtagattgatgtaaattaaaaagttttgctatcgtcctcttatgattagcaagaggttttcagtttttgaatctgagtgttggttcagtctcaagcgcatcatatactccatactggactatatattaagcatatatgtctatttagcactc

SEQ ID NO: 128256 - DNA, 955 bp, Zea Mays
tcttttaccaaattggccctctgatatcctcctattctcgcaggcctccacgcgaccacgccgcggttttgcacttctcgccttctctaatctctttgcctccctccaccaccagtccaccaccactgctacccaaccctcgcttccccaaaccctagccaagggacacggtggccggcgatggacggcgacggaggaggcgctggtgcgctgcaccaccacacgcgctcacccgaggacgtcttccgcgatttccgcgcgcgccgagccggcatcgtcaaggcgctcaccacggatgtggagaagttctatcagcagtgcgatccaggtgacgcgccggacttggttcctctccctctttttttttccttccatttgtgctgctcgtatgttcgtgctaagcttcgcttttcactgtatgccgatctggcgttcgtttatggagctcgatccggttgccgtttagggattcgttggatttttaagaacgaatagttggtctggttagccatttacttttgttttgtaaaattactaagttttgatgtgactgccacgcatattttgtaatttgatttcgccctccagtttatttagatgatcaaataaagtctctaccagaattcgaattcgagatcgcggactttgataccatgttagagtggacgcactatccagttcaacccaaaagcttaatctgatgggaggagatatgcaatccatttatacacttcaacactcggtaaatgtcatggttaggtaatttgaagtcctggaatatgctccagctgtggtcattttcatttctgcttacatgcataatgcttgggttgaacgaaaaaaaccatgtacggtacataataaaggggggtcaaccaattttcatttgcatttccatgcataatgcttggtttgtacataaaaaaccatgtaccttacataataaaggggattg

SEQ ID NO: 128257 - DNA, 1357 bp, Zea Mays
tcttttaccaaattggccctctgatatcctcctattctcgcaggcctccacgcgaccacgccgcggttttgcacttctcgccttctctaatctctttgcctccctccaccaccagtccaccaccactgctacccaaccctcgcttccccaaaccctagccaagggacacggtggccggcgatggacggcgacggaggaggcgctggtgcgctgcaccaccacacgcgctcacccgaggacgtcttccgcgatttccgcgcgcgccgagccggcatcgtcaaggcgctcaccacggatgtggagaagttctatcagcagtgcgatccagagaaagagaacttgtgcctttatggtttgccaaatgagacttgggaggtcactcttccagctgaggaagtacctcctgagcttccagaaccagcactggggataaactttgcccgtgatggaatggtcgaaaaagactggttgtctctagttgcagttcatagtgatgcatggctcctgtctgttgcattctattttggagctcgttttggatttgacaaagatgccaggagaaggctcttcaccatgattaacaacctgcccactgtttatgaagttgtgacgggggttgctaagaagcaatcgaaagcccccaacggcagcagcaaaagcagcaaacctaactctaaagtaagtaaatatctttttttgtgtctgtggctcaaaagtaatgcatatgtgctacatctcatatgcattacatgttgctaatgctgttgatgcaagacccctggctcgtttgctctgccatctcttgcagccatcaaaactgaccaattctaacagtaagcccgcgaagccagcccacccaaaagaagaggaggacagcggccgggaggacgcagaggaggaccaggcgtacctgtgtgggtcctgtggggagagctatgcgaacggggagttctggatctgctgcgatgtgtgcgagaagtggttccatggcaagtgtgtccgcatcacccctgccaaggcggagcacatcaagcagtacaagtgtcccagctgcagcaccaagcggagccgagaatgacggcaccctgggaacaggacctgctcccagttaacggaagcattttagaatcattaggagctatgaagcggtgtcattagaaccgcttcacctgtttagcgtaccggtgcgcgtgccggctgttgtatcttctctcgacgtgtgttgtaaactgggcagggacatggtagctagtggtgatgtgttgtgttagcaggctgactgctgtcatcgtagtgacggatgaactgctggcgtttggaaactcgtgttcggtaattaagtgctgcttagtgtgat

SEQ ID NO: 128258 - DNA, 1246 bp, Zea Mays
tcttttaccaaattggccctctgatatcctcctattctcgcaggcctccacgcgaccacgccgcggttttgcacttctcgccttctctaatctctttgcctccctccaccaccagtccaccaccactgctacccaaccctcgcttccccaaaccctagccaagggacacggtggccggcgatggacggcgacggaggaggcgctggtgcgctgcaccaccacacgcgctcacccgaggacgtcttccgcgatttccgcgcgcgccgagccggcatcgtcaaggcgctcaccacggatgtggagaagttctatcagcagtgcgatccagagaaagagaacttgtgcctttatggtttgccaaatgagacttgggaggtcactcttccagctgaggaagtacctcctgagcttccagaaccagcactggggataaactttgcccgtgatggaatggtcgaaaaagactggttgtctctagttgcagttcatagtgatgcatggctcctgtctgttgcattctattttggagctcgttttggatttgacaaagatgccaggagaaggctcttcaccatgattaacaacctgcccactgtttatgaagttgtgacgggggttgctaagaagcaatcgaaagcccccaacggcagcagcaaaagcagcaaacctaactctaaaccatcaaaactgaccaattctaacagtaagcccgcgaagccagcccacccaaaagaagaggaggacagcggccgggaggacgcagaggaggaccaggcgtacctgtgtgggtcctgtggggagagctatgcgaacggggagttctggatctgctgcgatgtgtgcgagaagtggttccatggcaagtgtgtccgcatcacccctgccaaggcggagcacatcaagcagtacaagtgtcccagctgcagcaccaagcggagccgagaatgacggcaccctgggaacaggacctgctcccagttaacggaagcattttagaatcattaggagctatgaagcggtgtcattagaaccgcttcacctgtttagcgtaccggtgcgcgtgccggctgttgtatcttctctcgacgtgtgttgtaaactgggcagggacatggtagctagtggtgatgtgttgtgttagcaggctgactgctgtcatcgtagtgacggatgaactgctggcgtttggaaactcgtgttcggtaattaagtgctgcttagtgtgataatttcctccggtttatca

SEQ ID NO: 128259 - DNA, 736 bp, Zea Mays
aaacaaccaatatttgggataatccattggtggcatttggatttcaggagaaggctcttcaccatgattaacaacctgcccactgtttatgaagttgtgacgggggttgctaagaagcaatcgaaagcccccaacggcagcagcaaaagcagcaaacctaactctaaaccatcaaaactgaccaattctaacagtaagcccgcgaagccagcccacccaaaagaagaggaggacagcggccgggaggacgcagaggaggaccaggcgtacctgtgtgggtcctgtggggagagctatgcgaacggggagttctggatctgctgcgatgtgtgcgagaagtggttccatggcaagtgtgtccgcatcacccctgccaaggcggagcacatcaagcagtacaagtgtcccagctgcagcaccaagcggagccgagaatgacggcaccctgggaacaggacctgctcccagttaacggaagcattttagaatcattaggagctatgaagcggtgtcattagaaccgcttcacctgtttagcgtaccggtgcgcgtgccggctgttgtatcttctctcgacgtgtgttgtaaactgggcagggacatggtagctagtggtgatgtgttgtgttagcaggctgactgctgtcatcgtagtgacggatgaactgctggcgtttggaaactcgtgttcggtaattaagtgctgcttagtgtgataatttcctccggtttatca

SEQ ID NO: 128260 - DNA, 501 bp, Zea Mays
atgaagaccggccaccgtttcttcttccccggctcgctccctcctcgcccctataaatcatcgttcctgcgccacgccgagcccatcccagccttccctctcccacgctactgccaactctatgtctgccacctgcgtcgcatgccagttcctcgtcggccgccggagcttcgtcgaaacgtgcccgtggagttcgcagcaccacacgctcgtcgccaaggcctgatcgttccatctgttgtctgcccctcaacgccagcaatcgtgtttgattacccgtcgtcgtcgtgccgagatgctatgctggtcggtggccacaccgttgtcgcgccgaaatccctgtgcgtgtgctgttctgcgcccactaccgtctcaccagctcaccgtcatcaaagcatcgtcacgtctcagtcgatctcgtgttctgctctcttcgtgtgtcatccgaaggtagaagaaaggtccaatttttacacgctaccccctatcgtctacgtttaa

SEQ ID NO: 128261 - DNA, 1152 bp, Zea Mays
ctgtaggtgacgacgctcggggagcatccccggtggagcatgtcgtcgaacaccgccagggcgtcagggatgcgcccgcggacgcagagcgcgcggatgagcgggttgaacgtgaacgtgtccggcgggaacggcatgccgttgatgaggcggcgcgcgtcctcgatccggccggcgcggcagtacccgtttaccatggtgttgtaggtgacgacggtggcggaggggccgagcgccgcgaacacgcgctccgcgtcggagacgcggccgtccgagcacagccgcttgatgaggatgttgcaggggacaacgggcgggcagttcctgccgccgccggaggccatggaatcgaagagcacgagcgcttcgtcgatttccccgcgctggacgaggctgcgcaggcgtctcttggctccctcgccgcgccggggcggggccctcggctgcctcctccacttggtgtcgacatgttggtcctgctgttctggggtggctcgctgtatcttggaccttggatttggggtgtgtagagaagaagaggacgcagctcggagtgcgggcttcgggagcagcggcgccgacgacgtcgccgtcgccatgagatagagccatagaggcatagagctgtagctgaacgtctgaaccagaagaagccgagagaacaaactctcgcgctgtcacgacaggtcgcgcgggcagagcagagttcgggccgtgtgagcccaggttgggtgggtggactgggctgcgtatattacctgggcttgggttattgtgcgcgtgcctatcttcctgcttcggacagttgtgagagagaggggaagggatcgagagcgcggcggaggcgatggcgagcggagggaagggactcaacgcgactggggagttcttccggcggagggacgagtggaggaggcaccctatggcggggaaccagctgcgccacgccacacccgggctcggcatcgccatcgtcgccttcgggatctacctcgtcggcgaggccgcctacaaccgcctctaccgcccctccggcgacaaccaccactagatcgccggcaggatccgtgactcggtaagcccccacccgcgcccgcgcccgcgcccttgtttacctggagaaatgagtttgtttgaccaggcttggattga

SEQ ID NO: 128262 - DNA, 2212 bp, Zea Mays
cccacggagaggtcactctctctttctctccactccgccaatccatccgcacccgccaccatgtccggcctcctccggtggcgtcgcctcgccaacgccgccacgcgcgccgcctccaccctcaccgcggccgagtgctccccggccgccgcgtcggctgctggcgcggttgcccagccgccgccaccgcaccggcgcctccaggagcggcgcaagtgggagtcctcctcgggctccgggggcagctcctcatcctccaccgatgagcccgagccgcgccgtatccgcgcggaggcccactgcccgcgctgctccaagcacatggacatcctcttttcccaccggggccctccgaccgcggccgccgccgccggctaccaggcgctcaacctctgccctaattgccgcagcgcctacttcttccacccccacgtactagcgccgctccagggcaccttcgtcgagatcggccgcgtccgggccgacctcctcgaccaccccgccgccagggccagggagagggaccctgtcttctgggaggctatcagggccagctcctcgtcgcgcgacgacggggaaggcggcggcgtcgccgtgcacgtcccgcccggcccgccctttcaccccaaccttaacgtcgtccgcgttgccggcagcggcggcggcgggggaggtggcgctggcgacgaaggtgcggggaaggagggctggggtggttccaatctcggcagggatttacccacgcccaaggagatttgcaaggggctcgacaagtatgtgattgggcaggacagagccaagaaggtgctatctgttgcagtttacaaccactataaacggatataccatcaatctttacaaaaggggtctggagcagatttgggtggttttgatggggaagctgatgacgacaacaatgtggaactagagaaaagcaatgtcctgttaatgggacctactggctctggtaaaactttacttgcaaagacattagctcgttttgtgaatgtaccatttgtaattgctgatgcaacgacattaacccaggcaggttatgtaggagaggatgtagaatctatattatacaagttactcacggtggcagattttaatgtgcaagcagcacagcaagggatggtgtacatagacgaggttgataagatcacaaaaaaggctgaaagtcttaacatcagcagagacgtatctggtgaaggtgttcagcaggcattgctgaaaatgctggaaggcacgatagtcaacgttcctgaaaaaggagcaaggaagcatcctcgtggtgataatatacagatagataccaaagatattctttttatatgtggtggcgctttcgtggatttggagaaaactatatcggagagacggcaggattcttctattggcttcggcgcaccagttcgtgcaaacatgagggtcggtggcacttcaagtgctcaagtgacatcgtccttgttggaatcggttgagagtggtgatctaatagcttatggacttatcccagaatttattggacgtttccctatccttgtgagcctcaccgctctaaatgaggaccagcttgttcaggttctcactgagccaaagaatgccctgggtaagcaattcaagaaattgtttagcatgaatgatgttaagcttcactttacagatggtgcacttagaataattgccgaaaaggcgatgtcaaaaaatactggtgcacggggtttaagaaccatccttgagaatattctcatggattctatgtatgagattccagatgcaaaatctggggagaagcgaattgatgcagtggttgtagatgaagatgcagtaggatcagtggaccaacctggctatggagccaagattctttatggtgacggtgctttggatcaatatctatcccatataaaggtggcgggagatggagtcgcaagcgaaatggatggagaagctgagctttcaccatcccgagccattggcatgtgattcctggctctgaccgcactagtgtaacctgtaaaatctaatcccagttgtatccatgtaagtagcagccttgtaaatgaaataaatatgtgcagcgtccattgttcctttgacacctgacacacgttgcccggcagcgctcacgccttgcatgatttgaagcaggattcggaagagtgtattcgagcaggttcatgtatgtaccgtcagttatgaaatttcc

SEQ ID NO: 128263 - DNA, 85 bp, Zea Mays
gcgctacttctttgtgggaagtccgtatgtgatctgtgtgcacaggtcatgataaaatgcctgcaacatttaacattcaaaaatc

SEQ ID NO: 128264 - DNA, 101 bp, Zea Mays
ggtacagagttctcatgttcctgtcatagcggcttatggccctacaaatctagtctaaccaggttaaatggagaggctgtcagttgtcatgccaaatataa

SEQ ID NO: 128265 - DNA, 495 bp, Zea Mays
atggggcggtggaaagcagctcgatttcgaacccttgacctccgccttgcgcttgacggggttccgcacagcctcggtgccaatgttgagctctcgttcaacggacacgaggtcatccgtcgccaccgtcgccgcctcagcctacgccgccgggtacggccgtgcgctttcagcgtctcctccggcttctccggtgtcgggattagcttcacgtccatcactggctcctctatgggcttcttcagcgttcgaatttcgtccaacacagcggcaacctccctcgtccaacagagcggcaacctcccttgtcctgtgccacagcgctgtggccatccttgtaatggccttcttgagcggtggggtggcgtccagctcgttcttcagaaggggcggctcacgacattgtcaccggttctggccttgggaagtcaaagaatagatgagcagattggacggaggatggaaagatccgaggaagaagagaatgggtcgtag

SEQ ID NO: 128266 - DNA, 1713 bp, Zea Mays
atggctcttcctaaacattcacagggggcgggggcagaggtggcggcggacggctccacctccacctccacttcgcccgtggaagacgatggcggcacattagatgatctgggacaggggcagcggcagggccatcacgaagaagacaacgacgacgaccatcacttctcctcgtcctcgtccaccgggaataagcataagcagacgagctgcctcctgccagcacgcagcctgagatcaacagatgaagcaagccatagccagcaagcagactgcggggtccgttcgctatccttctccaagatcttgagcttcagaatgtgggcgcccggcggctccagctcccccacctgcttggaggattacattgctggtcagcatcaactagagcacgatgatgatgaggccgacaagctgatgaagcaggtatgtcggtcgcagtccgtgccagctacgagcgtggccaggcggcgatccagcggcaccaccgcaaaagggaaagggtcgaggagagtggcagactccagctccctcaggcgcctcagagtggtgccactgcgtgttcctcttcctcctcctccacctctccaagatgaggccgcaaggggcaccgccgatgctattgctactaccgttaccaccggagaagaggaagaagatcaagacatcgcggctgaggaggcggtgtgccgcatctgcatggtagccctgtcggaggaggcggtgttcaagctggagtgctgctgcaagggcgagctggccttggcgcacagggcgtgcgccatcaagtggttcagcatcaagggcaacggcagctgcgacgtgtgcagccaagaggtgctcaaccttccagtcaccctgcgacgcctcccggaccatccgtccgtcattcaggcggcggcggctctggcacaggcacaggcgcaggcgcaggctcagggcactcaagctgacggtggtggtggcgatcctaccgcaaccaccaacaccaccagatacagggtgtggcacggcacgccaatcctcatcatcgtcagcatgctcgcctacttctgcttcctggaacagctgcttgtcggcgaccatggcacggcggctctggccatctccttgcccttcgcctgcgtccttggcctcttctcctccctatccacaacaaagatggtgtccaggagatacgtatggatctactctgcagcgcagttcctcttcatcgtgctcttcacgcacatcttctacagatacgtgcggctgcaagccgtgatcgccatcatcctgtccgccttcgccggcttcagcgtcgccatctgcaccaattactccctcctccagattctcagatggaggcgggcgagacacgctgtggcatcgcccacctcaaccgctagagctgccgacgacggaggcctccatggttccagtcccagggatccaccatcagcaccagtggcagtggcagtgacagtggcggaggtggaccttgagatggctctgcctcctacatatgcaccacctgcccatgcgtagagagagcgctccccttcactatcatccagccgacgagttcactccagctccagctatacatccagtctgtgtgtgtatatatatacagatccactgtttgttttctgagacctcgatgtatactgaaagaaaaagtaaagacagcaaaacagacgcataaaggaatagatttgattatatagctga

SEQ ID NO: 128267 - DNA, 1209 bp, Zea Mays
atggacgacgacggcggggcctcccggtcgccctcgccgtccccgtcgcgctctccgtctccgtctccgctccccgtggccgaccccgtcacggtcgccgcggcgccgcccggccacgtcgccgtcgctatccccctccgcaagcactcgccttcctccggcggcggcggcggcggccgcgaggacgcatggagcgacggcgccacctccacgctcatcgacgcctggggggagcgcttcgtggcgctgggccggggcagcctccgccacccgcagtggcaggaggtcgccgaggtcgtctcctctcgcgacagctactccaaggcgcccaaatccgacgtccagtgcaagaaccgcatcgacacgctcaagaagaagtacaaggtcgagaaggccaagcacgactccgactggcgctacttcgaccgcctcgacgacctgctcgctcccgtgctgctcaagcccaattcttcttcctcctcggctgctgctgctgcggcggcggcggcggcagcccggagcgccgggcccatggtccctccgcgcatcaacttcccgcagcgcacccgcacgcccctccactcctccgcgggggcaaagtggaggatgccgtcgccgctgctccagccgtcggcgtcgtccgactcctccgacgggttcccgccgtccgcggtggcgaacggcaagaggcagcgcgtggaggagcccgccgccgccgccgcggacaacggcgcggagagcagcgtcagccgcgcgcagggtctgcgcgagctggcgcaggcgatccggcggctaggggaggtgtacgagcgcgtggagagcgccaagagggaccaggaactccggatggagcgggagcgcctggactccgcccggcagctggaggagcagcgcgtgcagttcttcctcaagatgcagatggagctctccaaggccacgggcggcgcggccaccgccacgcccacgcccatggccgtcccgatccctacggacggcaacggcacgcggagagcgggcgtgaccgccgaggtcgccaccagcagcaatcaccgcgttcggtaccgcatcaagggcagcaggcaccagcatgccccgcagcaggcgcattaccagaacagcacaagccccaccgggggcgatgacaacggcagcgactcggacaaggaagcccaggaggatgcggaagacgaagatgaagagagccagtga

SEQ ID NO: 128268 - DNA, 1578 bp, Zea Mays
ccccaccgcacgcatccagtggctgctgccgcctcgcccccgctcctcctcctctcccgccacccacgccgcgcaggcctcacctactggtcgtcgttgcctaggggccagaacgcagggcccacagccccgccgcccgccaccgcctccaagcctgctgcgccgctcactgtcaacctgcctcgccaagtcgcccggatctcgacgccccacctgcggccggcggcggccccgccaaggtgccctgacagacgcggagacgccaccagaaccacggagttcgtgcgctggctggttgtctgcggaagactctccctctgctccgccactgccgccacctccctgctccaaccccgcacctccgcttcgccatgaacccttcgtcgtcatccacctcctcctctggcgggtaccactctagggccgctgcctttgcttccccgcagccgcgcggcggtggcggtggcggcggccgagatgggagcgaccgcatcgacgccctcggtcgcctcctgacgagggtgttgcgccacatggcggcggagctgcgcatagatatgaggaccgatggatacgtgcgcgtccgcgacctgttgaagctcaaccttcagaccttcgccaaggcccctctcaagtctcacactgttgacgagatcagggaggcagtcaggcaggacaacaagcagcggtttagtctgttggaggaagatggcgagctgttgatccgggcgaaccaggggcacacagtaacaactgtcacatcagagagcctgctgaagcccattttgtcccccgacgaagtgtcagtttgtgtgcatggaacttacagaaaaaaccttgactcgattttgcaatttgggctaaagcgtatggcaaggttacacatacatttctcaagcggcttaccatcagatggagaagtaaccagtggtgtacggcagaatgtaaacatcttgatacatctggacgttagtaaagcacttaaaggtgggatgaagctttatatttcagacaacaaagtgatcttgacagaaggttttgatggcgtcgtcccggtgaaatactttgaaagagtcgaaacatggccaggacgagctccaataccgttccagagataacaggccatgttaccatttttcggtaattcacatacatgattttttttttggggggggggagggggggcttaatatgcattgtgggtgtggaatatatcagcatttggtaaaatttgattgtgctgggacctctcagtgattcgattgatgattttccggactccgtgaaaagctgtggttctttgtgtgtcttttcggtttttgtgtaacgaaaccaaaagacgagttagtttctctgtgcctgaggatgtcaagagggtttgccaaccatctatcctaattaatggagtacgagaagtttgcggagtatgagcagaagtactcagaggatgcagcaaccaaacattgaaaagtatcatggggagttgcctgcctgctgggctgatgcccttcctcagctcagtttggcaacttccagaagcatacgcctgaggtgcgcaacgtctgcttcggagcgagg

SEQ ID NO: 128269 - DNA, 1556 bp, Zea Mays
ccccaccgcacgcatccagtggctgctgccgcctcgcccccgctcctcctcctctcccgccacccacgccgcgcaggcctcacctactggtcgtcgttgcctaggggccagaacgcagggcccacagccccgccgcccgccaccgcctccaagcctgctgcgccgctcactgtcaacctgcctcgccaagtcgcccggatctcgacgccccacctgcggccggcggcggccccgccaaggtgccctgacagacgcggagacgccaccagaaccacggagttcgtgcgctggctggttgtctgcggaagactctccctctgctccgccactgccgccacctccctgctccaaccccgcacctccgcttcgccatgaacccttcgtcgtcatccacctcctcctctggcgggtaccactctagggccgctgcctttgcttccccgcagccgcgcggcggtggcggtggcggcggccgagatgggagcgaccgcatcgacgccctcggtcgcctcctgacgagggtgttgcgccacatggcggcggagctgcgcatagatatgaggaccgatggatacgtgcgcgtccgcgacctgttgaagctcaaccttcagaccttcgccaaggcccctctcaagtctcacactgttgacgagatcagggaggcagtcaggcaggacaacaagcagcggtttagtctgttggaggaagatggcgagctgttgatccgggcgaaccaggggcacacagtaacaactgtcacatcagagagcctgctgaagcccattttgtcccccgacgaagtgtcagaaaaaaccttgactcgattttgcaatttgggctaaagcgtatggcaaggttacacatacatttctcaagcggcttaccatcagatggagaagtaaccagtggtgtacggcagaatgtaaacatcttgatacatctggacgttagtaaagcacttaaaggtgggatgaagctttatatttcagacaacaaagtgatcttgacagaaggttttgatggcgtcgtcccggtgaaatactttgaaagagtcgaaacatggccaggacgagctccaataccgttccagagataacaggccatgttaccatttttcggtaattcacatacatgattttttttttggggggggggagggggggcttaatatgcattgtgggtgtggaatatatcagcatttggtaaaatttgattgtgctgggacctctcagtgattcgattgatgattttccggactccgtgaaaagctgtggttctttgtgtgtcttttcggtttttgtgtaacgaaaccaaaagacgagttagtttctctgtgcctgaggatgtcaagagggtttgccaaccatctatcctaattaatggagtacgagaagtttgcggagtatgagcagaagtactcagaggatgcagcaaccaaacattgaaaagtatcatggggagttgcctgcctgctgggctgatgcccttcctcagctcagtttggcaacttccagaagcatacgcctgaggtgcgcaacgtctgcttcggagcgagg

SEQ ID NO: 128270 - DNA, 2188 bp, Zea Mays
ccccaccgcacgcatccagtggctgctgccgcctcgcccccgctcctcctcctctcccgccacccacgccgcgcaggcctcacctactggtcgtcgttgcctaggggccagaacgcagggcccacagccccgccgcccgccaccgcctccaagcctgctgcgccgctcactgtcaacctgcctcgccaagtcgcccggatctcgacgccccacctgcggccggcggcggccccgccaaggtgccctgacagacgcggagacgccaccagaaccacggagttcgtgcgctggctggttgtctgcggaagactctccctctgctccgccactgccgccacctccctgctccaaccccgcacctccgcttcgccatgaacccttcgtcgtcatccacctcctcctctggcgggtaccactctagggccgctgcctttgcttccccgcagccgcgcggcggtggcggtggcggcggccgagatgggagcgaccgcatcgacgccctcggtcgcctcctgacgagggtgttgcgccacatggcggcggagctgcgcatagatatgaggaccgatggatacgtgcgcgtccgcgacctgttgaagctcaaccttcagaccttcgccaaggcccctctcaagtctcacactgttgacgagatcagggaggcagtcaggcaggacaacaagcagcggtttagtctgttggaggaagatggcgagctgttgatccgggcgaaccaggggcacacagtaacaactgtcacatcagagagcctgctgaagcccattttgtcccccgacgaagtgtcagtttgtgtgcatggaacttacagaaaaaaccttgactcgattttgcaatttgggctaaagcgtatggcaaggttacacatacatttctcaagcggcttaccatcagatggagaagtaaccagtggtgtacggcagaatgtaaacatcttgatacatctggacgttagtaaagcacttaaaggtgggatgaagctttatatttcagacaacaaagtgatcttgacagaaggttttgatggcgtcgtcccggtgaaatactttgaaagagtcgaaacatggccaggacgagctccaataccgttccagagataacaggccatgttaccatttttcggtaattcacatacatgattttttttttggggggggggagggggggcttaatatgcattgtgggtgtggaatatatcagcatttggtaaaatttgattgtgctgggacctctcagtgattcgattgatgattttccggactccgtgaaaagctgtggttctttgtgtgtcttttcggtttttgtgtaacgaaaccaaaagacgagttagtttctctgtgcctgaggatgtcaagagggtttgccaaccatctatcctaattaatggagtacgagaagtttgcggagtatgagcagaagtactcagaggatgcagcaaccaaacattgaaaagtatcatggggagttgcctgcctgctgggctgatgcccttcctcagctcagtttggcaacttccagaagcatacgcctgaggtgcgcaacgtctgcttcggagcgagggagcatggcatgggcggcatttgcaacggtgggcacagcccagggctccgtttcatggccaacgactgctatgcaagcagtccttctttacaagcgtgcaagcaaacatccggtccattagattacgatccaaccacagatataactataatttgttatggttttttataaagattattgagttggtggtgaaaaggtttaagtattaaatgtgacctacggttgaatcacgatctaatggaccagatggtttgcttatggtttgcttgcacgcttgcaaagaaggactgcttgcatagcagtcgttgccccgttctatgttgttggtacctatcttgcttctctgatcgatcaataaaaggagacattatttgagggaccctttttgggtgccttgtatgctgtagctgttcaagtggctgaataaggctgcaagtcttgtgtaaggtgagactctgatgcataagctttgcaacttgcaagtgatgttggattttggaatgttatcaactttagtacacgttttctggccgtctgatcgaatcctggacaccaggggtagaattaattggtcgatcagagctgttaatcgtccaggccttgaaaaacg

SEQ ID NO: 128271 - DNA, 2107 bp, Zea Mays
ccccaccgcacgcatccagtggctgctgccgcctcgcccccgctcctcctcctctcccgccacccacgccgcgcaggcctcacctactggtcgtcgttgcctaggggccagaacgcagggcccacagccccgccgcccgccaccgcctccaagcctgctgcgccgctcactgtcaacctgcctcgccaagtcgcccggatctcgacgccccacctgcggccggcggcggccccgccaagctccgccactgccgccacctccctgctccaaccccgcacctccgcttcgccatgaacccttcgtcgtcatccacctcctcctctggcgggtaccactctagggccgctgcctttgcttccccgcagccgcgcggcggtggcggtggcggcggccgagatgggagcgaccgcatcgacgccctcggtcgcctcctgacgagggtgttgcgccacatggcggcggagctgcgcatagatatgaggaccgatggatacgtgcgcgtccgcgacctgttgaagctcaaccttcagaccttcgccaaggcccctctcaagtctcacactgttgacgagatcagggaggcagtcaggcaggacaacaagcagcggtttagtctgttggaggaagatggcgagctgttgatccgggcgaaccaggggcacacagtaacaactgtcacatcagagagcctgctgaagcccattttgtcccccgacgaagtgtcagtttgtgtgcatggaacttacagaaaaaaccttgactcgattttgcaatttgggctaaagcgtatggcaaggttacacatacatttctcaagcggcttaccatcagatggagaagtaaccagtggtgtacggcagaatgtaaacatcttgatacatctggacgttagtaaagcacttaaaggtgggatgaagctttatatttcagacaacaaagtgatcttgacagaaggttttgatggcgtcgtcccggtgaaatactttgaaagagtcgaaacatggccaggacgagctccaataccgttccagagataacaggccatgttaccatttttcggtaattcacatacatgattttttttttggggggggggagggggggcttaatatgcattgtgggtgtggaatatatcagcatttggtaaaatttgattgtgctgggacctctcagtgattcgattgatgattttccggactccgtgaaaagctgtggttctttgtgtgtcttttcggtttttgtgtaacgaaaccaaaagacgagttagtttctctgtgcctgaggatgtcaagagggtttgccaaccatctatcctaattaatggagtacgagaagtttgcggagtatgagcagaagtactcagaggatgcagcaaccaaacattgaaaagtatcatggggagttgcctgcctgctgggctgatgcccttcctcagctcagtttggcaacttccagaagcatacgcctgaggtgcgcaacgtctgcttcggagcgagggagcatggcatgggcggcatttgcaacggtgggcacagcccagggctccgtttcatggccaacgactgctatgcaagcagtccttctttacaagcgtgcaagcaaacatccggtccattagattacgatccaaccacagatataactataatttgttatggttttttataaagattattgagttggtggtgaaaaggtttaagtattaaatgtgacctacggttgaatcacgatctaatggaccagatggtttgcttatggtttgcttgcacgcttgcaaagaaggactgcttgcatagcagtcgttgccccgttctatgttgttggtacctatcttgcttctctgatcgatcaataaaaggagacattatttgagggaccctttttgggtgccttgtatgctgtagctgttcaagtggctgaataaggctgcaagtcttgtgtaaggtgagactctgatgcataagctttgcaacttgcaagtgatgttggattttggaatgttatcaactttagtacacgttttctggccgtctgatcgaatcctggacaccaggggtagaattaattggtcgatcagagctgttaatcgtccaggccttgaaaaacg

SEQ ID NO: 128272 - DNA, 1482 bp, Zea Mays
ccagtggctgctgccgcctcgcccccgctcctcctcctctcccgccacccacgccgcgcaggcctcacctactggtcgtcgttgcctaggggccagaacgcagggcccacagccccgccgcccgccaccgcctccaagcctgctgcgccgctcactgtcaacctgcctcgccaagtcgcccggatctcgacgccccacctgcggccggcggcggccccgccaagctccgccactgccgccacctccctgctccaaccccgcacctccgcttcgccatgaacccttcgtcgtcatccacctcctcctctggcgggtaccactctagggccgctgcctttgcttccccgcagccgcgcggcggtggcggtggcggcggccgagatgggagcgaccgcatcgacgccctcggtcgcctcctgacgagggtgttgcgccacatggcggcggagctgcgcatagatatgaggaccgatggatacgtgcgcgtccgcgacctgttgaagctcaaccttcagaccttcgccaaggcccctctcaagtctcacactgttgacgagatcagggaggcagtcaggcaggacaacaagcagcggtttagtctgttggaggaagatggcgagctgttgatccgggcgaaccaggggcacacagtaacaactgtcacatcagagagcctgctgaagcccattttgtcccccgacgaagtgtcagtttgtgtgcatggaacttacagaaaaaaccttgactcgattttgcaatttgggctaaagcgtatggcaaggttacacatacatttctcaagcggcttaccatcagatggagaagtaaccagtggtgtacggcagaatgtaaacatcttgatacatctggacgttagtaaagcacttaaaggtgggatgaagctttatatttcagacaacaaagtgatcttgacagaaggttttgatggcgtcgtcccggtgaaatactttgaaagagtcgaaacatggccaggacgagctccaataccgttccagagataacaggccatgttaccatttttcggtaattcacatacatgattttttttttggggggggggagggggggcttaatatgcattgtgggtgtggaatatatcagcatttggtaaaatttgattgtgctgggacctctcagtgattcgattgatgattttccggactccgtgaaaagctgtggttctttgtgtgtcttttcggtttttgtgtaacgaaaccaaaagacgagttagtttctctgtgcctgaggatgtcaagagggtttgccaaccatctatcctaattaatggagtacgagaagtttgcggagtatgagcagaagtactcagaggatgcagcaaccaaacattgaaaagtatcatggggagttgcctgcctgctgggctgatgcccttcctcagctcagtttggcaacttccagaagcatacgcctgaggtgcgcaacgtctgcttcggagcgagg

SEQ ID NO: 128273 - DNA, 1122 bp, Zea Mays
tactggttttatttcgttggttgattgattgatgaactgctgtcgaacttgttaggctacttgatttgtgctaaacgctgtttcttctcattactcctagcttgtataggtagacttgccttttggaatgctggcatgctcttgatttctttggattatgaattttgccgtgaactatgagcaatactcagtttgatgagaaattgtgacattttggctggcgtgcaggcagtcaggcaggacaacaagcagcggtttagtctgttggaggaagatggcgagctgttgatccgggcgaaccaggggcacacagtaacaactgtcacatcagagagcctgctgaagcccattttgtcccccgacgaagtgtcagaaaaaaccttgactcgattttgcaatttgggctaaagcgtatggcaaggttacacatacatttctcaagcggcttaccatcagatggagaagtaaccagtggtgtacggcagaatgtaaacatcttgatacatctggacgttagtaaagcacttaaaggtgggatgaagctttatatttcagacaacaaagtgatcttgacagaaggttttgatggcgtcgtcccggtgaaatactttgaaagagtcgaaacatggccaggacgagctccaataccgttccagagataacaggccatgttaccatttttcggtaattcacatacatgattttttttttggggggggggagggggggcttaatatgcattgtgggtgtggaatatatcagcatttggtaaaatttgattgtgctgggacctctcagtgattcgattgatgattttccggactccgtgaaaagctgtggttctttgtgtgtcttttcggtttttgtgtaacgaaaccaaaagacgagttagtttctctgtgcctgaggatgtcaagagggtttgccaaccatctatcctaattaatggagtacgagaagtttgcggagtatgagcagaagtactcagaggatgcagcaaccaaacattgaaaagtatcatggggagttgcctgcctgctgggctgatgcccttcctcagctcagtttggcaacttccagaagcatacgcctgaggtgcgcaacgtctgcttcggagcgagg

SEQ ID NO: 128274 - DNA, 1834 bp, Zea Mays
cttatcgtcgccgctgggcgctgcctcgtcgcccgacaccgatggccgccgcacctccgcctgctgcgctgccgtcccacatgtccgccgctctcatcaccttgccctcctcccactcctatccttccctccccgcgcaacccaagcccccaacccccaggccccctcaactccacctcgtcccccgcgtcgccgcataccccgccgcatccgcggccaccccacgccgcaaagcctcctccgcttccgccacggaacgtctccgcgttctcgtacgccgtggcgaactggacgatgccctccgcctcgtcgactcactcgcgggcctcaacccaccctcgccagccgcggtggggccctgcgccgcgctcatcaagaagctctgcgcgtcgggccgcacagcggacgcgcgccgcgtgctggctgcgagcgggcctgatgtcatggtctacaacgccatggtggcgggctactgcggggccgggcagctcgacgccgcgcgcaggctcgtggcggacatgcccgtggagcccgacgcgtacacctacaacacgctcatccgaggcctctgtggccgcggccgaaccagcaacgccctggcggtgctcgaggatatgttccgccgcggctgcttgcccgacgtcgtcacgtacaccattctgctcgaggccacctgcaagaggagcgggtacaagcaggccatgaagctactcgatgagatgcatgacaaggggtgcgccccggacattgtcacctataatgtcgtcctcaatggtatctgccaggaaggccgggttgaggacgcaatggagttcttgaagaacttaccgtcctatgggtgcgagccgaacactgttagctacaacattgtgctgaagggtttgttcactgcagaacggtgggaagatgccgagaagctcatggaagagatggcacacaagggttgccctccgaatgtggtaacatttaatatgctcatcagtttcttgtgtcgtagaggattggttgagcccgcaatggaagttcttgagcagatgccccagtacggatgcacgcctaattcattgagttacaacccgcttcttcatgccttctgcaaacaaaagaagatacataaagcaatggaatttgtggaactaatggtgtccaggggttgttacccagacatcgtttcatacaacactctacttacagcactctgccgcaatggggaagttgatgttgctattgaattgcttcatcaactcaaggacaaaggctgtagcccggtcttgattagttataacacggtcattgatggccttactaaggctggcaaaacaaaggaagcgttagaactgttggatgagatgaccagtaaagggctccaaccagatatcattacttattcgacaatagcttctggtctttgtagagaagacaggattgaggaggcggttagaacattttgtaaagtgcaagatatgggtataaggcccactgcggcactgtacaatgctattcttcttgggctctgcaaacggcgtgaaacacacaacgctatcgacctgtttgcgtacatgatatcgagtggctgcatgccaaatgaatcgacttacactatacttgttgaaggcttggcttatgaaggcttggtaaaggaggcaagagaattgtttgctcaattgtgctctagaggagttgtgaataagaaacttatgaagaaaggatccattaaaatgctagatgggcctacacaaacttagtgatgatgagttagtgtacactatatgaacatctttggcaggggactttcttgacagtacggttgtgatgtcttaactgatgccacttt

SEQ ID NO: 128275 - DNA, 551 bp, Zea Mays
atggctctgtcgaggacggcgtggatcgccggcggtctggtcgcgcggctgctgctgatcgccgtcctggccttgaccgtgcagtcgaggttctcgaacagaacctactacgacttcaaggccgccggctacaacaacgatctccagagctacacgtacatgctgcatgcgtgcgccatcggggacaaaaaaaaaaaaaggtacgcggtggtcgtctacctcctctgcaggggcaagcggatgatgacgcccaggcgcccagctcgctcatcctcgacgtcagtatgtacgccgacattgtggtcaccgtggtgctggccagcggcgtgggcgcgggcttcggcgccaccgacgacgtcttggagtacgtcgagcatggctcgcggtgggcggaagaggccacgcaagatctcgtcaagtactaccacaaggggctcatcgccatcgtcttcctcctcatcggcatggtcctgtccgtgtgcgccactgtcgtctccaccaggctccgggtcagggcagcaagcaacgacgacatcgccgacgacgtctga

SEQ ID NO: 128276 - DNA, 531 bp, Zea Mays
atggcgctgtcgcggaaggcgtggatcgccgccggcatcggtgcgcggctgctcatgatcgcggccctggccgtcagcgtgccgctcacggtccacaaccacaccaagcgcgactacggcagcgatgacttctacaagctccagagctactcgtacgcggtggcggtggcggtgatcgcgatggccgccggcgtgctgcagatccccgtctccgtctacctcctctgcatgagcaagcgggtgacgcccagcgccctcatcctcgacatcagcctgtgcgccgacgtggtggtcaccgttctgctggccagcggcgtcggcgcggggttcggcgccaccaacgacgccttgcggtacgtccaccacgtgaggtgggacgacgccggcgtcaaagacgatctcgtcgactactacaacaaggcgaccgtccccgtggtcttcctcctcctcgggacggtgctgtccatggccgccactgtcgtctcggccaggctccgggcccgggcgaccgatgaccacaccgacttctga

SEQ ID NO: 128277 - DNA, 984 bp, Zea Mays
gcgcacccagatagacagagccacctcacccccacttcgccctccactcccggtctcccgcaccgtgtccgtgccgacacccaaggcccgccaggaaagcgaaagagagcgtcagtcacgcacgcaccgatgccggacgtgtcgccgctactgccgccggggaagccaccggccaccacggcgcggttcgcgcggtgcgcgtcgagcgcgaacgacgagctccgcagcttccgcgcctgcctggcctggctctgcgtggaccactcctcctccccgcgcgtggcggccgtgggctcctgggcggtcttcctcctcctcgccgtcgccgcgcccgcggccgtccgcctcctgggcaccgctccgccgcggcccttcgacgggcaggtccaggtctcgctcaccctggccgcgtcgctcgcctacgtctgcctccgcgcgctcctccaccgcgcggggggcctccgccgcctgctccacctcgacagcctccgccgcgactccgaggacgtgcaggcgggctacgccgcgcagctcgcgcgctccttccgcgtcctcgcctgcttcgtgctcccctgcgccctcgccgaggccgcgtacaaggcctactggtaccgcgccgccgccgccgcgtacggctccccgtggtggtgggccgccgcggcctgcgccgtcgaggtcgcctcctgggtgtaccgcgtcgcgctcttcttcatggtctgcgtcctcttccgggtcatctgctacctgcagatcctgcggatggtcgggttcgcgcgcgagttcggcaggttcgccgacgtcgccaccgtgctgcagcaccaccgccggatcagggagcagctcaggaagatcagtcaccggtaccgcaagttcatagtctgcagcctcgtgctcgtctccgccagccagttcgccgcgctactcgccaccaccaggccgcacgccatcgtcaatctcgccaccgcaggcgagctcgcggcttaa

SEQ ID NO: 128278 - DNA, 1916 bp, Zea Mays
cagcgagcggcccaactggaacgcgccgcgccatccaccctcgccaactcccagccgcgcggatctctcttcccgactcccgagtcccgagcggcccacgcgcacccagatagacagagccacctcacccccacttcgccctccactcccggtctcccgcaccgtgtccgtgccgacacccaaggcccgccaggaaagcgaaagagagcgtcagtcacgcacgcaccgatggcggacgtgtcgccgctactgccgccggggaagccaccggccaccacggcgcggttcgcgcggtgcgcgtcgagcgcgaacgacgagctccgcagcttccgcgcctgcctggcctggctctgcgtggaccactactcctccccgcgcgtggcggccgtgggctcctgggcggtcttcctcctcctcgccgtcgccgcgcccgcggccgtccgcctcctgggcaccgctccgccgcggcccttcgacgggcaggtccaggtctcgctcaccctggccgcgtcgctcgcctacgtctgcctccgcgcgctcctccaccgcgcggggggcctccgccgcctgctccacctcgacagcctccgccgcgactccgaggacgtgcaggcgggctacgccgcgcagctcgcgcgctccttccgcgtcctcgcctgcttcgtgctcccctgcgccctcgccgaggccgcgtacaaggcctactggtaccgcgccgccgccgccgcgtacggctccccgtggtggtgggccgccgcggcctgcgccgtcgaggtcgcctcctgggtgtaccgcgtcgcgctcttcttcatggtctgcgtcctcttccgggtcatctgctacctgcagatcctgcggatggtcgggttcgcgcgcgagttcggcaggttcgccgacgtcgccaccgtgctgcagcaccaccgccggatcagggagcagctcaggaagatcagtcaccggtaccgcaagttcatagtctgcagcctcgtgctcgtctccgccagccagttcgccgcgctactcgccaccaccaggccgcacgccatcgtcaatctcgccaccgcaggcgagctcgcgttgtgctcggtcagccttgtggcgggtctgctgatgtgcctgtacagcgcggcgaagatcacgcacaagacgcaggcgatgacgagcgtggcggcggcgtggcacgcggacgccacggtgcacgccttcgacaacgaccaggagaacccggacccggacctgccgcccaccgcgggctacctggcgcccgccaacgcctaccgcgtggccgccggcgacgagtccggcagcggcggcgacgacgacgacgacagccggagcgagtgctcctcgctcgacgacccaaagtacgtgccgttccaggccaacaacatcagcttccagaagaggcaggcgctggtgacgtacctggagaacaaccgggcggggatcacggtgtacggcttcgtggtggaccgggcgtggctgcacgcgctcttcatgatcgagttctcgctcgtcatgtggctgctcgggaagaccgtcggcatctcctgagctcacgcacacccttctttttgccggctctggctcctgtcaggtgcagagttctcagcggaggattgtacaaagtgagtgcagatacaagatactctgatcatctgatggagatcagaacagctgctttgatttgtaggttcatttgacagctcgtatgttagatatcgcaacttctagttcgtgtgttttgatttgtgcttgttttttttttcactgcgttgcttcctccggtatgtcggggtttttttttttttttttttgtaactgacgcttcatagacacaagtgatgcacgtgctgtggtgtgctgtgaaatggaatttgcaaggaaaagaaaaggctcggctgagtaaacacgtt

SEQ ID NO: 128279 - DNA, 3033 bp, Zea Mays
aggcccctctcgccccagcaccgcagccgccgagccaagcgactcgcctaaagaaactgccaattcaatacgacgactaatctcgccgccgccgccgccgccgccgccgccgccgggttcttcatccgcagggacagagttcttcatctccgcaccaatacttttctcctttgattgatttctagagtttaatccgaggcgctcgtcgtgtggtgggttgcgccctaagacctcgcccggaaggtcaggaggtttaatctagctgaagggttcttcccgccgctgctcgtcgtccccattgcggccttgccgccggcctgcaaccgacggcaggcaggccgggccttcatcctcctcccaatcaccaggaggagtcgcccctcatcgtcctctcccttatactgcacggattcgtttggctcttggtggtgccctgctaatgcaatcgagtaatctcatctagtctaggctttccatccgcggtttaggttcttcctttcaagcgcgcacaagcatccacccaggtacgggctggtgcagtttttcttccctgtcccctcatgccctacgggaggtccacccctggcccggcctctcaagcgtggctggtgggtggacgttgagtggtgcctgcagagccatggatcaggacacaccgacattgaagccgggatggatgcagcatgacaaggcagcaggcgctccaaacatctggactatagcttcctcccactcagattatcaagctgcgggtggttcgtcaagaagccattcatctgaacattaccgtaaccatggttcccagcaatcatcatcaaggagaagttcaggctcgaatggatctcgccagcctgaccgggatgcaattgggaagtcaagggactatttcaatttcggaaagtccaaggacagggatcggcagagggactttgattcccgtgattgggagagtaggtcggctggtgcagttcgtgatgatttcaagtccttcagcacatgcaaatctgaaagggataggatgaatcatgcccgctcaaaggcagacacatggagtaaagccagcggtagcacctctagaaataatgcagttagttcctctactggaactgttgttaactctgttagaaatgcagctttggggacctccataagcaatgcttctgtacggacctcagtaagaaatacttctattagtaatgctgtaagcaatgccagcaatgctgctagcataacttttgaacgggaatttccgcagcttagttcagaggacaaaaatggaaggcaaggcataagcaaaatcccatctgctggtatcagcacctcaattcagaatgtacctctggtatcttctgatggctggagctccatgctagcagatcttcctttattaagtgatccaaagaaaagcctagccacttcttctctattgcacattgctcctagtaaacagactgaagtggtgccaaacactgggactgcattaagcatggcagagacagtgatgcaagctcctctgagaatttccattgggcctgagttatcgaccgaggctcagaagattgaagaaagaaccttgaagcagcttactctaagacctattacacctccagcaagcaaatcttctgctcttagttctttgaaaataaaaggtacaaggcttggagatcatcctactggtcctagtaagacctcacaactattaaaaatacagtcagccaacacttcttctagagctccagttaaagcagatgtttcaaagctctctcagccaggaagcttccaagttctcagtcgagagcaaaacggtactgcacacaccgccaaagactgtcctgtgaaacctgtgagtcctccaactcctttggcgtcgctggaaacacagaaaaaaacagtggcgagccaaaagttgaagtttggcaccaatgagagtcttctgcccctgcaaggtccatctcgtgacagaaagtcaaatgcaagagacaaggttagattctttgagatgctacggaccaagtcttcaaatggttcaagcactgcctttgagccaggaagccaaccatccccatccagcttagttgatgtgaagcaggattcttctcttaatcttggaaatgacttccacgtgttctgttctgagatcaaatgcacggagcacaggaggtgtttctgtgaagaagcaaattcttctgatgggtctcagaggcacctatctgataccgaggagcacattgcatccttgaaactgagcgttatgggtggaatgcctcagcagcctctagttgaaaggagagaagctaactcatcatctgaacctgcggacacaggtgatgaaggatttcagtcgttcctatcggacagcgcagaagtcagtttgtcctcaacacttgcagattcagatgatggatggaatagatcccaatctggcaatgaggaagcaagttcattatcagaggatactgaatcagatgatgatttccatccagctgacatttctccagaagataagcgtttcatgatgttgcttggttggaaagaagatgaaatagtgcaagtgacacctttggatttcgacgagattgcagacacggtaaaaggctgtgaggaactcaagaagaagcttcagtctatgcagttcaatgaagaagtcaagagcattctcctccatattgagctggacgagaagcagcagcagcagcacaagagtacaggggactaaagataattggaacacccgaggccggccatgttgggacgctgagaatcatttttggcatgagtttttgtcttggatcgttagcaaggcgatatattttttcctatattgccgcgtgtccaacagttagggatttagtgctcacagataggtctgacatgtttttcgcacaccgaaaggagctttggttttccctgtgtaagtccgatcttggaatcatgctgccacatgcctttgtttgctgttaaaaacatgggttttggcatgaaaatgcatctcaaaaggttaattcatgaaaagacgtctcaaaaggttaatta

SEQ ID NO: 128280 - DNA, 1353 bp, Zea Mays
cgagcagggcgggtaggcgagcaaggcaaagcacgccaagcgcgagtccgtccaacaaacagcccatcactcactcgccgcggcgaccatccccgcagttctcactccagtctccacacacctctcacgagcgcgcgcgcgcgcgtccgccatggcgccgtctaagcctttattccccgtcgccgtccccgcccccgacccgtccgacgaggtcgtgcgcgagttcggcccactgctccggatctacaagagcggccgcatcgagcggcccctggtggccccgcccgtggagcctggccacgacgccgccacgggcgtccagtccaaggacgtccacctcggctcctactccgcgcggctctacctgcccccaagcgccggcgccggcgccaagctgcccgtcgtcgtgtacgtccacggcggcggcttcgtggccgagtccgccgcctcgcccaactaccacctcttcctcaacaggctcgccgccgcctgccccgcgctcgccgtctccgtcgactaccgcctggcgcccgagcaccctctgccggcgggctacgacgactgcctcgccgcgctcaagtgggtgctctccgccgccgacccatgggtcgccgcccacggggacctcgcccgcgtcttcgtcgccggggacagcgccggcggcaacgtctgccaccacctcgccatccacccggacgtcgtccaggcccagcgcgcgcgacaggccggcgcgccgccgctcaagggcgccgtgctcatccacccctggttctggggctccgaggccgtgggcgaggagcccagggaccccgccgcgcgcgccatgggcgtcggactctggctcttcgcgtgccccgagaccaacggtctggacgacccgcggatgaaccccttggcgcccgccgcgccgggactccacacgctggcgtgcgagcgcgtgatggtgtgcgccgcggagggcgacttccttaggtggcgcggccgcgcgtacgccgaggcggtggccgcggccaggggcggtgacctcggggaggccgctggcgtcgagctgttggagaccatgggagagggccacgtcttcttcctcttcaaacccgactgctacgaggctaaggagatgatgcacaagatggtcgccttcatcaacgccccctgaggcgtgaggtgcttgtgttcgcgtctcagaatcatcgttggcgtggctaggtatgcgccaccgtgtcagacatttatcgtgacagcgtgcaaaataaaggccttggatccgtgagaaattggcttaataaagtaggttgtttagtttggaatttaactttttaaaatttaaatataaactcaccttaaatttataga

SEQ ID NO: 128281 - DNA, 1233 bp, Zea Mays
aatcaactgaaatatgccaactattattaggagactaaaactttgctggcgtcgatcatgaacagtattgcttcatgattctagattccgttctagtgtgactactgatctttgggctcttaagcatctggtgagttgggtgcggagctgagcgctctcaccatgctcagcaggttctcgcgtgacgaaccgccggggccgcccgcagcctccgcctcctccttccacttggccgcgctcttccgcatctcctcgcttgccatcacattcctgacgtgcatggcgacctgctccctctccaccgttgcctccagccggacgccgacaccccagacctcgcagctgtacttgcagttggtgtactggtccgagaagcccggccagcacaccatgggcacgccggcggccagactctcgcacgtcgagttccacccgctgtgggtcaggaagcagccgacggccgggtgccgcagcacctgctcctggggacaccacgcggtcacgtggcaccgccccgccgtctcagccttgaaggtcgagggcatcgcgtccaggccggcgccgccgccgccgcggacgaggttgtccctcatggaccagaggaaccggtggccgctcgccgcgaggccccacgcgaactcgttcagctgctccggcgtcaccaccgtgtggctgccgaagttgacgtacacgacggagccccgctcttgcgcgtccagccaggcgaggcactcggcgtcctgcttccacaggctcaggccggtcgactcggtgctgccgctggcggaggcgctgctgtctcggtcgtcgtcctggcggaggagcaggcccaggggcccgacggtgtacacgcgcgggtactcggcgcgcagcgcggcgagcacgtcggcctcgaggccgtcgaaggtgttgaggatgagggcgccggccttggcgcagctgttcgcctccgactcgttgaagcgcagaccgaagtcgtccgggtcggtggtgcggaggaagctcgagaagtcgccgaggcggatcggcggcaccccggggatccagtcgatgaccgtcgtctcgaggtagccgttcgtcaggaaactctcgtctacaggccgccggccgcgcgccacgttggcgtcagtgtcaccgcgaaagggagcaggctaggtgcaagcgtgcgtgtgcaagattaatttgggcggtgcttagtgcttacccttgagtggcacgtaccctctttcctgc

SEQ ID NO: 128282 - DNA, 667 bp, Zea Mays
cgcaagcttcgaaccttcgacccacgcggcgcggctccagcaccaacccccggcggcgatgcagatggcagcggcagtggccccaaccgacgccccggcctcggcggctgctccggcgccgcacccgccccacgcgcacgcggcgcacggaccgccacacccgcaccaccacatgccgcaaccgcggtgggtggtcatcccgtaccctccaccacaccaccccatggtcgccgcgcctccgccacctcctccgccgttcgtcaagcatttcacgccgccggtatcggtaacaccgccgcctgctggatccggcgggaatgggggcgacgataaccggaccatctgggtgggcgacctgcagtactggatggatgagaactacctccacagctgcttcggtcccggcggcgaggtggtgaatattaaagtaattcgcaatagacactcgggagtttccgagggttatggttttgtagagttttactctcacgtttcagcagagaaggcactacagaatttttctggtcatgtaatgcctaatactgagcgagcttttaagttaaactgggcatcatatagtatgggagaaaaacgctcggaagttccgcctgatcactcgatatttgttggcgatttggctgttgatgttactgatgagatgttgctg

SEQ ID NO: 128283 - DNA, 902 bp, Zea Mays
tatgcattttgttgttctcaaagaagcttgcgaaaaggcggaagagtgtcaactttgtagcacagaaggttaatgaagccatgatggtgagggtgagacaatgggtagagccacgcagaattgctgttgcactctgcatgcatgccatacatgctagcacagcaggggttcttcaaaaattacgcgacgacagggagtctaggggtgattatggccaccggcgcaacggcaatggcatgtactacgggacgccattctacggtggatatgggtacgcctcaccggtcgcccacccaaacatgtatgccgcggcctacggagcctacccgtactatggaaaccagcagctagtgagctgatgtggcgatgctctctgctcagtttcctccctcggatcggagggaggaaaccaagtttttggtcctgtaagatagtagctacaatgagatattataggcggccatacaaatgggcgagagagacgagaagggtatgtgatgataatgctacctgcagacttgtgctgctatagcagaacataaaagagcttgtagtagacaataaaaacctacttttgtcttggaaattttgactcgctataaaactagagctatcggttgttgtgaccactgtttgcatacacaattgtttgggatgatatctgatgggttctctaatttggctctagactatgtccacctcatttgagttgagcttgctaaataactcattgattgtgagattctcaaagttaggggacttgatgattgtcgagaccttcgctttccaaaccttccgatctaggggcatgtggcaattttagaatctcatagggtaggtgaagtttgtttttccgcaccttattcgcaatttactaaaagctataaaattgaataaacaaa

SEQ ID NO: 128284 - DNA, 729 bp, Zea Mays
cttccttggtccaatggcgtcgtctctcggctccgacgacagtgccggctccgccgccgccgtctgctgcatgtgcggcgaccatggcctgccgctggagctgtaccggtgcgacctctgccgcatccgtacacagcacaggtactgcagcgacctgtacccggcggcggcggcggcggggccgtaccggagctgcaactggtgcctcaggcagggcggcgcagacgtcggagggggttgtcattcgccgtcaccggttaataaggtgtccgcggcggcaggaacaggaaccagacggaggatcagcatcaacggttctcgtggcgacggcgagtcggcgaccgctatggatgctccagcaggtcagcgttctcggcggaccccaggaagccgatcaagaagcctgaaaagggccgtgaagaaagagcggtgcagcggccggagccggtgctcacgacgttgtctaaggaaacgaggggggtggtgcagcctgccaagccgcggttcaaggtgaagaaggtgcggcggtacaagttactcgcggaggtgatctgctagtatcagtaatttagtatagtagtagtcagtggcggaggactaaataaaattaagatatagactgggtcgctgggccattgtagtttggatgaattgcttatgaaatattacttattagtctatggttagcagatcatgtatatagtcatgtaaaataatttttactatagg

SEQ ID NO: 128285 - DNA, 907 bp, Zea Mays
ccaaactcaatctataggctcgagcccatggtgtcacccggctccaacgacgacgacgacgacgacggccgcgcctccgctgccgccgccgtctgctgcatgtgcggcgaccaagggctgccgggcgagctcttccagtgcgccctctgcctccggcggctgcagcacagatactgcagcgccgagtacccaaggacggcggcgtactcggtctgcaactggtgcctgacgacgacagataagcaagtcggcggaggttcgccggcggcggctaagtcgcttacgacgatggcaaaacggagggcgtcatcaaggcagctgaacggttctcgtggtggccatcatggcgacgtggatccgtactctggtggtggtggttctggcggatgctcgaggtcagcgttcccggcggagccccagaagccggtcaagaagcccaagaagagccacgagggggcggcggcagcgaaaggaaaggaggaggtgccgaccggcgctaggacgaagccgccgttcactgcgaaggcgcgagtgccgcggtataagctcctcgcagaggtgatcagatgaaataatgaaaataaataaaacggcgatgaatatcacttgcaagccattattactattagcttgtggagaaaaggttttaggtcactactggataatccgatgatcgccgccggagcatctggtggattgaagataaacaaaaaagagtgcaagggacaaagagattgaacaacaatccgcgggggcggcgcaacgccaataatcgccaacctagctagccccagaatcggactgagaaccgcgctcgcgtcaggcagctttgcgtggacccgatctaagagatcgtgtatatgatcaagagttgctcaaaatagtctaagacatgcatgcttagcct

SEQ ID NO: 128286 - DNA, 978 bp, Zea Mays
atgcccggattcacggtggcgcaggcgctggaggcgtccacagggggcgacaccgtgaccctgcccccgttcgacatcagcgcccctcccccctaccaccgtcgatttgtagaagctcctcgcccgtgcttgcttcaccagcgattcggggaggccatgcccccctcggtcgcaccccctctctcctcctcgccgcctcctgcctcctccccctcgaccgtatctacctccgtccgtggcctcgctaccaaggtcgaggtcgtcgagatcgacctcaccgaggaagacactagctccttggcccacgcgccgcggcgccgcccctggaccggtcgagaggagcggagatccatccatccggtcgtcggctgtaatgaaaatctgggcctgctagagccaggagttttcgttgcaaatctgcgtctccgctatgggttcaggcaacttgatcgtgaagaaggtgtactagcactgctggaactgaaggtgagggtggaggctgatccccatggcattcaggattgggatccagctgatgcagctggtctagcgtatggtgctttgacgctgacatttgtgataatagatgagtgggatgtgaatagcatctgtcggcgattcacattgcatacgagaatctacttaggatcaaaaggctgtagcctgtacacgcggcgcccggcgcccgggcagaagaacgtggtcacggcgcagggccgcgaggaccccaaccagagcacgagcatcgtcgtgcagggcggcaaggtggcgaccgccgccgacctggccccgctcgtcgccaacatctcgtcctacctcggccgcccctggaagcgctactcgcgcgccgtcttcgcgcagaccaagatggaggcgctcgtccacccgcgcggctggcttgagtggaacgccaccttcgcgctcgacacgctctactacgccgagtacatgaaccgagtctgctgcaagccaatttag

SEQ ID NO: 128287 - DNA, 81 bp, Zea Mays
gcgaaacagcccatcacggctcagggcacagccggctcggtccgcaccttctcgctcggcgccatccgatccatctggtcc

SEQ ID NO: 128288 - DNA, 924 bp, Zea Mays
ccatctggtccgcggtcatctgtcagtttgtttgcgcgaaaaaggataggaatcctcttgtgtcctggccgtcggccgtcgctgcgtcgttccagatttggggaaggaaatccggcaccgagattcgagtcgaaaaggtgagctgccgtcccgctccttgtcttgtctggaaacagtcgtttcgcgtgacgttggcaggctagccgcgcgcgcttgttggaggacatcatttgctagatggcgcgtaccaagcagaccgctcgcaagtccactggaggaaaggctcctaggaagcaactcgctacaaaggcagcccggaagtctgcacccacaactggaggagtgaagaagcctcaccgttaccgcccagggactgttgctcttcgtgagatccgcaagtaccagaagagcactgagttgctgattaggaagctgccgttccagaggcttgtgagggagattgctcaggatttcaagacggatctgcgcttccagagccatgccgtgcttgctctgcaggaggcagcagaggcctacctggttggtctcttcgaagataccaatctgtgcgcgatccatgccaagcgcgtgaccatcatgcccaaggacattcagctggcaagaaggatccgtggcgagagggcgtgagtctgtcgacgggaggaagaactctgcgctcgttttgtgtgttcgcctctctcaccctgtaagttttgtgaaaagataatctagtaaactgtacttggcctgtttgactgtagccgcagtagcgtatgcgcatactattggctgttgtcgtgtctggagtcttttatccatccattctactacttaataatcgggttgctgaacgtgtatccagacttaactgtgtgtttggctgtctgaacctctgaatcgttattgatgtcatcccattcgtcc

SEQ ID NO: 128289 - DNA, 839 bp, Zea Mays
ccatctggtccgcggtcatctgtcagtttgtttgcgcgaaaaaggataggaatcctcttgtgtcctggccgtcggccgtcgctgcgtcgttccagatttggggaaggaaatccggcaccgagattcgagtcgaaaaggacatcatttgctagatggcgcgtaccaagcagaccgctcgcaagtccactggaggaaaggctcctaggaagcaactcgctacaaaggcagcccggaagtctgcacccacaactggaggagtgaagaagcctcaccgttaccgcccagggactgttgctcttcgtgagatccgcaagtaccagaagagcactgagttgctgattaggaagctgccgttccagaggcttgtgagggagattgctcaggatttcaagacggatctgcgcttccagagccatgccgtgcttgctctgcaggaggcagcagaggcctacctggttggtctcttcgaagataccaatctgtgcgcgatccatgccaagcgcgtgaccatcatgcccaaggacattcagctggcaagaaggatccgtggcgagagggcgtgagtctgtcgacgggaggaagaactctgcgctcgttttgtgtgttcgcctctctcaccctgtaagttttgtgaaaagataatctagtaaactgtacttggcctgtttgactgtagccgcagtagcgtatgcgcatactattggctgttgtcgtgtctggagtcttttatccatccattctactacttaataatcgggttgctgaacgtgtatccagacttaactgtgtgtttggctgtctgaacctctgaatcgttattgatgtcatcccattcgtcc

SEQ ID NO: 128290 - DNA, 665 bp, Zea Mays
ccatctggtccgcggtcatctgtcagtttgtttgcgcgaaaaaggataggaatcctcttgtgtcctggccgtcggccgtcgctgcgtcgttccagatttggggaaggaaatccggcaccgagattcgagtcgaaaaggacatcatttgctagatggcgcgtaccaagcagaccgctcgcaagtccactggaggaaaggctcctaggaagcaactcgctacaaaggcagcccggaagtctgcacccacaactggaggagtgaagaagcctcaccgttaccgcccagggactgttgctcttcgtgagatccgcaagtaccagaagagcactgagttgctgattaggaagctgccgttccagaggcttgtgagggagattgctcaggatttcaagacggatctgcgcttccagagccatgccgtgcttgctctgcaggaggcagcagaggcctacctggttggtctcttcgaagataccaatctgtgcgcgatccatgccaagcgcgtgaccatcatgcccaaggacattcagctggcaagaaggatccgtggcgagagggcttgcattcgagctagtttatcgtgttccaacttccaaccgtggcaggtggaaggggtgatgcgagcgagcacatcgagtggtccgcgggccattcagtggaaggat

SEQ ID NO: 128291 - DNA, 837 bp, Zea Mays
tcttgtctggaaacagtcgtttcgcgtgacgttggcaggctagccgcgcgcgcttgttggaggttagggtttcgctcgaatcgactgatgcgttcgatgatgattcacgggggccatcctccacgcccttttcttgacatcatttgctagatggcgcgtaccaagcagaccgctcgcaagtccactggaggaaaggctcctaggaagcaactcgctacaaaggcagcccggaagtctgcacccacaactggaggagtgaagaagcctcaccgttaccgcccagggactgttgctcttcgtgagatccgcaagtaccagaagagcactgagttgctgattaggaagctgccgttccagaggcttgtgagggagattgctcaggatttcaagacggatctgcgcttccagagccatgccgtgcttgctctgcaggaggcagcagaggcctacctggttggtctcttcgaagataccaatctgtgcgcgatccatgccaagcgcgtgaccatcatgcccaaggacattcagctggcaagaaggatccgtggcgagagggcgtgagtctgtcgacgggaggaagaactctgcgctcgttttgtgtgttcgcctctctcaccctgtaagttttgtgaaaagataatctagtaaactgtacttggcctgtttgactgtagccgcagtagcgtatgcgcatactattggctgttgtcgtgtctggagtcttttatccatccattctactacttaataatcgggttgctgaacgtgtatccagacttaactgtgtgtttggctgtctgaacctctgaatcgttattgatgtcatcccattcgtcc

SEQ ID NO: 128292 - DNA, 1898 bp, Zea Mays
ccgggccagcctactcgtaccgtaccagagagaacgggacaccggcacgccgcgcctcgctctcagccgatgtagccgccgtcttcttccagggcggtgctctgaaaatctgaattcttaacgagttctcgcgcgccgttgccgtgcgtgcagatccaggtcctggggcaccggaccgtggaccactactccgctcctgtctcccaggcaggtgaagcctcggcacgagcgcaccaggtccaccacgtcgtccacgtactcgccgccactcgtctcccaggtggcccagcctcaggacgcaggccaacgggtgcgtgacggagcaggacgcggtggcgcagccggaggagagcgtcgtcgtccggccgccgccgacgacgacggacatgcgggagcgcgtgcggctcctggagcgggaggcggcggcggccaagcagagggagatgaaggtgctggagtcgctggtccagcagaccaaggagatggagcgggccaaggtggcgttcgaggagtcccggctcgaggtcgccgcgctgcggcggcagcagcatgacgagggcgccgcggcgcaggcgcaggcgcagcagtggagcgtcatggacctcatgttcggcggcgtggacgaggagatcaacgggctgaggaccaagctccgcgcggcggcgcaggccgaggagcggggccggaaggcagccgacgagctcgccgcggcgctggccgcggtcaccatggaggcgaagcagctcaaggcctggctcgccgacgcgcaggccgagctggaggccgccggcgccgagtcggaccgcctgcgcggcctgctccagggcgccgaggcggagctgtggtccgccacggagcgcgccgacgcgctcgcctccgactggaaggaggccgcggccggctggcgcgccagggagaaggcgctgctggcgcgcgcgcgcgccgccgagaaggacgacgacaacgccgccctgcgccgcgcgctggagcgggcggccgaggaggcccgcgcgtccgccgaggcgctcgaggccgcgcgcgccgactgcgccggcctgcgggaggccggcgccgagagggagcaagccctggaggccctgcggcgcgacaacgacggcctcagggacagcgaggccgcggccagggagcgcgccgacgagctccaggcgcggctcgcggcggcgaaagagcgggaggttccgcttccgctggtggagaggtggaagcgcgaggacgcgcagggcaagctgggcgcgacggcgttcctggactccggaaggctgggcccgggcccgggccggaaggatcggatgttcgcgtcgctgagcaacctcgcggagctcaagtcggcggcggccttggacgactacggctacgagttcgaccaccttaacctgggccagtacggcgacggcacggagcgcaaggtcaataagaggcggtccatcctgcgcaagttcggggatctcttcaggaggagcaggagcctctacaagcccaacctcgcgccggtgctgcacaaccactactagacagggcagggccttagatgctcgatcgcgaggtcgacgatgcttgcgttgcttgcataggcattagagggagtcagggagtgcagatcgttgtagcgggagattatattgttgttcatatgctccgcatggatcagtatcatggtcatcggtgcacttgagtagtgccacgcactggatcagcgttgaccagcagttattacagatacgatttaagcgaccagaaggaagcagttagtggtcggataagctgtcagatctggtgttgtccctagctgtaagcagttactacaaagaaagtctgctgtgccaacagttgggcttctgtagagactagagaggcttgggaccttgttcatttgtgac

SEQ ID NO: 128293 - DNA, 1892 bp, Zea Mays
ccgggccagcctactcgtaccgtaccagagagaacgggacaccggcacgccgcgcctcgctctcagccgatgtagccgccgtcttcttccagggcggtgctctgaaaatctgaattcttaacgagttctcgcgcgccgttgccgtgcgtgcagatccaggtcctggggcaccggaccgtggaccactactccgctcctgtctcccaggcaggtgaagcctcggcacgagcgcaccaggtccaccacgtcgtccacgtactcgccgccactcgtctcccagcagcctcaggacgcaggccaacgggtgcgtgacggagcaggacgcggtggcgcagccggaggagagcgtcgtcgtccggccgccgccgacgacgacggacatgcgggagcgcgtgcggctcctggagcgggaggcggcggcggccaagcagagggagatgaaggtgctggagtcgctggtccagcagaccaaggagatggagcgggccaaggtggcgttcgaggagtcccggctcgaggtcgccgcgctgcggcggcagcagcatgacgagggcgccgcggcgcaggcgcaggcgcagcagtggagcgtcatggacctcatgttcggcggcgtggacgaggagatcaacgggctgaggaccaagctccgcgcggcggcgcaggccgaggagcggggccggaaggcagccgacgagctcgccgcggcgctggccgcggtcaccatggaggcgaagcagctcaaggcctggctcgccgacgcgcaggccgagctggaggccgccggcgccgagtcggaccgcctgcgcggcctgctccagggcgccgaggcggagctgtggtccgccacggagcgcgccgacgcgctcgcctccgactggaaggaggccgcggccggctggcgcgccagggagaaggcgctgctggcgcgcgcgcgcgccgccgagaaggacgacgacaacgccgccctgcgccgcgcgctggagcgggcggccgaggaggcccgcgcgtccgccgaggcgctcgaggccgcgcgcgccgactgcgccggcctgcgggaggccggcgccgagagggagcaagccctggaggccctgcggcgcgacaacgacggcctcagggacagcgaggccgcggccagggagcgcgccgacgagctccaggcgcggctcgcggcggcgaaagagcgggaggttccgcttccgctggtggagaggtggaagcgcgaggacgcgcagggcaagctgggcgcgacggcgttcctggactccggaaggctgggcccgggcccgggccggaaggatcggatgttcgcgtcgctgagcaacctcgcggagctcaagtcggcggcggccttggacgactacggctacgagttcgaccaccttaacctgggccagtacggcgacggcacggagcgcaaggtcaataagaggcggtccatcctgcgcaagttcggggatctcttcaggaggagcaggagcctctacaagcccaacctcgcgccggtgctgcacaaccactactagacagggcagggccttagatgctcgatcgcgaggtcgacgatgcttgcgttgcttgcataggcattagagggagtcagggagtgcagatcgttgtagcgggagattatattgttgttcatatgctccgcatggatcagtatcatggtcatcggtgcacttgagtagtgccacgcactggatcagcgttgaccagcagttattacagatacgatttaagcgaccagaaggaagcagttagtggtcggataagctgtcagatctggtgttgtccctagctgtaagcagttactacaaagaaagtctgctgtgccaacagttgggcttctgtagagactagagaggcttgggaccttgttcatttgtgac

SEQ ID NO: 128294 - DNA, 1889 bp, Zea Mays
ccgggccagcctactcgtaccgtaccagagagaacgggacaccggcacgccgcgcctcgctctcagccgatgtagccgccgtcttcttccagggcggtgctctgaaaatctgaattcttaacgagttctcgcgcgccgttgccgtgcgtgcagatccaggtcctggggcaccggaccgtggaccactactccgctcctgtctcccaggcaggtgaagcctcggcacgagcgcaccaggtccaccacgtcgtccacgtactcgccgccactcgtctcccagcctcaggacgcaggccaacgggtgcgtgacggagcaggacgcggtggcgcagccggaggagagcgtcgtcgtccggccgccgccgacgacgacggacatgcgggagcgcgtgcggctcctggagcgggaggcggcggcggccaagcagagggagatgaaggtgctggagtcgctggtccagcagaccaaggagatggagcgggccaaggtggcgttcgaggagtcccggctcgaggtcgccgcgctgcggcggcagcagcatgacgagggcgccgcggcgcaggcgcaggcgcagcagtggagcgtcatggacctcatgttcggcggcgtggacgaggagatcaacgggctgaggaccaagctccgcgcggcggcgcaggccgaggagcggggccggaaggcagccgacgagctcgccgcggcgctggccgcggtcaccatggaggcgaagcagctcaaggcctggctcgccgacgcgcaggccgagctggaggccgccggcgccgagtcggaccgcctgcgcggcctgctccagggcgccgaggcggagctgtggtccgccacggagcgcgccgacgcgctcgcctccgactggaaggaggccgcggccggctggcgcgccagggagaaggcgctgctggcgcgcgcgcgcgccgccgagaaggacgacgacaacgccgccctgcgccgcgcgctggagcgggcggccgaggaggcccgcgcgtccgccgaggcgctcgaggccgcgcgcgccgactgcgccggcctgcgggaggccggcgccgagagggagcaagccctggaggccctgcggcgcgacaacgacggcctcagggacagcgaggccgcggccagggagcgcgccgacgagctccaggcgcggctcgcggcggcgaaagagcgggaggttccgcttccgctggtggagaggtggaagcgcgaggacgcgcagggcaagctgggcgcgacggcgttcctggactccggaaggctgggcccgggcccgggccggaaggatcggatgttcgcgtcgctgagcaacctcgcggagctcaagtcggcggcggccttggacgactacggctacgagttcgaccaccttaacctgggccagtacggcgacggcacggagcgcaaggtcaataagaggcggtccatcctgcgcaagttcggggatctcttcaggaggagcaggagcctctacaagcccaacctcgcgccggtgctgcacaaccactactagacagggcagggccttagatgctcgatcgcgaggtcgacgatgcttgcgttgcttgcataggcattagagggagtcagggagtgcagatcgttgtagcgggagattatattgttgttcatatgctccgcatggatcagtatcatggtcatcggtgcacttgagtagtgccacgcactggatcagcgttgaccagcagttattacagatacgatttaagcgaccagaaggaagcagttagtggtcggataagctgtcagatctggtgttgtccctagctgtaagcagttactacaaagaaagtctgctgtgccaacagttgggcttctgtagagactagagaggcttgggaccttgttcatttgtgac

SEQ ID NO: 128295 - DNA, 1529 bp, Zea Mays
cggttctgcctgccgaggatccccacaccgatccgccccaccctcctccccaccgctctcatctgctccgccatcaacgccctcatctgctccgccatcaacgcccgtctccaatagtggaaggtggccgaggatccgtgccatcaacgcccgccatcggacctgtacgcgataccagcaacgccgtcatggaaggttgtcgaggccgccatcaaagccatcctccccacgccattgatggcgcacgcggcaaaaccgcacacctcctccccacgccgaatctcctaccgtttcaactgaagcagcaccgacgcctggtagcagtgtggttgctggtgaaagcaccagctgacaaggggaaaatggagcacacaactgctgctgtgagtagtgtgaggtgggtttgtaggagcagatgcaaagctactgcccgtagctcatgggaagccatggtgacagctaactttggtctttggctggcaaatacttgctgcagagctcctgattatggttcacaaggtgaagtgatgcttacttttgcggaaaatggatcctcaaaagttggagtcagatttgataaaacagatccctggggccattgatcttggaggcagttgtgagcttgatcatggcctattatgttcagttgattctctatgcctcgatggtccaggatgggaagatagagccaaacattcatttgatgttgtgtttgagtttgcctctgaagaaagtcaacaggtgcctgtaatcctgtttgtgaaggatgttgagaaaatatgtggaaataattacacctaccatggtctaaagaataagcttgaaagtttcccagctggagttttattgttgggtcccagattcagacagatgctcggaaagataagtcaaacaatgggtctccttggctcaagttctcatacagccaagcagcaatacttgaccttgcatttcaggtgcagttaatagttgattctacttagcttcaaattggatttgcttacgttaaaatacttaggtgacgggtggcctgaagaatgtctatgcaattgacaccgatgaaactagcttctatgttttttagctgacaacatcatcgtacgattagtattatactctttgcatatcatagtgatttttcttattccatatctatttttatactaatttgcatatcatagtgatgtttcttattccgtatctatttttttaactctcgtagcaacacacggacacatacttagttatatattagatataattggttctctaaattgaggaagacgatgacccgctttgctattcttgggtccgctcatgacaacagcttaatcgaaggtgtattacaacgtaattaattaaccaggagctttctgaggccacgggaaccagaagaccatatcgtccaagttaatattgctgccagcaatttatgaagcgcatccgagggacttgtatttattttatgtaaagtttaatggaatacttgttcctctatttattttgtgtacttagtacactggcatgcc

SEQ ID NO: 128296 - DNA, 1243 bp, Zea Mays
caccgatccgccccaccctcctccccaccgctctcatctgctccgccatcaacgccctcatctgctccgccatcaacgcccgtctccaatagtggaaggtggccgaggatccgtgccatcaacgcccgccatcggacctgtacgcgataccagcaacgccgtcatggaaggttgtcgaggccgccatcaaagccatcctccccacgccattgatggcgcacgcggcaaaaccgcacacctcctccccacgccgaatctcctaccgtttcaactgaagcagcaccgacgcctggtagcagtgtggttgctggtgaaagcaccagctgacaaggggaaaatggagcacacaactgctgctgtgagtagtgtgaggtgggtttgtaggagcagatgcaaagctactgcccgtagctcatgggaagccatggtgacagctaactttggtctttggctggcaaatacttgctgcagagctcctgattatggttcacaaggtgaagtgatgcttacttttgcggaaaatggatcctcaaaagttggagtcagatttgataaaacagatccctggggccattgatcttggaggcagttgtgagcttgatcatggcctattatgttcagttgattctctatgcctcgatggtccaggatgggaagatagagccaaacattcatttgatgttgtgtttgagtttgcctctgaagaaagtcaacaggtgcctgtaatcctgtttgtgaaggatgttgagaaaatatgtggaaataattacacctaccatggtctaaagaataagcttgaaagtttcccagctggagttttattgttgggtcccagattcagacagatgctcggaaagataagtcaaacaatgggtctccttggctcaagttctcatacagccaagcagcaatacttgaccttgcatttcagcttaatcgaaggtgtattacaacgtaattaattaaccaggagctttctgaggccacgggaaccagaagaccatatcgtccaagttaatattgctgccagcaatttatgaagcgcatccgagggacttgtatttattttatgtaaagtttaatggaatacttgttcctctatttattttgtgtacttagtacactggcatgcccgtattttttttctcccacgtgaaaaagatgtttgtaattttctctcgaaacactggcctactgaagttccttgacaagttttacaacaaggctgacctaccttgggttc

SEQ ID NO: 128297 - DNA, 799 bp, Zea Mays
atggaaggttgtcgaggccgccatcaaagccatcctccccacgccattgatggcgcacgcggcaaaaccgcacacctcctccccacgccgaatctcctaccgtttcaactgaagcagcaccgacgcctggtagcagtgtggttgctggtgaaagcaccagctgacaaggggaaaatggagcacacaactgctgctgtgagtagtgtgaggtgggtttgtaggagcagatgcaaagctactgcccgtagctcatgggaagccatggtgacagctaactttggtctttggctggcaaatacttgctgcagagctcctgattatggttcacaaggtgaagtgatgcttacttttgcggaaaatggatcctcaaaagttggagtcagatttgataaaacagatccctggggccattgatcttggaggcagttgtgagcttgatcatggcctattatgttcagttgattctctatgcctcgatggtccaggatgggaagatagagccaaacattcatttgatgttgtgtttgagtttgcctctgaagaaagtcaacaggtgcctgtaatcctgtttgtgaaggatgttgagaaaatatgtggaaataattacacctaccatggtctaaagaataagcttgaaagtttcccagctggagttttattgttgggtcccagattcagacagatgctcggaaagataagtcaaacaatgggtctccttggctcaagttctcatacagccaagcagcaatacttgaccttgcatttcagcttaatcgaaggtgtattacaacgtaattaa

SEQ ID NO: 128298 - DNA, 2648 bp, Zea Mays
cgcagcttccttctatggcgctcatttccatcctcgaccgcggtttcctcgccactgcgctccgtctctcgctcctttccatccctctcctcgcccgacagctactgtgtccgtgcgtgcagcggtcgcccaactcatagcgggacaccagatctcaagttcacctagcactctacatcgttcgacggcgtcccacaatgcaggcggcgtcagctcccagagacgcctcccgcccgtcagctcccagagccgccagcgccggcgagcgcggcgaggtcgtcggttccgtcgagcgaactgcattgcccgcgcggcgctcgctgctgtacacgcaccgcgcgcagatgccattttggtgccggcacagcctctgctttctgctgctcagcgctggcgttcaccagcatctccagaagatcctatcctgtggcgcgctaattgacggcatggggagctgaactcggcacatcgcaccacattggaacacatcacacacggtggcaattctgtgaagcccaaaggttccaagtcaccatgagaaaattgaaatggcaagatctcttaatctaattgttgcaccttggaaggtctgaaccatcagagtttaactgtatcacccatttacacaagttcctaccatcacagttcaactgtatcactcatccataagcaattacttgtgttgaaatttatgagaagacatatgcctctgttaagtgtcaggatcttttttgctgggaagccaattccttactgatctgagggacaacatttttgtttgcctgataaggtgatgaaggtggctggacaacacgattatgggtattttcttatcgagtgatacaagacattgttctgccactgattacagtaagcctatactagattggcttgagaattccagtgatgaggtagcatagaagtgtgatgccataacatttggtgttctgaagaatcggcaaaaaaaaacttgccgagcagttttagtatttctaacgtgcctgaatttaaatctgaaaaatgcaaatcagagacatggctgctactatgagggataagtgagtcattgatatcttcctgatgcagcatggtattctttgcaaaaatctcttctttgcatggatcatatgtgtatctaattcggctcttcacttagaaattttagacatctttgtgttcgtcctagcctcttaatctattatgttcattgtgccatgcacttggtgttcctatggacagacttgtgaaagccgcagattcagtttcggtatgttacatttttcagagcactatgcttagctacactacttagtacttacatatgaatggaatacaggcacatgtatggtgatgcttctatttctctttgaaactgaaatttcaggtgtgcctatctaaaggtttaggcgcccctgttggattcaatggcctttgttgacaagaaatatgaacaatacctagaggccaaaaatcttcgaaagaccctaggtggtggaatgaggcaggttggagttctgtgtgctgattctcatacactatgggaaagcttgctggtgaggatagaaaggctaaagttgtgacagttggtacaatggtttccccaaccacttatgctcgacgttgcctgtcatatttgatgaatggcatatgccacatgaggcattgaatgatgcaatgaatgctctggtaatatctcccacatggtcaacaacattatatctttaggcaccacatgttctgaagttgcatttcttgtttcgggttcaaaaattagtaacctggtaatttcttgtcctattttgagccctgaagatttctttgacgttttgagttctagagtttggagcttccaggtgacggatttcatctcactcaatagtctcctcgctcaaggagttcatccaagctcggtgggtgcaagcctgcaaggcacaaagctacgtttacttttatttgggttgcaagaggaactagaaccgtgaatggggctgcctcggcgagggcaccattcaagcttcacactttgttttctgtacggatgagaacaacatacgaggcaaggtgaacggtgagcaaatatacgtggaactacatctgcggatctgctgctgtctcttctccttactatctcttttgactcaattcaattttcctctctctatttactcttttcgatcaaggcaattcaataaattacacctgaacctttatgcactttgttcttctatctactggcctcttcagtctctgtggtggatggtagaggcatggctctccctcacgcagcgtcgtgcctcccatcctcatcgccaacgtagctcccgtctggctcaccatatcccgcagttgttctctgtgtgtggccaaagggaagaagaaatcacattttgacgattaacacaagtaattccccttccttggtctccctcagaagtcacattttgatgatagaactttgtatgcttaacattttccttataagtcagagtattgcgtatccagtaaaacagatttcaaaagttatcttctcgtcatggattattgttattctttgttttcatgcaaaatataattttagaagcatgcatgtacgtgcatgctctttgtaatttcaaatttctagagcaatatatctcgtgacctggtgt

SEQ ID NO: 128299 - DNA, 2235 bp, Zea Mays
cgcccgacagctactgtgtccgtgcgtgcagcggtcgcccaactcatagcgggacaccagatctcaagttcaccagcatctccagaagatcctatcctgtggcgcgctaattgacggcatggggagctgaactcggcacatcgcaccacattggaacacatcacacacggtggcaattctgtgaagcccaaaggttccaagtcaccatgagaaaattgaaatggcaagatctcttaatctaattgttgcaccttggaaggtctgaaccatcagagtttaactgtatcacccatttacacaagttcctaccatcacagttcaactgtatcactcatccataagcaattacttgtgttgaaatttatgagaagacatatgcctctgttaagtgtcaggatcttttttgctgggaagccaattccttactgatctgagggacaacatttttgtttgcctgataaggtgatgaaggtggctggacaacacgattatgggtattttcttatcgagtgatacaagacattgttctgccactgattacagtaagcctatactagattggcttgagaattccagtgatgaggtagcatagaagtgtgatgccataacatttggtgttctgaagaatcggcaaaaaaaaacttgccgagcagttttagtatttctaacgtgcctgaatttaaatctgaaaaatgcaaatcagagacatggctgctactatgagggataagtgagtcattgatatcttcctgatgcagcatggtattctttgcaaaaatctcttctttgcatggatcatatgtgtatctaattcggctcttcacttagaaattttagacatctttgtgttcgtcctagcctcttaatctattatgttcattgtgccatgcacttggtgttcctatggacagacttgtgaaagccgcagattcagtttcggtgtgcctatctaaaggtttaggcgcccctgttggattcaatggcctttgttgacaagaaatatgaacaatacctagaggccaaaaatcttcgaaagaccctaggtggtggaatgaggcaggttggagttctgtgtgctgattctcatacactatgggaaagcttgctggtgaggatagaaaggctaaagttgtgacaggtttattttttccctcttctctaaaaaacatagaattggttgtatgctatttaaggcaagaatgttttccattgtctaaaaacgatttattttttccataatatttgtttcctagctttttatcctatttaaaacaaatcgaaactgcctgaaggctgttgttgtcttggtcttttctaattgttctttatcatgcggtttatcgaagttggtacaatggtttccccaaccacttatgctcgacgttgcctgtcatatttgatgaatggcatatgccacatgaggcattgaatgatgcaatgaatgctctggtaatatctcccacatggtcaacaacattatatctttaggcaccacatgttctgaagttgcatttcttgtttcgggttcaaaaattagtaacctggtaatttcttgtcctattttgagccctgaagatttctttgacgttttgagttctagagtttggagcttccaggtgacggatttcatctcactcaatagtctcctcgctcaaggagttcatccaagctcggtgggtgcaagcctgcaaggcacaaagctacgtttacttttatttgggttgcaagaggaactagaaccgtgaatggggctgcctcggcgagggcaccattcaagcttcacactttgttttctgtacggatgagaacaacatacgaggcaaggtgaacgtctctgtggtggatggtagaggcatggctctccctcacgcagcgtcgtgcctcccatcctcatcgccaacgtagctcccgtctggctcaccatatcccgcagttgttctctgtgtgtggccaaagggaagaagaaatcacattttgacgattaacacaagtaattccccttccttggtctccctcagaagtcacattttgatgatagaactttgtatgcttaacattttccttataagtcagagtattgcgtatccagtaaaacagatttcaaaagttatcttctcgtcatggattattgttattctttgttttcatgcaaaatataattttagaagcatgcatgtacgtgcatgctctttgtaatttcaaatttctagagcaatatatctcgtgacctggtgt

SEQ ID NO: 128300 - DNA, 928 bp, Zea Mays
cagtttgaaccagatgatgcaagacgttgctttcccttgttgggatgaacctgctttcaaggtttgctgctttgatttatttctcaagaccttttgttcttttaggcacaaagctacgtttacttttatttgggttgcaagaggaactagaaccgtgaatggggctgcctcggcgagggcaccattcaagcttcacactttgttttctgtacggatgagaacaacatacgaggcaaggtgaacggtgagcaaatatacgtggaactacatctgcggatctgctgctgtctcttctccttactatctcttttgactcaattcaattttcctctctctatttactcttttcgatcaaggcaattcaataaattacacctgaacctttatgcactttgttcttctatctactggcctcttcagtctctgtggtggatggtagaggcatggctctccctcacgcagcgtcgtgcctcccatcctcatcgccaacgtagctcccgtctggctcaccatatcccgcagtaaggaagggatgcacccttctttgatttcctcattatgcctgacttttctatttgtttagatcttgccttattttgggtgtggctgctcttctcacgcaggttgttctctgtgtgtggccaaagggaagaagaaatcacattttgacgattaacacaagtaattccccttccttggtctccctcagaagtcacattttgatgatagaactttgtatgcttaacattttccttataagtcagagtattgcgtatccagtaaaacagatttcaaaagttatcttctcgtcatggattattgttattctttgttttcatgcaaaatataattttagaagcatgcatgtacgtgcatgctctttgtaatttcaaatttctagagcaatatatctcgtgacctggtgtat

SEQ ID NO: 128301 - DNA, 2768 bp, Zea Mays
cagtctctctgaagagaagaggctaatccaatcaagcccagcccagcctttccacagttcctggagaaaatcctcactcgggtgcgcgaagcagcttgattcgcctgcgcagctcatcggaagagagccaggagcttgttcttggctgctggaccgatccttgagcagccgccgctgatcttgccggagggccaagagcctgtgttcttgcaccggagaattctcggccagccgtcccggatagggttgagggtgtgccatgtcagcgtcacagtcctcgatgagcggcgccggggagccgggggcgcgggcggtggtctggttcaggcgggacctgcgcgtggaggacaacccggcgctggcggcggccgctcgggcggccggggaggtcgtgccggcgtacgtgtgggcgcccgaggaggacggggcctactaccccggcagggtgtctcggtggtggctcagccagagcctcaagcacctggacgcctcgctccgccggctcggcgccgcccgcctcgtcacccgccgctccaacgacgccgtcgccgcgctgctcgacctcgtccgctgcaccggcgccacgcacctcttcttcaaccacctctacgacccgctgtcgctggtccgggactaccgcgtcaaggagcagctggcggccgagggcatcgacgtgcagtccttcaatgccgatctgctgtacgagccgtgggaggtcctcgacgaagaccgccgccccttcaccatgttcgcgccattctggaacaggtgcctgtgcatgccggaccccgccgcaccgctgctgccgcccaagaggatcaattcaggtgacctgtccaggtgcccgtgggacgagctggtctttgaggacgagtccgagaggggcagcaacgcgctgctcgcgcgggcgtggtcaccagggtggcagaatgctgacaaggcgctgacggccttcctcaacggcccgctgatggactactccgtgaaccgcaagaaggccgacagcgccagcacgtcgctgctgtccccgtacctgcacttcggcgagctcagcgtccggaaggtcttccaccaggtccggatgaagcagctcatgtggagcaatgacggcaaccacgccggcgaggagagctgcaccctgttcctccgctccatcggcctgcgggagtactcgaggtacctcaccttcaaccacccctgcagccacgagaagcccctcctgtcgcacctcaggttcttcccctgggtcgtcaatgaggtgtacttcaaggtctggaggcaagggaggaccggctaccctctcgtcgacgccggcatgagggagctctgggccaccggctgggtccatgaccgcatacgcgtcgttgtctcgagcttcttcgtcaaggtgctccagctgccatggcgctgggggatgaagtacttctgggacaccttgctggatgctgaccttgagagcgacgcgctaggctggcagtacatttctgggtctctccctgatggccgtgagcttgaccgcatcgacaaccctcagtttgaagggtacaagtttgatccgcacggggagtacgtccggcgatggctaccggagctggcaaggctgccaacggaatggatacaccatccctgggatgcacctgagtctgtgcttcaggctgcaggggttgagctaggatctaactacccacgccccattgtcgagttagatgcagccaattccaggttgcaggatgccctgtcagagatgtgggagcttgaggcagcctctcgtgctgccatggagaacggaatggaagaaggcctcggcgattccacggatgagccgccgatcgacttccctcaagaactacggatggaagtggaccgacagccggttcaacctgctatccacgcaccgggagtgactggtcggagacgagaggatcagatggtgcccagcatgacttcctcgttcattagagctgagaccgaactcactgcagattttggccacaccagtgaggacagtaggccagaagtgccatcaaacatccaccatttgcaggctcgcccggagagggaagagacagttgacggtggcactggcaatgctgtcagggtgcatggcaaccatcaccagcagaaccttcagaacaacatgcaccgcgtgctaggtatcgctccatcgatttcagaggcatcaagcagttggacgggcagggatggtggagtggtaccagtctggtcgcctccggcagcttcgggacactctgattcttatgctgccgatgaggctgacatttccagtaggggttatctggacaggcatccacagtcacatacgatgatgaactggagccagctctctcagtcattgacaacagggtgggaagtggataattagcgctgtgtgtccggatttaattgcttaggatttcggcagagagaattatacatatgtaaattatcagattttgttcgtctatatagccttggtgtgcatgcaagtcatcaatcatgcagcttcctggatgcaataatggttatgtgaagctagttgtacagaaccttgtggtataggttgctaggtgtccacaagatatatgtattattcgtcagaagagttttctagcatcaggttcattttgtatctggttactgtcttattatagtctttggtgatgacagaggtgtgttctcagtttggtagacagaacatacctgctatcggtgaggactcaaaagggaacatcttggcagtgagattgggtgccactcttacctgctgc

SEQ ID NO: 128302 - DNA, 2880 bp, Zea Mays
cagtctctctgaagagaagaggctaatccaatcaagcccagcccagcctttccacagttcctggagaaaatcctcactcgggtgcgcgaagcagcttgattcgcctgcgcagctcatcggaagagagccaggagcttgttcttggctgctggaccgatccttgagcagccgccgctgatcttgccggagggccaagagcctgtgttcttgcaccggagaattctcggccagccgtcccggatagggttgagggtgtgccatgtcagcgtcacagtcctcgatgagcggcgccggggagccgggggcgcgggcggtggtctggttcaggcgggacctgcgcgtggaggacaacccggcgctggcggcggccgctcgggcggccggggaggtcgtgccggcgtacgtgtgggcgcccgaggaggacggggcctactaccccggcagggtgtctcggtggtggctcagccagagcctcaagcacctggacgcctcgctccgccggctcggcgccgcccgcctcgtcacccgccgctccaacgacgccgtcgccgcgctgctcgacctcgtccgctgcaccggcgccacgcacctcttcttcaaccacctctacgacccgctgtcgctggtccgggactaccgcgtcaaggagcagctggcggccgagggcatcgacgtgcagtccttcaatgccgatctgctgtacgagccgtgggaggtcctcgacgaagaccgccgccccttcaccatgttcgcgccattctggaacaggtgcctgtgcatgccggaccccgccgcaccgctgctgccgcccaagaggatcaattcaggtatccaaatgcacaaccgacagagctctaaccgtcatactgtaggcggggatccggtccgtgcagatcggatccagtcactgacatggaaaatgcttcgatcgcttcacaggtgacctgtccaggtgcccgtgggacgagctggtctttgaggacgagtccgagaggggcagcaacgcgctgctcgcgcgggcgtggtcaccagggtggcagaatgctgacaaggcgctgacggccttcctcaacggcccgctgatggactactccgtgaaccgcaagaaggccgacagcgccagcacgtcgctgctgtccccgtacctgcacttcggcgagctcagcgtccggaaggtcttccaccaggtccggatgaagcagctcatgtggagcaatgacggcaaccacgccggcgaggagagctgcaccctgttcctccgctccatcggcctgcgggagtactcgaggtacctcaccttcaaccacccctgcagccacgagaagcccctcctgtcgcacctcaggttcttcccctgggtcgtcaatgaggtgtacttcaaggtctggaggcaagggaggaccggctaccctctcgtcgacgccggcatgagggagctctgggccaccggctgggtccatgaccgcatacgcgtcgttgtctcgagcttcttcgtcaaggtgctccagctgccatggcgctgggggatgaagtacttctgggacaccttgctggatgctgaccttgagagcgacgcgctaggctggcagtacatttctgggtctctccctgatggccgtgagcttgaccgcatcgacaaccctcagtttgaagggtacaagtttgatccgcacggggagtacgtccggcgatggctaccggagctggcaaggctgccaacggaatggatacaccatccctgggatgcacctgagtctgtgcttcaggctgcaggggttgagctaggatctaactacccacgccccattgtcgagttagatgcagccaattccaggttgcaggatgccctgtcagagatgtgggagcttgaggcagcctctcgtgctgccatggagaacggaatggaagaaggcctcggcgattccacggatgagccgccgatcgacttccctcaagaactacggatggaagtggaccgacagccggttcaacctgctatccacgcaccgggagtgactggtcggagacgagaggatcagatggtgcccagcatgacttcctcgttcattagagctgagaccgaactcactgcagattttggccacaccagtgaggacagtaggccagaagtgccatcaaacatccaccatttgcaggctcgcccggagagggaagagacagttgacggtggcactggcaatgctgtcagggtgcatggcaaccatcaccagcagaaccttcagaacaacatgcaccgcgtgctaggtatcgctccatcgatttcagaggcatcaagcagttggacgggcagggatggtggagtggtaccagtctggtcgcctccggcagcttcgggacactctgattcttatgctgccgatgaggctgacatttccagtaggggttatctggacaggcatccacagtcacatacgatgatgaactggagccagctctctcagtcattgacaacagggtgggaagtggataattagcgctgtgtgtccggatttaattgcttaggatttcggcagagagaattatacatatgtaaattatcagattttgttcgtctatatagccttggtgtgcatgcaagtcatcaatcatgcagcttcctggatgcaataatggttatgtgaagctagttgtacagaaccttgtggtataggttgctaggtgtccacaagatatatgtattattcgtcagaagagttttctagcatcaggttcattttgtatctggttactgtcttattatagtctttggtgatgacagaggtgtgttctcagtttggtagacagaacatacctgctatcggtgaggactcaaaagggaacatcttggcagtgagattgggtgccactcttacctgctgc

SEQ ID NO: 128303 - DNA, 2344 bp, Zea Mays
cactggcactcaccaaacaacctgcatctttcttctccggagtttccttttctcccaagaaccatcattaaagaaaaaaaaaacttttagcaccttaccatctgggccggctgatatgaacgaacggtcttccggtactcaccaatccctgtcccattctcgccgtgcagacccgctgtcgctggtccgggactaccgcgtcaaggagcagctggcggccgagggcatcgacgtgcagtccttcaatgccgatctgctgtacgagccgtgggaggtcctcgacgaagaccgccgccccttcaccatgttcgcgccattctggaacaggtgcctgtgcatgccggaccccgccgcaccgctgctgccgcccaagaggatcaattcaggtgacctgtccaggtgcccgtgggacgagctggtctttgaggacgagtccgagaggggcagcaacgcgctgctcgcgcgggcgtggtcaccagggtggcagaatgctgacaaggcgctgacggccttcctcaacggcccgctgatggactactccgtgaaccgcaagaaggccgacagcgccagcacgtcgctgctgtccccgtacctgcacttcggcgagctcagcgtccggaaggtcttccaccaggtccggatgaagcagctcatgtggagcaatgacggcaaccacgccggcgaggagagctgcaccctgttcctccgctccatcggcctgcgggagtactcgaggtacctcaccttcaaccacccctgcagccacgagaagcccctcctgtcgcacctcaggttcttcccctgggtcgtcaatgaggtgtacttcaaggtctggaggcaagggaggaccggctaccctctcgtcgacgccggcatgagggagctctgggccaccggctgggtccatgaccgcatacgcgtcgttgtctcgagcttcttcgtcaaggtgctccagctgccatggcgctgggggatgaagtacttctgggacaccttgctggatgctgaccttgagagcgacgcgctaggctggcagtacatttctgggtctctccctgatggccgtgagcttgaccgcatcgacaaccctcagtttgaagggtacaagtttgatccgcacggggagtacgtccggcgatggctaccggagctggcaaggctgccaacggaatggatacaccatccctgggatgcacctgagtctgtgcttcaggctgcaggggttgagctaggatctaactacccacgccccattgtcgagttagatgcagccaattccaggttgcaggatgccctgtcagagatgtgggagcttgaggcagcctctcgtgctgccatggagaacggaatggaagaaggcctcggcgattccacggatgagccgccgatcgacttccctcaagaactacggatggaagtggaccgacagccggttcaacctgctatccacgcaccgggagtgactggtcggagacgagaggatcagatggtgcccagcatgacttcctcgttcattagagctgagaccgaactcactgcagattttggccacaccagtgaggacagtaggccagaagtgccatcaaacatccaccatttgcaggctcgcccggagagggaagagacagttgacggtggcactggcaatgctgtcagggtgcatggcaaccatcaccagcagaaccttcagaacaacatgcaccgcgtgctaggtatcgctccatcgatttcagaggcatcaagcagttggacgggcagggatggtggagtggtaccagtctggtcgcctccggcagcttcgggacactctgattcttatgctgccgatgaggctgacatttccagtaggggttatctggacaggcatccacagtcacatacgatgatgaactggagccagctctctcagtcattgtgagttcagttgcacggacaacagggtgggaagtggataattagcgctgtgtgtccggatttaattgcttaggatttcggcagagagaattatacatatgtaaattatcagattttgttcgtctatatagccttggtgtgcatgcaagtcatcaatcatgcagcttcctggatgcaataatggttatgtgaagctagttgtacagaaccttgtggtataggttgctaggtgtccacaagatatatgtattattcgtcagaagagttttctagcatcaggttcattttgtatctggttactgtcttattatagtctttggtgatgacagaggtgtgttctcagtttggtagacagaacatacctgctatcggtgaggactcaaaagggaacatcttggcagtgagattgggtgccactcttacctgctgc

SEQ ID NO: 128304 - DNA, 2327 bp, Zea Mays
cactggcactcaccaaacaacctgcatctttcttctccggagtttccttttctcccaagaaccatcattaaagaaaaaaaaaacttttagcaccttaccatctgggccggctgatatgaacgaacggtcttccggtactcaccaatccctgtcccattctcgccgtgcagacccgctgtcgctggtccgggactaccgcgtcaaggagcagctggcggccgagggcatcgacgtgcagtccttcaatgccgatctgctgtacgagccgtgggaggtcctcgacgaagaccgccgccccttcaccatgttcgcgccattctggaacaggtgcctgtgcatgccggaccccgccgcaccgctgctgccgcccaagaggatcaattcaggtgacctgtccaggtgcccgtgggacgagctggtctttgaggacgagtccgagaggggcagcaacgcgctgctcgcgcgggcgtggtcaccagggtggcagaatgctgacaaggcgctgacggccttcctcaacggcccgctgatggactactccgtgaaccgcaagaaggccgacagcgccagcacgtcgctgctgtccccgtacctgcacttcggcgagctcagcgtccggaaggtcttccaccaggtccggatgaagcagctcatgtggagcaatgacggcaaccacgccggcgaggagagctgcaccctgttcctccgctccatcggcctgcgggagtactcgaggtacctcaccttcaaccacccctgcagccacgagaagcccctcctgtcgcacctcaggttcttcccctgggtcgtcaatgaggtgtacttcaaggtctggaggcaagggaggaccggctaccctctcgtcgacgccggcatgagggagctctgggccaccggctgggtccatgaccgcatacgcgtcgttgtctcgagcttcttcgtcaaggtgctccagctgccatggcgctgggggatgaagtacttctgggacaccttgctggatgctgaccttgagagcgacgcgctaggctggcagtacatttctgggtctctccctgatggccgtgagcttgaccgcatcgacaaccctcagtttgaagggtacaagtttgatccgcacggggagtacgtccggcgatggctaccggagctggcaaggctgccaacggaatggatacaccatccctgggatgcacctgagtctgtgcttcaggctgcaggggttgagctaggatctaactacccacgccccattgtcgagttagatgcagccaattccaggttgcaggatgccctgtcagagatgtgggagcttgaggcagcctctcgtgctgccatggagaacggaatggaagaaggcctcggcgattccacggatgagccgccgatcgacttccctcaagaactacggatggaagtggaccgacagccggttcaacctgctatccacgcaccgggagtgactggtcggagacgagaggatcagatggtgcccagcatgacttcctcgttcattagagctgagaccgaactcactgcagattttggccacaccagtgaggacagtaggccagaagtgccatcaaacatccaccatttgcaggctcgcccggagagggaagagacagttgacggtggcactggcaatgctgtcagggtgcatggcaaccatcaccagcagaaccttcagaacaacatgcaccgcgtgctaggtatcgctccatcgatttcagaggcatcaagcagttggacgggcagggatggtggagtggtaccagtctggtcgcctccggcagcttcgggacactctgattcttatgctgccgatgaggctgacatttccagtaggggttatctggacaggcatccacagtcacatacgatgatgaactggagccagctctctcagtcattgacaacagggtgggaagtggataattagcgctgtgtgtccggatttaattgcttaggatttcggcagagagaattatacatatgtaaattatcagattttgttcgtctatatagccttggtgtgcatgcaagtcatcaatcatgcagcttcctggatgcaataatggttatgtgaagctagttgtacagaaccttgtggtataggttgctaggtgtccacaagatatatgtattattcgtcagaagagttttctagcatcaggttcattttgtatctggttactgtcttattatagtctttggtgatgacagaggtgtgttctcagtttggtagacagaacatacctgctatcggtgaggactcaaaagggaacatcttggcagtgagattgggtgccactcttacctgctgc

SEQ ID NO: 128305 - DNA, 1533 bp, Zea Mays
ctcgctggacgagagaagatgaccggaggggaggcgctcgccgtcggctcgggaggcggcggcggttcgataacgttcgcggttgcgatgagctgcctcaccgcggcctcaggcggccttctacttggatacgacatcagtgttacaggaggattgatgcagatggaatcgttcctccaggcattcttcccaaacatcctcaagaagacaaacaacgcgcagcaggacacgtactgcatctttaaaaaccaggtgctcaccttgttcgtttcctcgttatatctcgcagccatcctctccaatctggtatccggccactcgacgaggacgatgggccggaggaactccatgatgataggcggcatgtttttcttggccggcgccatcctcaacacctccgccgtccacatcagcatgctcatcatcggccgcatcctgcttggcttcgccgtcggcttcaccagcctgtctgcacccgtgtacctggcggagatcgcaccggcacggtggcgaggcgcgttcacgacctgctaccacttcttcttcaacctgggcatgttcatggcggacatggtgaactacggcaccaactccatcccgaggtggggctggcgcctctcgctcggcgtcggcctcgtcccggccgccgtcgtcatcgtcggcgctgcggtcatccccgacacgcccagcagcctggtgctgcgtgggaggctcgacgaggcccgcgcttcgctgcggcgcatccgcggggctggggcggcgtcggccgacaccgatgcggagcttaaggacatcgtccgcgcagtggagcaagaccgcagacacgagtccggcgcgttttggcgcctgtgccggcgcgagtaccgcccccacctcctcatcgccgtggccactccggtgttcttcgacctgacgggcgtgatcgtagtttccgtattcacgccgctcctcttctacaccgtcgggttcaccaaccagaaggccatcctgggctccatcatcaccgacgtggtcagcctggcgtccatcgcggtggccggtctggccgtcgaccgctacggccgccgctccctcctcatgctgggaagcgccgttctgatcctctcccaggtggccatggcgtggatctttggcgcgcagctgggcaccgatggcggcaagtccatgccgcgtgggtacgcggtcgcggtggtggcgctggtgtgcgtgtacactgccgggttcggcgtgtcgtggggcccgatcaagtgggtggtcacgaccgagatcttcccgctggaggtgaggccggcggcgctgggcctaggtggcgccatatcgggggtgctcatcttcgtgcagtcacagtcgttcctggagatgctgtgcagcttcaagtacggcaccttcttgttctacgccgggtgggtggttgttatggcggcggccgtggccgcgttcctgccggagacccggggcgtgcctatcgagtccatgggcgtggtgtgggagaagcactggtactggaagcgcttcgtcaagctcaggccgtct

SEQ ID NO: 128306 - DNA, 488 bp, Zea Mays
aattgcttgacgacgggctaataacccagaggcagccctccttacatgacgaggctctggaatacttgtcgcaaaaattttctacggtgaattcaacagtttcaaaaaagactctgatgaacaaatggaactgtatgaaacagctgtatgacagttatgttctgtttcgtatccactcgtcaaatatgggagagttgaaaagccgcaggatgtacataaaaaagacaaagaaatgtgcgaacgtatttaagcatatgataaatgaaccacctaagaatttggatctacttaaaagattgttccacgacgaagatcaagggacaccgccatcatccccgccacacccatcgttcgagccacagtcatcgttcatgccagagtcgtcgtccccgccacagtcgtcatcattcatgccagggtcgtcgtccccgccacagtcgtcagtgtcatcctcgtaactttcctttattttatggatagggtatgca

SEQ ID NO: 128307 - DNA, 1338 bp, Zea Mays
ttgaatctcggcatccacggccggagtcatcctttctctgagtcggcaatggagcacgacgtcgcgcacggtgcaggcggcgctgtccccgcaggcgaagaagcgttcgaggtagctcatcagttgctggcgcaggaggagttcagcgactcggagtccatccagatctccgacctgaagcgccgcatgtggagggaccagatgctgctcaacaggctggagtgccgcgcggacgtcttcagtgccgccggcggggcggggccgtcttcgtccaggccgctcgggccaccgaccgcgggcgcgcacggggaggacgaggaggaggaggaggaggtggaggcccccgaggtgcggtgccggcgcaaggcgatgctgcgcgcgcaggacggcgtcctccgccacatgctcaagatgatggaggcgtgcaacgcgcgcgggttcgtgtacggcgtcatcaacgaggccggcgagcccatgttgggctcctccgacagcctgcgcggctggtggaaggacaacgtcagcttcgaccgggccgggcccatggcgctcgtcacggcgcccaccggcgagagcccgccggggcccgcgtcctgcctgcaccgcctccaggacatccaggacagcacgctggggtccgtgctctcggcgctcatccagcactgcgtgccgccgcagcggagcttcccgctggagcgcgggctggcgccgccgtggtggccgaccgggaaggaggcctggtggggctcccagggcgaggtccaggcgcaccagggcgcgccgccgtaccggaagccgcacgacctcaagaaggcgtggaagatctcgctgctgagctcggtgatcaagcacatgagcccgcgcttcgaccagatgcgcaagctcgtgtggcagtccaagcgcctgcagcagaggatgagcgccaaggagacggagacgtggtccaagatcctccgccaggaggagacgctcagccgacgcctcaagagctcgctcaggatcacgccccttgacggcgacgacgatgacgacatggaccgagacggcctggaggacgtagtccgcggtgtgcaggacaagcgcaagcgcgagctgataagtagcagcagcggagggcgcgccgagctggtggcggatgagaacccgatcgacgaactcctgaagcgtcactacaacctcgtgcctgatcagcacgggatcgtcgtcgcgccggagaacgatgcgggagagctcgacctgctgtacggtgtcgtcgacgacgtgccgccggacgtgctcttcgatctcatcgcgagctgttcgggagccgacgacgcgttccgcctgatcctggactga

SEQ ID NO: 128308 - DNA, 2658 bp, Zea Mays
gcttgcccgggggcgtctcggggactcgcttcctagcaccaccactccttcctccattcctccaagccacgccacacctcggcgcgtcccgccaaaaccccatcgatacccaaaccctagccagcccctctcccacgcgccatgtccgtcgcgtctgcggcggcggcggcctccctcatcgcctctacctcgctctccgtcccagaccgcatccgcctccatccccgccccgcgcttcctccactaccgtgcttccgccggcgatcgcgggtctgcctcgtacgcgccatcctcgaggaccgcccgtccccgcctgccgaggaggacgctaagcgctacgggctcaacgggaacgggagcgggctcggatacgacgatgccgccgtccaagcgtacctcggaagcaacggtaacgggagcgccagcggtaacggcggggcggtgaagcagaaccccgaggttgccgggagcagcgcggccatagtcccggccccggtcccgccggcggagggtgagaggagaaggaaggagagagtggaggagatcgggagggaggatgcctggttcaagcagagcagcgcagaggtttctgttgctcctggtggtcgctggaatcggtttaaaacctattcaacaattcaaagaacattggaaatatggggattcgtttttacatttatattcaaggcttggctcaacaatcaaaagttcacatacagagcttctgcaggggggatgactgaggagaaaaagataatgaggaggaaagttcttgccaagtggctaaaggagagtcttttgagattaggccccacattcatcaaaatagggcaacaattctcaaccagggtggatattctcccacaggaatatgtggatcaactatcggagttacaggatcaagttcctccatttccttctgagacagctgtaaaaattgttgaagaagagctgggggcatctgtaaatgagatatttgatcgatttgattttgaaccaatagctgctgctagcctcggccaggttcatcgggcacgtctgaatggccaagaggttgtgatcaaagtgcaacggcctggtctgaaggagctgttcgatattgatctgaagaatttaagggtaatagctgaataccttcagaaagtggacccaaaatcagatggcgccaagagagactgggttgctatttatgatgagtgtgcatctgttttatatcaggaaatagactatatgaaggaagcatttaacgctgaaaaatttgctgaaaacttcaaaaaattggattatgtgaaggttcctgaaatttactgggcacacactactcctcaggttttaacaatggagtatgtcccaggaattaaaattaacagaataaagcagttagataagttaggagtcgatagaaaaagattaggtcgttatgctgttgagtcctaccttgagcagatcttatcccatgggtttttccatgctgacccgcatccaggaaacattgctgttgatgatgtcaatggagggagacttatcttctatgacttcgggatgatgggaagtatcagtcaaaatattcgggaaggattgcttgaagtattctatggagtttatgaaaaggatcctgacaaagtgcttcaagcaatggttcaaatgggtgtccttgttcctactggagatatgactgctgtcagaagaaccgctcaatttttccttaatagctttcaagagcgcctagcagcacaaaggaaggagagagaaatggcaaccgcagaactgggattcaaaaagcaattaactaaggaggagaagtttgaaaagaggaagcagagacttgctgcaatcggagaggatcttttggcgattgctgctgatcaaccatttcgcttccctgccacatttacatttgtggtcagagcattctcagttctagatggtattgggaaaggccttgatcctaggtttgatattacagagattgctaagccatatgccaaggaattgctaagatttaatgacgctggtgttgaaatagttgtgaaggatgcaaagaagagatgggaaaggcagtcccgtgccttttacaatttgttccgccaacccgatagagttgaaaagctcgcacaaattattgaacgtttggagcaaggtgaactcaagcttcgtgtcagaacgctggaatcagaaagagcatttcaaagagttgccgctgtacagaaaacaattggatatggagttgctgcaggtagtttgatgaaccttgcaacaatgttgtacttcaattcaatccggggaccagcaaccattgcatactccctctgcgcatttttcgggctgcaagttctgatcgggcttgtcaaggttaagaagttggatcggcaggagagactgataaccggtactgcatgagctatgagttattcacgatcaatcggtgaggactgaattacaccacttttcagcgttgtcgcgacacctttttttttcttttgcccaaattttacccccaccacgatttagcataggcatgccatacccccccttccgggttgtatgtaaatgtaatgataacatataaagatgtacatagtgtataatagacattctccttgtattgtttcgttttcatgatgtaccagtatgtacaggattttgtttcacatgcta

SEQ ID NO: 128309 - DNA, 2757 bp, Zea Mays
gcttgcccgggggcgtctcggggactcgcttcctagcaccaccactccttcctccattcctccaagccacgccacacctcggcgcgtcccgccaaaaccccatcgatacccaaaccctagccagcccctctcccacgcgccatgtccgtcgcgtctgcggcggcggcggcctccctcatcgcctctacctcgctctccgtcccagaccgcatccgcctccatccccgccccgcgcttcctccactaccgtgcttccgccggcgatcgcgggtctgcctcgtacgcgccatcctcgaggaccgcccgtccccgcctgccgaggaggacgctaagcgctacgggctcaacgggaacgggagcgggctcggatacgacgatgccgccgtccaagcgtacctcggaagcaacggtaacgggagcgccagcggtaacggcggggcggtgaagcagaaccccgaggttgccgggagcagcgcggccatagtcccggccccggtcccgccggcggagggtgagaggagaaggaaggagagagtggaggagatcgggagggaggatgcctggttcaagcagagcagcgcagaggtttctgttgctcctggtggtcgctggaatcggtttaaaacctattcaacaattcaaagaacattggaaatatggggattcgtttttacatttatattcaaggcttggctcaacaatcaaaagttcacatacagaggggggatgactgaggagaaaaagataatgaggaggaaagttcttgccaagtggctaaaggagagtcttttgagattaggccccacattcatcaaaatagggcaacaattctcaaccagggtggatattctcccacaggaatatgtggatcaactatcggagttacaggatcaagttcctccatttccttctgagacagctgtaaaaattgttgaagaagagctgggggcatctgtaaatgagatatttgatcgatttgattttgaaccaatagctgctgctagcctcggccaggttcatcgggcacgtctgaatggccaagaggttgtgatcaaagtgcaacggcctggtctgaaggagctgttcgatattgatctgaagaatttaagggtaatagctgaataccttcagaaagtggacccaaaatcagatggcgccaagagagactgggttgctatttatgatgagtgtgcatctgttttatatcaggaaatagactatatgaaggaagcatttaacgctgaaaaatttgctgaaaacttcaaaaaattggattatgtgaaggttcctgaaatttactgggcacacactactcctcaggttttaacaatggagtatgtcccaggaattaaaattaacagaataaagcagttagataagttaggagtcgatagaaaaagattaggtcgttatgctgttgagtcctaccttgagcagatcttatcccatgggtttttccatgctgacccgcatccaggaaacattgctgttgatgatgtcaatggagggagacttatcttctatgacttcgggatgatgggaagtatcagtcaaaatattcgggaaggattgcttgaagtattctatggagtttatgaaaaggatcctgacaaagtgcttcaagcaatggttcaaatgggtgtccttgttcctactggagatatgactgctgtcagaagaaccgctcaatttttccttaatagctttcaagagcgcctagcagcacaaaggaaggagagagaaatggcaaccgcagaactgggattcaaaaagcaattaactaaggaggagaagtttgaaaagaggaagcagagacttgctgcaatcggagaggatcttttggcgattgctgctgatcaaccatttcgcttccctgccacatttacatttgtggtcagagcattctcagttctagatggtattgggaaaggccttgatcctaggtttgatattacagagattgctaagccatatgccaaggaattgctaagatttaatgacgctggtgttgaaatagttgtgaaggatgcaaagaagagatgggaaaggcagtcccgtgccttttacaatttgttccgccaacccgatagagttgaaaagctcgcacaaattattgaacgtttggagcaaggtgaactcaagcttcgtgtcagaacgctggaatcagaaagagcatttcaaagagttgccgctgtacagaaaacaattggatatggagttgctgcaggtagtttgatgaaccttgcaacaatgttgtacttcaattcaatccggggaccagcaaccattgcatactccctctgcgcatttttcgggctgcaagttctgatcgggcttgtcaaggttaagaagttggatcggcaggagagactgataaccggtactgcatgagctatgagttattcacgatcaatcggtgaggactgaattacaccacttttcagcgttgtcgcgacacctttttttttcttttgcccaaattttacccccaccacgatttagcataggcatgccatacccccccttccgggttgtatgtaaatgtaatgataacatataaagatgtacatagtgtataatagacattctccttgtattgtttcgttttcatgatgtaccagtatgtacaggattttgtttcacatgctacctgattggtttgctggctgcgcatacccaggctatcgtcagacttgtggcgggtccgatatggacatttttggcgtaggcaaataacttcaaaaggacttattttgt

SEQ ID NO: 128310 - DNA, 510 bp, Zea Mays
atgaattgggcacaagaatccaaaagttcaccttcttgcactaattgtgatccgttcatctttgagacgcagcgccacaatggcataagggagctttgccctacgaatggagagcacaagctaatccgtgcccgtgctctcatccccctgcatgaacccaattctgttgcgatcaaccatcaatggctgcatatgggtcatgccttctcattgtccaagcttgagtttggtgctgcataccacatggctccattgactggacaagagcttttggacatggttgacagtttgcccattgttgcgataaagagcctaaaagtatctgacttccaagggtctatcggggcaatgacagctgccactttagatgatagtgttttatgtgttcaggccattgcggatgcggcatttggggttaaactgatatcattgttctctatcacggagcttgaggatgataaacgaaaggcatatgagagtgaagtatctccagagatttcctcacaatag

SEQ ID NO: 128311 - DNA, 1794 bp, Zea Mays
atggtcgccaagatgttgccacgctcatggatctcggcgtgcgtgctcgtgctgctcctgagcctgcacccgcgtgtccatgccttctacctccccggcaccttcatgcacacctactcccctggagaggtgatctcggccaaggtcaactcgctcacctctatcgagaccgagctgcccttcagctactacagcctgccatactgcaagcctctggatggcgtcaagaagagtgctgagaaccttggtgagatcctcatgggtgaccagatcgacaactctccataccgcttccaagttaatgtcaatgagtcagtattcctttgcaccacggacccgctcaccaaggagcaggccgagctgctcaagaggagggcacgagatctgtaccaggtcaacatggtcctggacaatttaccggtcatgcagttcaccgagcagaacagcgtgataatccagtggactgggttcccggttgggtacaacccgatagggagcaatgaggattatataactaaccacctcaagttcagagtcttggtccatcagtaccaggcgcagggcgacgttgtggtcacgagtgaggatggtgttgcaatggtagagtctgatcgcaagagtgggttccagattgttgggtttgaggtcgtgccttgcagcgtaagacgtgatcctgagtccatgtccaagctcaagatgtatgacaaggtcgactctgtgaattgcccgttggagcttgagaaatctcaggcgatccgtgagaatgagcggatcacatttacctatgaggttgagtatgtcaagagcaacatcaagtggtcgtctaggtgggatgcgtatctgaagatggatggtgccaaggtccactggttctcgatcatgaactcgatgatggtctgccgcagcgtcaccagcaggggtcatccatggcgccgcgggatccaccggatccgcggtgggggaccatggcacccaccggagacgacgcccttgcccccttcttggtgcctgctccactgcctcgacctggcgccatcgtcgacgtcctgcgagacgcgctcgacaacctccacgcgtgcgtctaccgcaaggcgtcccagcagctatccactgcgctgggcaccaccgagagttgagaggaccctcctgcagcgctaccgtttcgtccccggaggcaataagaaggctgggggattggttccactccgcaggcaacgacatgggacacgggtaacattggaagaccagcagaacatcaaccgcttcggttgcctcagcactcgcctccacgaattccaggaaaatatcaagcttgcgaagatacagtcacttgaggagagtgctgaattgttgagagagagatgtttgaagttccataaaggttgccgtaagtacgctgaagggctaggggaagcatatgatggagatattgcatttgccagctcacttgaaacatttggaggaggccacaatgatccaattagtgttgcttttggtgggcttgtaatgaccaaatttacaattgccttacgagaaattggaacatacaaggaagtcctgcgctcccaggttgagtgcctgttaaatgacagattactgaattttgttgacattgatttgcatgatgtgaatgatgctcataagcgctttgacaaggctagcctctcatatgaccaggaggtgctggaggccacaaggcagcagctcgagagggagctctccctgaggatctcaatagcatccatgacctccctgtctgcaaccttttgtacaaatagtactaatggtagttag

SEQ ID NO: 128312 - DNA, 2312 bp, Zea Mays
cctcctctctactctctcttcgcgcgcctgcgattctctccgctgggatgcaagtgttgtagtctgaagaattcgctggcggtggtgcagcttggcttcctctgcttctttttgacgatcaactgtcagggaacgtaacgtaactacatggtcacaattttgatgctggagcaaggcactcatggaccggacagacacatctggatttgttaccggtggatcagacggtacttcactgctgctgatattctttcacttcgtctactcgactgtgcacctataagagatcagtagacctctgatctcactgtccagaactacactctcctcatcgttgttcgtccaccgccttcgctgaacttttcaagtactttgtctagatgagtaccggttctgcgggtgtcttcctgcaccgtggaaaccaggctctcatggatgattctgcagtgccaattggcttctcaatgacgagctacacgacaggtaaccagtttcagagtcggataacatttggtatagaccaactgggttcagcagtgaacaatagcagcagccatggccgcagaggtttccagaggtggattcatgcgcctgctcaagatgatgggtgcagactagtcctcgggctgggtccgacgccggacccagacgttaactctcctgatcagcagcctgccggtgccggagcagacaagtcgagaccaccacctgtaactttgtttggccagagcttctccttcgctgatccggggacgctgagccttgggattcatcagggccgtagtacgggagcaaataaacacttgggcgccggaaccatcatctctttttccactgtggacgagggctccacgtctgccaggagtagctccggcggctacatgccatcgctgctctttgctcgtcggccaaactgttcgacagctgaagaggaacagggtttgctagatgacacagacacagacaacagtaacgatggtactgaaccttcggcatccatgacggaggcttcatttggtggcgtgagctctgatgctgtgaccctggtaagcaactctggacagcaggctcaacgccggcaccccaagaagtgcaggttcaaagggtgctccaagggcgcgcgaggcgcgacgggcctgtgcatcgctcacggcggcgggcagaggtgccagaagcccgggtgccacaagggcgccgagagccgcacggcctactgcaaggcccacggcggggggcgccggtgcctgcagctcggctgcaccaagagcgcggaagggaagacggaccactgcatcgcccatggcggcggccagcggtgcggctaccctgactgccctaaagccgcgcgtggcaagtccgggcggtgcatcaagcacggcggcgggaagaggtgctcggtcgagggctgcatcaggagcgccgagggaagggtcgggctgtgcatctctcacggcggcgggcggcggtgccagttcccggactgccgcaggggagcgcagggcagcaccctgtactgcaagtcgcacggcggcgggaagcgctgcgtcttcgaggggtgcggcaagggcgccgaaggcagcacgccgctgtgcaaggcgcacggcggcgggaagcggtgcgtgtatgagggcggcggcgtgtgccccaagagcgtccacggcggcacagacttctgcgtggctcacggcggcgggaagcggtgcgcggtgcctgggtgcagcaagagcgcgcgcggccgcacggaccgctgcgtgaagcacggcggtggcaagcggtgcagggtggacgggtgcggcaagagcgcgcaagggagcaccgattgctgcaaggctcacggtggcgggaagaggtgcaacttcggcgacggccaatgcgagaagttcgcgcgcggccggagcgggctctgcgcggcgcacgacactctggtggcctcacagcagcgccgcggtggcggcatgatcgggccgggcctcttccacggcatcgttcgctctgccagcgttgcaaacatgaacagcgactactcgtcgtcgggcgtgagcacggtgtccgactgcgacggctcgcctgaggcggcgacgaggaggcaggagctgatccctccccaggtgctggtcccccggtccatgaaatctttgacggcggcaaccgtgcagccaccgaagaggagcagagaaggaagggtagtcaccgtccccgaggggagggtgcacggtggtggcctcctgtcgttgcttggcgggagcttcatgaacgtcgacaagctctgaagcagtcagcgcttggggctcgatttgacgatttctacctct

SEQ ID NO: 128313 - DNA, 2300 bp, Zea Mays
gcgattctctccgctgggatgcaagtgttgtagtctgaagaattcgctggcggtggtgcagcttggcttcctctgcttctttttgacgatcaactgtcagggaacgtaacgtaactacatggtcacaattttgatgctggagcaaggcactcatggaccggacagacacatctggatttgttaccggtggatcagacgatgagtaccggttctgcgggtgtcttcctgcaccgtggaaaccaggctctcatggatgattctgcagtgccaattggcttctcaatgacgagctacacgacaggtaaccagtttcagagtcggataacatttggtatagaccaactgggttcagcagtgaacaatagcagcagccatggccgcagaggtttccagaggtggattcatgcgcctgctcaagatgatgggtgcagactagtcctcgggctgggtccgacgccggacccagacgttaactctcctgatcagcagcctgccggtgccggagcagacaagtcgagaccaccacctgtaactttgtttggccagagcttctccttcgctgatccggggacgctgagccttgggattcatcagggccgtagtacgggagcaaataaacacttgggcgccggaaccatcatctctttttccactgtggacgagggctccacgtctgccaggagtagctccggcggctacatgccatcgctgctctttgctcgtcggccaaactgttcgacagctgaagaggaacagggtttgctagatgacacagacacagacaacagtaacgatggtactgaaccttcggcatccatgacggaggcttcatttggtggcgtgagctctgatgctgtgaccctggtaagcaactctggacagcaggctcaacgccggcaccccaagaagtgcaggttcaaagggtgctccaagggcgcgcgaggcgcgacgggcctgtgcatcgctcacggcggcgggcagaggtgccagaagcccgggtgccacaagggcgccgagagccgcacggcctactgcaaggcccacggcggggggcgccggtgcctgcagctcggctgcaccaagagcgcggaagggaagacggaccactgcatcgcccatggcggcggccagcggtgcggctaccctgactgccctaaagccgcgcgtggcaagtccgggcggtgcatcaagcacggcggcgggaagaggtgctcggtcgagggctgcatcaggagcgccgagggaagggtcgggctgtgcatctctcacggcggcgggcggcggtgccagttcccggactgccgcaggggagcgcagggcagcaccctgtactgcaagtcgcacggcggcgggaagcgctgcgtcttcgaggggtgcggcaagggcgccgaaggcagcacgccgctgtgcaaggcgcacggcggcgggaagcggtgcgtgtatgagggcggcggcgtgtgccccaagagcgtccacggcggcacagacttctgcgtggctcacggcggcgggaagcggtgcgcggtgcctgggtgcagcaagagcgcgcgcggccgcacggaccgctgcgtgaagcacggcggtggcaagcggtgcagggtggacgggtgcggcaagagcgcgcaagggagcaccgattgctgcaaggctcacggtggcgggaagaggtgcaacttcggcgacggccaatgcgagaagttcgcgcgcggccggagcgggctctgcgcggcgcacgacactctggtggcctcacagcagcgccgcggtggcggcatgatcgggccgggcctcttccacggcatcgttcgctctgccagcgttgcaaacatgaacagcgactactcgtcgtcgggcgtgagcacggtgtccgactgcgacggctcgcctgaggcggcgacgaggaggcaggagctgatccctccccaggtgctggtcccccggtccatgaaatctttgacggcggcaaccgtgcagccaccgaagaggagcagagaaggaagggtagtcaccgtccccgaggggagggtgcacggtggtggcctcctgtcgttgcttggcgggagcttcatgaacgtcgacaagctctgaagcagtcagcgcttggggctcgatttgacgatttctacctctacaacgctttttcttaccttagaaaaaagtgagaaaatgccactttttctattagagctgtcagattattgtctgtgcataaaaatattttctcgtctacagatcgaacttgtatggtgaaatttagggtaattttgtttcccttgtgccatcaagggtgaacacatgaa

SEQ ID NO: 128314 - DNA, 1660 bp, Zea Mays
tcagatggcgaaaatgcgcaacacgatgcagatcgctggaccgcagtagctttctgacacagccccgagagagcagggatagggggtcacaaaccataaaccaagaagctgctgcgggacgttcaaatcaaacatctctaccctctccttccagcgaaatggcaagagcggcggctcctccgcctctgcaccggctgcccggtctggccttgctgtgccttgccgtggcagtttgcttctccggcggcgaaaacgccgcggcggcggcctggacgaggaagatagtcggcgttcacgagctcagggtgggggatttctccgtcaaggtcaccaactggggggcgactctcatgtccgtcatcctccccgactccaaagggaacttgggcgacgttgtgctcggctacgacaccgtcgctgaatacgtcaacggcaccgcctacttcggcggtctgatcggccgcgtggccaacagggtcgccggcgcgcggttcacgctggacgggaaagcctaccgcctctaccgcaacgacggcaacaactcgctccacggtgatagcttagactgccggccgctgagaggctgtgctgaatgctgactgcgttcctccgttttctgttctgtttctgactggtgaggagaagaagactgatggctcgtttctcttcctgtgtcatcatcctccgagtatcggaccaggtggccaccgggggttcagcaaggtcgtatggacggtgaaggagcacgtcggcggcggtgactccccgtacatcacgctctactaccatagcttcgacggggagcaagggttccccggcgacctggacgtgtacgtgacgtaccgtctgtcgcgcccgtacgtgctgagcgtgcgcatgaacgccacggcgcggagcagggccaccccggtgaacctcgcgcaccacgcgtactggaacctcggcggccacggcagcgggcccgtcctcggcgaaacggtgcagctcttcgcgtcgcggtacacgccggtggacgccgcgctcgtgccgacgggcgcgctggcgcccgtggccggcacgccctacgacttccgcgcgccggcgcccgtgggggcgcgcctggcggacctgcggccgcgccgtggcactggcggcgtcgcgggctacgacaccaactacgccgtggacggcgccgcgtcgccgtcgctgcggccggtggcgcgcgtctgggacggcgccacggggcgggccatggagctgtgggcggaccagcccggggtgcagttctacaccagcaacgggctcgctggcgtcaggggcaagggcggtagcgtgtaccggcggtacgccgcgctgtgcctcgagacgcaggggttccccgatgccgtcaaccacccgagcttcccgtcgcagatcgtgaggccgggcaaggtgtatagccatgacatgctctttaagttctccttcgcctagctacaagactactggtgcatgcggttcatgcgtacacctgcgcagtgctgtgtcaccttgatgtgtcttgattagactcctccgtctactctcaagaactttacatccccaaataacagcgtgctgcccggtacgagctagggttttatatgtatgcgcgggcgcggcttatgctcgataatttccgtctcattggttggccgtatca

SEQ ID NO: 128315 - DNA, 1631 bp, Zea Mays
tcagatggcgaaaatgcgcaacacgatgcagatcgctggaccgcagtagctttctgacacagccccgagagagcagggatagggggtcacaaaccataaaccaagaagctgctgcgggacgttcaaatcaaacatctctaccctctccttccagcgaaatggcaagagcggcggctcctccgcctctgcaccggctgcccggtctggccttgctgtgccttgccgtggcagtttgcttctccggcggcgaaaacgccgcggcggcggcctggacgaggaagatagtcggcgttcacgagctcagggtgggggatttctccgtcaaggtcaccaactggggggcgactctcatgtccgtcatcctccccgactccaaagggaacttgggcgacgttgtgctcggctacgacaccgtcgctgaatacgtcaacggcaccgcctacttcggcggtctgatcggccgcgtggccaacagggtcgccggcgcgcggttcacgctggacgggaaagcctaccgcctctaccgcaacgacggcaacaactcgctccacggtggccaccgggggttcagcaaggtcgtatggacggtgaaggagcacgtcggcggcggtgactccccgtacatcacgctctactaccatagcttcgacggggagcaagggttccccggcgacctggacgtgtacgtgacgtaccgtctgtcgcgcccgtacgtgctgagcgtgcgcatgaacgccacggcgcggagcagggccaccccggtgaacctcgcgcaccacgcgtactggaacctcggcggccacggcagcgggcccgtcctcggcgaaacggtgcagctcttcgcgtcgcggtacacgccggtggacgccgcgctcgtgccgacgggcgcgctggcgcccgtggccggcacgccctacgacttccgcgcgccggcgcccgtgggggcgcgcctggcggacctgcggccgcgccgtggcactggcggcgtcgcgggctacgacaccaactacgccgtggacggcgccgcgtcgccgtcgctgcggccggtggcgcgcgtctgggacggcgccacggggcgggccatggagctgtgggcggaccagcccggggtgcagttctacaccagcaacgggctcgctggcgtcaggggcaagggcggtagcgtgtaccggcggtacgccgcgctgtgcctcgagacgcaggggttccccgatgccgtcaaccacccgagcttcccgtcgcagatcgtgaggccgggcaaggtgtatagccatgacatgctctttaagttctccttcgcctagctacaagactactggtgcatgcggttcatgcgtacacctgcgcagtgctgtgtcaccttgatgtgtcttgattagactcctccgtctactctcaagaactttacatccccaaataacagcgtgctgcccggtacgagctagggttttatatgtatgcgcgggcgcggcttatgctcgataatttccgtctcattggttggccgtatcatcacatcttgaacatcgcgtgcgttgactctacatgagattttgtttggttacttgcacgtatgatatgcagcctgactgaacggatgcaaaaacaatatattttaagactatttgttg

SEQ ID NO: 128316 - DNA, 1487 bp, Zea Mays
ggacagtcccgcaccgatccgacggcccggcccacccgaagccgacccaatactccacgagcgcgaatctcagcacctccctatataatagagctcgcgcgggcaccactgccttctcccagctccgcctccctttcctaccttcttccctccgtctcccagctcgcgcaggcaggcgacacagcgacgctaaaaaccctagagcgaggaggcgtgccaggccagcggtttgcgatgacggcaccggcggacaaggggaagaaggccaagaccgatgccgacggcggcgaggagaacgagcaaatcgacggcgcccttgtcttctccatcgagaagctccaggagattcaggacgagctcgagaaggttaatgaggaagcaagtgacaaggttatggaggtggagcagaaatacagtgagattcgcagacctgtctatctcaagaggggtgacattatcaagaccatcccggacttttggctcacagcgtttttgagccatcctctactaagtgagcttctgactgaagaggatcagaagatattcaagtacttggactccattgatgtcgatgattctgatgttaaggcaggatattccatttaccttaacttctctgagaacccgtactttgaagacacaaagcttacaaagacctattcctttgttgatgatggaacaaccacaataaaagcttctcaaattaagtggaaggatggaatgggacctgcaaatggaaatggtattaacaagaagggaaacaagcggccattagtagtggaaagttttttctcctggtttagtgatacagagctcaagagtcttgctgatggtgtgcaagatgaggtggcggagatcatcaaggaagacttgtggcctaatcctttgaagtacttcaacaatgaggttgaagatgaatttgaaggagatgaagaagatgatgacgacgacgacgacgatgataatttggatggtgatgacaatgacgatgatggggaccaggagaactgagccctcgcgtttaggcggggaattatgtgacccgtttgggggattttttttggttgtttgacttagctggaactcaacttagggaactgtttagtgccttatgaagtcaaccaacttgaaaggagactgctatatcataatctcggtatatctatcaacgcagtttgacctgtgattcagtttgtttgtgcttcggtcggtcgccttcagatgcatgatgcatggacatgttgtcactgctcaacaactatggccccttgtccgagtgtttccgtttgcatatggacttgtgtcttggcctcttggccgagtgatctagtcgcgagcatccctttccaattccaatgcctgcggagtatttggatagctagggcaggccagtttgatccagcctggggacggtcatcccgtttccgtggaccctgtactgtactgttacgcgcatcgccagatctctatacatccgggatacaaaa

SEQ ID NO: 128317 - DNA, 2113 bp, Zea Mays
atccccgtgtcctccaggtccaactccacccaaccccaccccgtcccgtgatcgtttgcccgtccctatcgttctctctcccccccttttttcctgcgaccaatccgcgcgcttttgtttttgttcctgctcctcggccctcgcaccgcgcgccgccgacgccgcatccatgaacggtgacggcagcaaggaggacgccaacaggcgcctcgagtgggccaccttgaacatggagcgcgccgtcgtcgtgagcgagacgacgaagggcgacggcaatggcaatgcaggccggaaggcgccgataagcatcgtccggctcttcttggcctgcatggtctccggcggcatccagtacggctgggcgctgcagctctccctcctctcgccctactctcagactcttgggatctcgcacagctacgtgtctctgacatggatctgcgggcctatcgccggatttgtggtgcaacccatcgtgggctactacagcgaccggtgcacctcgaagatgggccggaggaggcccttcatcctcgcgggatgcatcatcatctgcctctctgtgttggtgatcgggttctcggcggacatcgggcggcgcctcggcgacaccaaggagcactgcagtacgttcaccggctcccgctggtccgccgccgccgtctacattgtcggattctggttcctcgacttcgccaacaacacggtccagggaccggctcgcgcgatgatggccgacctggccgctggacagcacggccccaacgttggccaggcgatcttctccctgtggatggccctcggcagcgtgcttggatacttgtccggcgccaacgcgaaatggcacgactggctcccttggctgaaaaccgcggcgtgctgcgatgcctgcgccaacctcaagggcgccttcttgactgcggtggtcctcattataatcagcatgtctgtcaccttgtggctcgccggcgaggagcggctcgacaaggaaagcgtcgacacctccggcggcgcgtgctctgcgttcatggatctcttcaagagcctcaagaacctcccccctgccatgttcagcgtgctcgccgtcacggccgtcacatggctctcgtggttccccttcttccagtacaacaccgactggatgggccgggagatcttccacggcgagccgcagggctcgggcagcaaggcggacctgtacgaagccggcgtccgcgagggcgccatcggcctcctcttctgctccgtcgcgctcggcgtcacctccttcttcatccccaggctgtgccggaagctcacgtctcgggtcgtctggtccgtcagcagcctgatggtgttcgtcctcatgacggccatggtcgtcctcggcatggtctccatgaagggctacaggccctcgctcgccgcctccctctctggccccgaccactcgttcaagggcggcgccctcgccatcttcgcgctcatcggcatccctcaggccgtgctctacagcgtgccttgggccgtggcgtctgaggttgccaccgaggacggcggtggtcaaggtctcaccattggcgtcctcaacattgcaatcgtccttccacagctggtgatcgcgctgggcgcaggccccatcgacggcgccttcaacaaaggaaacaccccggccttcggcatcggcgccgccttcgcccttatctgcgcggtcctggcgctcatcctcctcccaaagacgagaggcgtctccaacgccaccgtcatggccggcgggcactgatccatctatctccaggcaggcttgtcgcagcggctgaccggctgagagtagatcagaaattcagaatctgcttcttggtttcagccccacccgattaaggaggtgtttggatcatccggagtccaggttttagatgccaattaagactataattataaagctaattgataagccatggttaattcacgagatgattttattaagtctaattagttcataattagcacattttagtatcgcaaaatatgagcaaatcatgtattaatagattcgtctcgcgaattatacaattagttttataattagcatgtgtttagtcgtcctaattggtatccaaactaattggtatcc

SEQ ID NO: 128318 - DNA, 357 bp, Zea Mays
cacgttgacagcatgtgtggctacaaaacaaaacgtcacgtgacatgcagcacaagccgccctcacggcccagcctacaaataacggaagcggacgaacacatcacaccacacggatcccatgggccgcaagatcgtcgccgccctcgcgctggcgctcctggtgctcggcgcggccgaggcccaggtcctgccgaccccctgctgccgcattgactgctgcgacggcaagcgcgagtgctgcggtcccggctccggctccggccccgggatggccgtgaccgtgaacgccgtcacccggccggccgctgtggccttcgccagcaacgccaagccgaaggtcggcgctgaaaactag

SEQ ID NO: 128319 - DNA, 1490 bp, Zea Mays
gtgcgggaaatagtttctctctctcttcttcttgtaagatatttcggagtaggaagtgcgtgccttcctcgcagctcattcgccgaggtaacatcccctgcccttcctcacatttcctccctgttcgtccgtaatagtcgtttccgaaccttgcgtttcgtgggatttgtcgaggcgagggcttcgatttgacccaggaatcgcccaaatccgcttgtcttcgacttcagttcatccccacgaatttctagggttttagtgtcgattttgtcccccttcattacatttgattggcggtgaattgggccccgttttgatgattccttgggttcgttggacggcaggaaacgagatcctctagaggtttgtgctgtttagcgtgagtttttttggggccgatttgctttgctcgcatgggggatcatgtcgcggtggatgttggggagctcgtagcgtcccgagtcggtgaggcagcggggctagtgtccggcgccaaggaggaaacagaggcgctgattgggatggtggagtgccgcatttgccaggaggaggacctcaggaagaacctcgagagcccctgcgcttgcaacggcagcctcaagtatgctcacagagaatgtgtgcaacgatggtgcaatgagaaaggggatacaatctgtgaaatctgccatgagttgtacaagcctggttacactgccccaacccaggtgcatcatgatgaaactaccatagagataagtggtggagattggaccatctctggcaaccgtttggatttacatgatcctagaatattggcaatggctgctgctcaacaccgtctacttgaagacgactatgatgaatatactgcaacaaacaacaacgctgctgcattttgccgctctatatttctgattttgatggcccttttgctcctgaggcatacactgaccattactaacagcgatgatgaagatgatgcatctgctattttctcgctatttcttttgagagcggctggatttttgctgccatgctatattatggcttgggctattagtatcatgcagcgtcaaagacaaagacaggaagaagcaatgctattaccaacggaagtggcgatcattctgcatcggaacggaagaacaatgcaatttgcggtggcaccaccagaaacccctatctcacctcaccccgagctaaaccaatagaatacatcatcgacagggtcacagtcctcgcctcgggagtgcataacaggtggaaactcgaggacattgtgcaaagcatgtgttgcatcggccacctcgaacggccatgttgcagcaaaaatgttgtgccttcgaattgagttaactttctagcttcagattcaatgcttgttttatggcctctcagcatcttctgtacataaagagatttctctaataaatgaatataagttaaatcaacacaaatttcgattttgaacagtggcacctcagaaaaacatcgctgtatttctaacc

SEQ ID NO: 128320 - DNA, 1233 bp, Zea Mays
gtgcgggaaatagtttctctctctcttcttcttgtaagatatttcggagtaggaagtgcgtgccttcctcgcagctcattcgccgaggaaacgagatcctctagaggtttgtgctgtttagcgtgagtttttttggggccgatttgctttgctcgcatgggggatcatgtcgcggtggatgttggggagctcgtagcgtcccgagtcggtgaggcagcggggctagtgtccggcgccaaggaggaaacagaggcgctgattgggatggtggagtgccgcatttgccaggaggaggacctcaggaagaacctcgagagcccctgcgcttgcaacggcagcctcaagtatgctcacagagaatgtgtgcaacgatggtgcaatgagaaaggggatacaatctgtgaaatctgccatgagttgtacaagcctggttacactgccccaacccaggtgcatcatgatgaaactaccatagagataagtggtggagattggaccatctctggcaaccgtttggatttacatgatcctagaatattggcaatggctgctgctcaacaccgtctacttgaagacgactatgatgaatatactgcaacaaacaacaacgctgctgcattttgccgctctatatttctgattttgatggcccttttgctcctgaggcatacactgaccattactaacagcgatgatgaagatgatgcatctgctattttctcgctatttcttttgagagcggctggatttttgctgccatgctatattatggcttgggctattagtatcatgcagcgtcaaagacaaagacaggaagaagcaatgctattaccaacggaagtggcgatcattctgcatcggaacggaagaacaatgcaatttgcggtggcaccaccagaaacccctatctcacctcaccccgagctaaaccaatagaatacatcatcgacagggtcacagtcctcgcctcgggagtgcataacaggtggaaactcgaggacattgtgcaaagcatgtgttgcatcggccacctcgaacggccatgttgcagcaaaaatgttgtgccttcgaattgagttaactttctagcttcagattcaatgcttgttttatggcctctcagcatcttctgtacataaagagatttctctaataaatgaatataagttaaatcaacacaaatttcgattttgaacagtggcacctcagaaaaacatcgctgtatttctaacc

SEQ ID NO: 128321 - DNA, 1844 bp, Zea Mays
cgatcaagtcaagaaatgctagtatatactgcacaagcaagaagcaactcgatcccttcccttgtcccaggtggccagaggaggcaagcagacatgagcgctgctactctcccgcccggccaggagccgcacgcagtgtgcgtgccgttcccggcgcagggccacatcacgccgatgctgaagctggcaaagatcctccacgccaggggcttccgcgtcaccttcgtcaacaccgagtacaaccaccgccgcctcgttcgcgcccgcggcgccgccgccgtcgcgggcctcacggggttccgcttcgccaccatcccggacggcctgccggagtcggacgccgacgccacgcaggacccggcgaccatcagctacgccaccaagcacaactgcccgcctcacttgagaaacctgctcgccgggctggacggcgtgacgtgcgtcgtggcggacaacctgatgagcttcagcttggacgccgcgagggaggcgggcgtgccgtgcgcgctcttctggacggccagcgcctgcggctacatgggctaccgcaacttccgcctcctcatcgacaggggcatcatccccctcaaagacgaagagcagctgacgaacgggttcatggacacgccggtggactgggcgcccggcatgagcaagcacatgaggctcaaggacttcccgaccttcctccgcaccacggaccccaacgacgtcctgatgaccttccagctacaagaggtggagcgctcggagtacgcgtccgccgtcatcgtcaacagcttcgacgagctggagcggccggcgctcgacgccatgcgcgccaccatcccggccgtatacaccatcggcccgctcgcttccgtcacggagcaggtcgtcccaaggggccccctcaacgcggtgagctgcagcctgtggcaggaggaccagtcctgcctcgcgtggctggatgccaggaagccccagccgtggtcggtggtctacgtgaacttcgggagcgtgactgtcatgagcgggcaggagttggcggagttcgcgtgggggctggcgagcagcggccacgacttcctgtgggtcgtcaggccggacgtcgtgaagggcgacacgtcctcggccgcggcgctgccccctgggttcctggaggcgaccaagggcaggggcctcgtggcgagctggtgcgaccaggaggccgtgctgcggcacgaggcggtgggcctgttcctcacgcacagcgggtggaactcgacgcaggagagtctcagctccggggtgccgatgctgtcctggcccttcttcgcggagcagcagaccaactgccggtacaagtgcgtcgagtggggcgtggcgatggaggtcggcgacgacgtgcggcgggaggccgtggaggcgaccatacgggaggcgatgggtggggacaaggggaaggagatggcgcgcagggcggcggagtggaaagaggtcgccgcgggggcggcggcgaggtcgatcgcgaacctcgacacgctgatcaacgatgtgctgctctctccggcacgattgggcggctcactcaaaacgacttgaataatggatggccccgatcaaatcttggcgatgcggtgccatggatgagcgatgacgactatcgagagtctgaaatggttgtctttcttttccagcccccatcgtgacttttgtgactgtgtgatgtatgcgtttgcaaagttagtgtttccctctcgtcgccttgcacggtagttactagttagaccaagagctccttaaaattaaaacaaaagttgattttgttttttaaaaacatatctcaaacatttttaaataaatgagacattaaaaatatagtt

SEQ ID NO: 128322 - DNA, 847 bp, Zea Mays
gtgtcttgtcttctacgtgaaatgcgattccttcgacgttttgttcttttgcggcaatgcgttttcttccattccacgcgtgaagaagagatcgattgatgtgctcgcaatggccagtaaatcagtagcctcgtggtttagacaggttgagcacgttgtttgcttatgatgttctcctgcgttgcgtccttctactgcattattacaaaggcagagacatcgtcggtactccactgcaatgcaagtgccaacagcagtagctagcacagttcatcgacctcgagctccgcaaggcggcaagcaattaatcacccaagctaaagccatggcgcctcgcagccgcctcctcgacctggagaggcacgacgtgctctccttctacggcggtggtgcctaccaccagagcgcgagcgcgtcagcgtggccgcctacggctacgggatcgttttctggcccgatcgacttcctcgtcgccgccctgctcctccacctcgtcgtcccgttcccgcacgccgccgccgccgtctgcggggcgctctacgtcgcctactgcttcctcctcgaccgctcagcgcaggtgagctcgtggccttccgctgccgctgccatgccgtcggcagaaccctctcgcccgactactccgggcaaggtggcagccatgcaagtagcagctggcttgcgacttccctgacgcacgagcaatgtccagaaatgtactcacttggaaataggatcacatttacaaatcagatcagtctggacatatgtaatctcgcacgcaacccagcatatggattgaatagtattgagtcaatttaaatctatagaagtcaaaaatttatctcaa

SEQ ID NO: 128323 - DNA, 630 bp, Zea Mays
aagtgcaagtgccaactgcagtagctagcagcctgcctaacacagttcgtcatcgacctcgagggccggcaagcaatcaatcacccaagctaagccatggcgcctcgcagccgcctcctcgacctcgagaagcacgacgtgctcttcttctacggcgatggcgcctaccaccagagcgagcgcgtcagcgtggtcaccagagcgatcgccttctggcccgtcttcctcgtcgccgccctgctcctccacctcatcgcgccgttcccgcacgtggctgccgtctgcggggcgctctacgtcttcctcctcgaccgcgcagcgcaggcgagctgctccagctcgtggccttccactgccactgccgcgccgccggcagaggcctctcgccccactactcggtgcacagcggcaggctatacggtcgtgcagaattgaagccgcgatggctagcatatgctcgtgccatctttctcgttgcaggttgttagttggatgcttaccagttaccatgcttaattgcatgtttccattgtacgtagctgatcaacgtacgaagatggctgtggaatagagtggcttaagcacattccgcgtattacagaaaaaaaagagttcaggtggtcttcttcc

SEQ ID NO: 128324 - DNA, 1046 bp, Zea Mays
agcaattcagcattcaccccttgataaaccgttttatacgcatagaggtcttcgtcgtgttcgtcctgcccaactgcccgctgaaaaacaaactcaccaacaaagtgacctgaaactgggagcaagcaaccgagggcgagagccatggcgaagcctcgcagcggcggcggcggcggcctcctggacttagaggggcactacgccttttacggcgcctaccacagcaaccccgtcaacgtgggcatccacgagctcttcgtgtggcccatcttcctcaccgcgctcatgctcctccacctcaccgccccctccacgcacgccgccggcatcagcgccgcggtctacgcggcctactacttcctcctcgaccgccgcgcgggcgcgctcgccgccctcctctgctacctctgctgggccgccagcggcgccctctctgcccgcctcggtttctctgttggatggaaggttgtattggtggcccagttgttctgttggattatgcaattcattggtcatggagttttcgagaagcgagcgcctgctcttcttgacaatcttgtccaggctttcctgatggcaccattctttgtgctgctagagattcttcacacatttggcgggtacgaaccgtatcctggcttccacgacaaggtgagcaagttgattgaggaagcccggaaggaatgggaggacaagaaatcaaagaaatcctcatgagatatgcgtgaattaacggctccgaactgttggggtctgcctgctcgagataacctgctgattggatgaatctattgcaaggatggttaccgaatactgatgctatttatgttgtataagatgatgtgcgctatgttgtctgatgtttttatatatattataatggtgacgaaaccgaggtaaaaaataatttatatatgtatactggtgtgattgccttgctagggcccttgtttctctatgagaggaatgtcttctgttgaggtgtgttacaagcggacccaattcgtatttcaaacataagcaagaacgcgtgtaatctggcccat

SEQ ID NO: 128325 - DNA, 1905 bp, Zea Mays
ccccagctagtagctagggcaccgcgcacgcggcacgccccggcccccgctctatttatgccgctagctagcgacaccgaccaggtcacttcattcccttgtcactagctagatcgactgactggagaggagctatcgtctacctctgggcgagctgcgtgtccctgccgtccttctcgctcctgtggtcgccgcgcgcggcgctgcgatggggcggtcgccgtgctgcgagaaggaggccgggctgaagaaggggccgtggacgtccgaggaggaccagaaactgctggccttcatcgagcagcacggacacggctgctggcgctcgctgccggccaaggccggtctgcggcggtgcggcaagagctgccggctccggtggaccaactacctgcggccggacatcaagcggggcaagttcacgctgcaggaggagcagaccatcatccagctccacgctctcctcggcaacaggtgatcattcttcatcatcatgcacttgtttcgctttgccatgcatgacacagcacagctcgcgtgtgcctcgtgctcgcgtcggcaggaatgtcgtgagtgaaactgaggccggcgtggcaaaaggagtactatacatcttgtctgtaacaacgtgcatgggtgaaactgaggtgtggcaaaaagagtagagtactcgcatcgcacggggccagtttattggtcttgtcacgtttgtcattaatgttggcgcgagcccgcttgcctcgctgtgcctcgccatccatgtcagggcgttggaccatcgtcaccgcccgcttgtcgccctggccatgccatgttgacctcgccacgcccccatcattgctgtccgtcctactccaccacgagctccttcaatgcaccccccctacacgcctctaaccattacgccaaaccttctttactgttcgagttactagtaacattgcttgcttcatcagaggtgaaaaaaaaatgactgacaatgacatgccctcgcgcaacccgcaggtggtcgtcgatcgcgacgcacctgcccaagcgcacggacaacgagatcaagaactactggaacacgcacctcaagaagcggctcgccaagatgggcatcgaccccgtcacgcacaaggcccgcgccgacgtcgtgggaggctcctctggcgccggcaacaactctggagcgcgctacagggccgccgcgcacctcagccacacggcgcagtgggagagcgcgcgcctcgaggccgaggcgcgtctggcgcgcgaggccaggctgcgtgccctttcctcgccgccgccgccgccagggcccgggccgggccccgcgtttagcgggctcgagtcgccgacatcgactctgagcttctccgagagcgtgctgttcgccagtgcggcgcacgacacccacgccctgacgccacgcgcttacgcagaggcgttcggggcggagcagcaacagcgcttcgctgacactgccgcggccgccgccgacgccgcgccaggcttccttgcaggcgtccttctcggctgctccgtcgccggcgcggagaaggggttcgcggcctcgtcgacggacgccagcgtctgtgagcagcagcaggaggaagaggacaagggctactggagcagcatactgaacatggtcaactcctccatgtcgtcgtcctcgtcctcgctgacttccgatgctgtcacggaccccgccgccgcgtacttgccgccggcgacggcggcggccgagttctgagtgattgtcgtgcaataataacgaacctgtgctaatgttaccttgtcatgtgtgttgcttactagtaggtgcgttttggtgctagttagtttatttacgtgctaatggggtgtcgtccacgtgtgcttgtgctttatgatgtgcaataataaacatgtacgtac

SEQ ID NO: 128326 - DNA, 1374 bp, Zea Mays
ccccagctagtagctagggcaccgcgcacgcggcacgccccggcccccgctctatttatgccgctagctagcgacaccgaccaggtcacttcattcccttgtcactagctagatcgactgactggagaggagctatcgtctacctctgggcgagctgcgtgtccctgccgtccttctcgctcctgtggtcgccgcgcgcggcgctgcgatggggcggtcgccgtgctgcgagaaggaggccgggctgaagaaggggccgtggacgtccgaggaggaccagaaactgctggccttcatcgagcagcacggacacggctgctggcgctcgctgccggccaaggccggtctgcggcggtgcggcaagagctgccggctccggtggaccaactacctgcggccggacatcaagcggggcaagttcacgctgcaggaggagcagaccatcatccagctccacgctctcctcggcaacaggtggtcgtcgatcgcgacgcacctgcccaagcgcacggacaacgagatcaagaactactggaacacgcacctcaagaagcggctcgccaagatgggcatcgaccccgtcacgcacaaggcccgcgccgacgtcgtgggaggctcctctggcgccggcaacaactctggagcgcgctacagggccgccgcgcacctcagccacacggcgcagtgggagagcgcgcgcctcgaggccgaggcgcgtctggcgcgcgaggccaggctgcgtgccctttcctcgccgccgccgccgccagggcccgggccgggccccgcgtttagcgggctcgagtcgccgacatcgactctgagcttctccgagagcgtgctgttcgccagtgcggcgcacgacacccacgccctgacgccacgcgcttacgcagaggcgttcggggcggagcagcaacagcgcttcgctgacactgccgcggccgccgccgacgccgcgccaggcttccttgcaggcgtccttctcggctgctccgtcgccggcgcggagaaggggttcgcggcctcgtcgacggacgccagcgtctgtgagcagcagcaggaggaagaggacaagggctactggagcagcatactgaacatggtcaactcctccatgtcgtcgtcctcgtcctcgctgacttccgatgctgtcacggaccccgccgccgcgtacttgccgccggcgacggcggcggccgagttctgagtgattgtcgtgcaataataacgaacctgtgctaatgttaccttgtcatgtgtgttgcttactagtaggtgcgttttggtgctagttagtttatttacgtgctaatggggtgtcgtccacgtgtgcttgtgctttatgatgtgcaataataaacatgtacgtac

SEQ ID NO: 128327 - DNA, 1951 bp, Zea Mays
gtcacttcattcccttgtcactagctagatcgactgactggagaggagctatcgtctacctctgggcgagctgcgtgtccctgccgtccttctcgctcctgtggtcgccgcgcgcggcgctgcgatggggcggtcgccgtgctgcgagaaggaggccgggctgaagaaggggccgtggacgtccgaggaggaccagaaactgctggccttcatcgagcagcacggacacggctgctggcgctcgctgccggccaaggccggtgaggatccgacgacggagctcgacgatatatccatcgacctcacgttttcttcgcattccattcgttttattatatttgccatccagcagaatataatgctcatctatgcgtgtgcgtctctctgcaggtctgcggcggtgcggcaagagctgccggctccggtggaccaactacctgcggccggacatcaagcggggcaagttcacgctgcaggaggagcagaccatcatccagctccacgctctcctcggcaacaggtgatcattcttcatcatcatgcacttgtttcgctttgccatgcatgacacagcacagctcgcgtgtgcctcgtgctcgcgtcggcaggaatgtcgtgagtgaaactgaggccggcgtggcaaaaggagtactatacatcttgtctgtaacaacgtgcatgggtgaaactgaggtgtggcaaaaagagtagagtactcgcatcgcacggggccagtttattggtcttgtcacgtttgtcattaatgttggcgcgagcccgcttgcctcgctgtgcctcgccatccatgtcagggcgttggaccatcgtcaccgcccgcttgtcgccctggccatgccatgttgacctcgccacgcccccatcattgctgtccgtcctactccaccacgagctccttcaatgcaccccccctacacgcctctaaccattacgccaaaccttctttactgttcgagttactagtaacattgcttgcttcatcagaggtgaaaaaaaaatgactgacaatgacatgccctcgcgcaacccgcaggtggtcgtcgatcgcgacgcacctgcccaagcgcacggacaacgagatcaagaactactggaacacgcacctcaagaagcggctcgccaagatgggcatcgaccccgtcacgcacaaggcccgcgccgacgtcgtgggaggctcctctggcgccggcaacaactctggagcgcgctacagggccgccgcgcacctcagccacacggcgcagtgggagagcgcgcgcctcgaggccgaggcgcgtctggcgcgcgaggccaggctgcgtgccctttcctcgccgccgccgccgccagggcccgggccgggccccgcgtttagcgggctcgagtcgccgacatcgactctgagcttctccgagagcgtgctgttcgccagtgcggcgcacgacacccacgccctgacgccacgcgcttacgcagaggcgttcggggcggagcagcaacagcgcttcgctgacactgccgcggccgccgccgacgccgcgccaggcttccttgcaggcgtccttctcggctgctccgtcgccggcgcggagaaggggttcgcggcctcgtcgacggacgccagcgtctgtgagcagcagcaggaggaagaggacaagggctactggagcagcatactgaacatggtcaactcctccatgtcgtcgtcctcgtcctcgctgacttccgatgctgtcacggaccccgccgccgcgtacttgccgccggcgacggcggcggccgagttctgagtgattgtcgtgcaataataacgaacctgtgctaatgttaccttgtcatgtgtgttgcttactagtaggtgcgttttggtgctagttagtttatttacgtgctaatggggtgtcgtccacgtgtgcttgtgctttatgatgtgcaataataaacatgtacgtac

SEQ ID NO: 128328 - DNA, 592 bp, Zea Mays
attgttaccagatcgaggagagtttcagatggtcggagctgagattgcgaaaaagctcaagcgatcacctctagctgccagaacagtgggaagacagttatgtataagaccaaacatcgagttttggaggaatactcgggatcgggaccttctggacgaggcaatgagagctatgtggtggagctaccagcatctagatgagcaggtcaggcgatgcttttcttattgcagtatttttcccaggaggcgttggctggaccctgagtatttagtcaggttgtgggtggcagaaggatttgtcaccagtcgcaatacaggggaggaactggaggctgttggtcgaggctactttgatgagttagtgtcagcctcatttctgaaaccagtagatggtgacaaggaacgctatacgatccatgatctgttgcatgacttagtaagtaaagtagctggaagtgactgcttcagagctgacaatggctgggaaggagaatttcctcaggatgtccttcatctttgggttaagaactgtaaattagacttgattagccacaaaatttccgtcccaggtttgactaataaacaactttaa

SEQ ID NO: 128329 - DNA, 292 bp, Zea Mays
taagtaaatcattttcgcagaaaagagtacaaaacattctggacaatagatctagatgtcaacatcaaccatcatttttggaagtacaggttatggcaaaaaagaactcaccagcggctgcatacgctttttccaattgggtttctatagggatttggcgtttgcattgaaaaggcagtaaaccacaagatatatcgtgacaaaaagtctagaagagaatccaaagttgatgcgataatagcaagtgaaccactccttactaaagcatacacttttgcagcaaagagaacca

SEQ ID NO: 128330 - DNA, 277 bp, Zea Mays
gtttctttgccgagtgtctcgtggactggcactcggcaaagaaccctccagtgggcccctttgccagtatctttgtcgagtgcctttgcaaatctgaatttttgcatgcacggttttccaagtttcgagtgaccttcagttcaaatctgaattttccgaagaaattcaaataaacaaactaaatgtactagctatagaaaccactgttataattgtcccaaaatggtacatgttggtctacatagtgtaggaacataccacaaaaagtttggtggcc

SEQ ID NO: 128331 - DNA, 384 bp, Zea Mays
atggggaggggaaagatcgtgatccgcaggatcgataactccacgagccggcaggtgaccttctccaagcgccggaacgggatcttcaagaaggccaaggagctcgccatcctctgcgatgcggaggtcggcctcgtcatcttctccagcaccggccgcctctacgagtactctagcaccagcatgaaatcagttatagatcggtacggcaaggccaaggaagagcagcaagtcgtcgcaaatcccaactcggagcttaagatgcaatttagtatttcgggcccgtttggcaaagctccagctcctgcttctttagctctagatcctgatcctcgtgaggagctgatcctcctgattctcctagagaatcagaatcatttttaa

SEQ ID NO: 128332 - DNA, 1025 bp, Zea Mays
gctttctttagaatgggggatttttagaggaaaaaacaaacagggttcagcaatccaggaccaggactataacagtttttggcaaagggaggcagcaagcttgagacaacaactgcacaacttgcaagaaaattatcggcagttgacgggagatgatctttctgggctgaatgtcaaagaactgcagtccctggagaatcaattggaaacaagcctgcgtggtgtccgcgcaaagaaggaccatctcttgatagatgagattcacgatttgaatcgaaaggcaagtttatttcaccaagaaaatacagacttgtacaataagatcaacctgattcgccaagaaaatgatgagttacataaaaagatatatgagactgaaggaccaagtggagttaatcgggagtcaccgactccattcaactttgcagtagtagaaaccagagatgttcctgtgcaacttgaactcagcacactgccacagcaaaataacattgagccatctactgctcctaagctaggattgcaattaattccatgaagaagagtaaaactgccgtcttatgatgctgaaggaaactatttattgtgaagagatgatactcagagaaagacatatttgtggcagggagatttgagatatgaacttataaatgtaatgcaaataattttcagaccggaatggggtcgtggaattcagaggatgattgctttctagttgcatttgatgtttgatgagacttttctcatgtgaaacgtttattaaaacttcaaaatggtgcagatgttgctactacacttgttaggcttgtataaatatctgaccatgtgtactagcattacgaaaacagaaaagaagacagacagccctgtcgaacatcttgacgtgtttctaaaaggtttgataggggacaatgatgcgatctaggagtacaaacagagtctagtttccactcagttgagttttatattgctctcaagcgttatcaagggtttagtaggatacagatataatatgaagatgcagt

SEQ ID NO: 128333 - DNA, 2229 bp, Zea Mays
atggccaagccaccgccacgggacgacggtgagcgcctgctcgtagacgacgaggaaggcgaaggcaaggttggcggcgacgccgacggagacgacgagcaggcggtccgggacggggcagttgcggaggagcagcgggtcaccgctccacccgttcctcccgaagggcgcgagctgtttcgccgggacccggatgaaatggagcacccaccggcgttgcgcgcgtgcctcaactcgccgcaccagctccccgctcccgacgaccgactgctgaagcccgtcatccaccgcctcctcctggagcgcgcctgccaacccgcccaggtttcgttcaacaccgacgcagaggaggaggttctcaccaccacgcccaccaagtgttcgagaatgggcctcaaccgcggcacctactctgtccccaaccgccccgtggtctgcatcctgggtgggcccaactccgacgactacggctccaaccgctccatgctcctggacatccatgttgtcggcggcggcctctccaaccccgacccggacgaccccaaggtcatgggtctcgaggcccgcgaacaaatgcggtacatcgagaagctgaagcaggcgcgctatgactcgcaactgtcctgtcagaggggagaccttgccgcgacatggcagccagcacggtcgctggcgttcacggtgggcaacacgcggcttgcagtccacgtcgcgtcgcagtgccaacaagcgtcctcgcgcgacacgcgggccatggccaccatggcgaagaagagcgtcggggacctcacggaggacacgatcatcgcgaggctctgcacctacaccactttccaagacctcctccgagtgcacggcctcgctgtgcgactatgccttccccagagcagctacgttgccacccaaatcgtgcacacctgcaacggctacgaacgcaaggcagacaatgatattggccctgaaattgagacgctcgtgttcaccttgccctacagcgcaaatcggcagatgcttagtcaatatccggtggcgacatatgtcaactttccccttatgcgatggaactgccaactcgccgtgttggtcggagtgctctggatcgaggcttgctgctgcacgccgtgttgggagggaagctgtcgtctcctgccgctgggagaagccggggaccctctgtttgctgaggccaaaatctccttccttgctcaggcactcgaggacgatgcaatgggtatcatacagcgttgtttctcgcctttattccattgcagcaaggatgtagtgtcgcgccccaatcgtgtcgcgagcatcaccgacatccacatcgaggaggacagccctgtgtgcaagcttgttcctgagatcatgggtttctcaatttttgctgcacggcttggattaccagtcaaggacgaggatgggccagaggggatatttaccaacagaaaagctgtcgaagcccatcagttcacaatatggcctttcggacagactgtatctggtcatttcttcccaaatggtggctaccatgccgggcagaatatggtgctcatcttggatgtagtccgtttcaaatatcctctgcattggattccattgcaacttattttggaagccatgaatacaactgataactcaactggagggttcatgcttagatcaagaaaggttgcagccccttcattgttgcacacagtgagttgcagagatgaaaactggaaaagtgtgtcaaggttttgtgttgaggatttaccaagtcttctgaagacgatccctcttccgaaatctcaatctacaagctcttcttccagttctctcgatccccttcctagggggctgctaatagatggcgcggagcgcgtactccacggggccgaggcggaagcgggcgagtgccgggccgaagccgatggagaactgggagacatggatgccccgggacgccgcggccaggaagtacctagactcgtggacgagcacgatggcggccaggacggaggccgtggaggccacggactcgacgctggcgaggaggtctggcgcggccgcggcgggcttagcgaagttgcggtggcggcaggggagcgggaggtgcacgggaaggtggtggttgtgagaggtggagtggagcggggacgggaagcggtactgcttgagggatggggagagatgggtggcaatcatggtgggagggacggacgaagaggaggaagaggccgcaatggataa

SEQ ID NO: 128334 - DNA, 174 bp, Zea Mays
gtaggaacacaaacatattgtaggatacaatacgacaatataatacatatggcgcggacgcaggttccacaactgtctctaaaagacagcgtacatgcagttgttaaacggtgatcagtacaacaatacataactctaacagtttgcatctccatagactatacatgtacggtg

SEQ ID NO: 128335 - DNA, 397 bp, Zea Mays
tttcaaataattctgtgatatattcttttccatattcacgcctccctttgtattcgaagtaaagaatgattaagttttcttttgtttgtttcaatcttctgtgttattcatctgttttggtaccattatctgtatatattgttcctgttatgtttttctgtgatggttgttgttggtgtttagcattctcaagaacaaacaaacctatttcatagggtcaagactgtttcatctgcaaaaaaggagggcatatggcgaaggattgccctggtaagcgcaagaggaatgatcatcaatccacattctgtataagatgtagagaaacaggtcatgttatgtttggatgtgctaatgattacccatcagatgatatagaggtagtgcttctttgccttgt

SEQ ID NO: 128336 - DNA, 208 bp, Zea Mays
gttagagtcacaaagccatctatgttgttccgacttctttgacaattctctggaacaagttagctgttataactgtgcccaatctggccattcttgcctgggatgtgctaagcaacgcagggaagctagtgctgtcacaaccccaaccttatgcttcaaatgtggcgaggaaggtcacttcgcacgcggctgcacgaagaatgccaag

SEQ ID NO: 128337 - DNA, 2197 bp, Zea Mays
cccatgttcgcatggtcacgcccacggccgcaccaaccaccagccccgatttcctcctcaatcacacccccaaaccaaaacccaaacagcacttctcctgcaatcgccgacgtcgacggaggcttcgccggccggagcagcgccgacggttgttttgcccctccctcgtccggcccagcagcccaggcgagcatgccttcgattgcgccaccgtcttcctccgtcgctgccctcacccgccaaccggtgcaattcttcaaagggtgcagtgtatccaaggagacaaagggaccggtccgcagtttcttcactgcaaattcaaagagcaccacggtgaaatcagcggacttgaaagtagcatcatccttcaaaaatgatggtggttatccagctggcggtgtctcttggaaggacgacactctattgccaaaaagcacaaccattcgtggccaggaccatccggttgctgaccctgtactcccaatggattccatgattacgccagaaatcctctctgctaatgtggaacgtgttatagacatgtttgcagacgatgacactgatactgaacttgatttggatagcccgacagaggacttcacatcaattgcagaagccattgaggacatacagcaaggaaaacttgtgattgttgttgatgatgaatcaagggaaaatgaaggagatctgataatggctgcctccttggttaccccagaggctatggcttttatagtaaggcatgagacaggaattgtttgtgtcagcatgaaagaagatgatctggaaagactgagccttcctttgatggttaccacaaaagaaaatgagaagctatgcactgctttcactgttacagtggatgcaaaagagggcacaactactggggtatctgccaaggacagggcaaaaacagtcatgactcttgcatctcctgactctaagcctgaggacctcaaccgccctggtcatattttccctttgaaatacagagaagggggtgttcttaaacgggctggacacaccgaggcatctgttgaccttgccatgttggctggattacctcctgttgctgtcctttgtgaaattgtggatgatgcagatggttctatggctcgcctaccaaagttgcatgtctttgctgaaaaggagaacttaaagattatatctattgctgacttgattaggtataggaggaaaagagacaggctaattgaacgcgcttctgttgcacgcttgcctttgaaatggggcaatgtccatgcctattgctacaaatctgttattgatggcattgagcatattggcatgatgaaaggtgatattggtgacagccaagacattttggtgagggtgcactctgagtgcctcacaggcgacatttttggatccgcaagatgtgattgtggcgaccaacttgcgatggcaatggagatgattgagaaggctggaaggggcgtattagtctatctccgtggacatgaaggaaggggtattggtctgggccacaagcttcgtgcttataacttacaggatgatgggcgtgatactgtggaagctaatgaggaacttggtcttcctgtggactcacaggaatacgggattggcgcacagatattgcgggatctaggagtccgttcaatgaagctgatgactaataaccctgcgaaatatagtggtattaagggctacggattgagcattgcgggcagggtgcccttgattacgccaattaccagtgagaaccgtaagtacctagagactaaaagaacaaagatgggacatgtatatggattggccaatgcgcaggccaaccaagcaaataaatggcagccagagcacagaagagaatcattaggcccccaagcatgtttccattattattccagcaatccagcttcgtggcacaaaagagtgatatgattcttcgtttggggagttcctgaaatcttctccccctatatttccgtagattctttcgcaaaaaagccgatatttcggtagatcgatttcttcaattgtaacggtaggttttaaggtggctaatctctactacttattaagttagcaatagtagcctgcctttttgtgttctgccgtgtagtctctgacaggtagggcccgcttgctcctgcgtgtatgctcccggtttattccgtaacacattttttttacaaaaaatagaactactgcacat

SEQ ID NO: 128338 - DNA, 1870 bp, Zea Mays
atgttcgcatggtcacgcccacggccgcaccaaccaccagccccgatttcctcctcaatcacacccccaaaccaaaacccaaacagcacttctcctgcaatcgccgacgtcgacggaggcttcgccggccggagcagcgccgacggttgttttgcccctccctcgtccggcccagcagcccaggcgagcatgccttcgattgcgccaccgtcttcctccgtcgctgccctcacccgccaaccggtgcaattcttcaaagggtgcagtgtatccaaggagacaaagggaccggtccgcagtttcttcactgcaaattcaaagagcaccacggtgaaatcagcggacttgaaagtagcatcatccttcaaaaatgatggtggttatccagctggcggtgtctcttggaaggacgacactctattgccaaaaagcacaaccattcgtggccaggaccatccggttgctgaccctgtactcccaatggattccatgattacgccagaaatcctctctgctaatgtggaacgtgttatagacatgtttgcagacgatgacactgatactgaacttgatttggatagcccgacagaggacttcacatcaattgcagaagccattgaggacatacagcaaggaaaacttgtgattgttgttgatgatgaatcaagggaaaatgaaggagatctgataatggctgcctccttggttaccccagaggctatggcttttatagtaaggcatgagacaggaattgtttgtgtcagcatgaaagaagatgatctggaaagactgagccttcctttgatggttaccacaaaagaaaatgagaagctatgcactgctttcactgttacagtggatgcaaaagagggcacaactactggggtatctgccaaggacagggcaaaaacagtcatgactcttgcatctcctgactctaagcctgaggacctcaaccgccctggtcatattttccctttgaaatacagagaagggggtgttcttaaacgggctggacacaccgaggcatctgttgaccttgccatgttggctggattacctcctgttgctgtcctttgtgaaattgtggatgatgcagatggttctatggctcgcctaccaaagttgcatgtctttgctgaaaaggagaacttaaagattatatctattgctgacttgattagatgagttgaattaccaaaacttcagcttctggtataggaggaaaagagacaggctaattgaacgcgcttctgttgcacgcttgcctttgaaatggggcaatgtccatgcctattgctacaaatctgttattgatggcattgagcatattggcatgatgaaaggtgatattggtgacagccaagacattttggtgagggtgcactctgagtgcctcacaggcgacatttttggatccgcaagatgtgattgtggcgaccaacttgcgatggcaatggagatgattgagaaggctggaaggggcgtattagtctatctccgtggacatgaaggaaggggtattggtctgggccacaagcttcgtgcttataacttacaggatgatgggcgtgatactgtggaagctaatgaggaacttggtcttcctgtggactcacaggaatacgggattggcgcacaggtaagactggattatctctcaagttaccgtggaacctttctccacaacacttcctttctgctgaagtctgcttgtataggaaagttgtatcatatatctttctagagcttcaacatgaatttacttggaggcactgaagaatttcatgcctgttgcagcctgaaactgtgatgtacatagaatgaagtaaccctatcatgcagtgagtaggccactgacatttcagta

SEQ ID NO: 128339 - DNA, 2382 bp, Zea Mays
atgttcgcatggtcacgcccacggccgcaccaaccaccagccccgatttcctcctcaatcacacccccaaaccaaaacccaaacagcacttctcctgcaatcgccgacgtcgacggaggcttcgccggccggagcagcgccgacggttgttttgcccctccctcgtccggcccagcagcccaggcgagcatgccttcgattgcgccaccgtcttcctccgtcgctgccctcacccgccaaccggtgcaattcttcaaagggtgcagtgtatccaaggagacaaagggaccggtccgcagtttcttcactgcaaattcaaagagcaccacggtgaaatcagcggacttgaaagtagcatcatccttcaaaaatgatggtggttatccagctggcggtgtctcttggaaggacgacactctattgccaaaaagcacaaccattcgtggccaggaccatccggttgctgaccctgtactcccaatggattccatgattacgccagaaatcctctctgctaatgtggaacgtgttatagacatgtttgcagacgatgacactgatactgaacttgatttggatagcccgacagaggacttcacatcaattgcagaagccattgaggacatacagcaaggaaaacttgtgattgttgttgatgatgaatcaagggaaaatgaaggagatctgataatggctgcctccttggttaccccagaggctatggcttttatagtaaggcatgagacaggaattgtttgtgtcagcatgaaagaagatgatctggaaagactgagccttcctttgatggttaccacaaaagaaaatgagaagctatgcactgctttcactgttacagtggatgcaaaagagggcacaactactggggtatctgccaaggacagggcaaaaacagtcatgactcttgcatctcctgactctaagcctgaggacctcaaccgccctggtcatattttccctttgaaatacagagaagggggtgttcttaaacgggctggacacaccgaggcatctgttgaccttgccatgttggctggattacctcctgttgctgtcctttgtgaaattgtggatgatgcagatggttctatggctcgcctaccaaagttgcatgtctttgctgaaaaggagaacttaaagattatatctattgctgacttgattagatgagttgaattaccaaaacttcagcttctggtataggaggaaaagagacaggctaattgaacgcgcttctgttgcacgcttgcctttgaaatggggcaatgtccatgcctattgctacaaatctgttattgatggcattgagcatattggcatgatgaaaggtgatattggtgacagccaagacattttggtgagggtgcactctgagtgcctcacaggcgacatttttggatccgcaagatgtgattgtggcgaccaacttgcgatggcaatggagatgattgagaaggctggaaggggcgtattagtctatctccgtggacatgaaggaaggggtattggtctgggccacaagcttcgtgcttataacttacaggatgatgggcgtgatactgtggaagctaatgaggaacttggtcttcctgtggactcacaggaatacgggattggcgcacaggaaagttgtatcatatatctttctagagcttcaacatgaatttacttggaggcactgaagaatttcatgcctgttgcagcctgaaactgtgatgtacatagaatgaagtaaccctatcatgcagtgagtaggccactgacatttcagtactctgcagatattgcgggatctaggagtccgttcaatgaagctgatgactaataaccctgcgaaatatagtggtattaagggctacggattgagcattgcgggcagggtgcccttgattacgccaattaccagtgagaaccgtaagtacctagagactaaaagaacaaagatgggacatgtatatggattggccaatgcgcaggccaaccaagcaaataaatggcagccagagcacagaagagaatcattaggcccccaagcatgtttccattattattccagcaatccagcttcgtggcacaaaagagtgatatgattcttcgtttggggagttcctgaaatcttctccccctatatttccgtagattctttcgcaaaaaagccgatatttcggtagatcgatttcttcaattgtaacggtaggttttaaggtggctaatctctactacttattaagttagcaatagtagcctgcctttttgtgttctgccgtgtagtctctgacaggtagggcccgcttgctcctgcgtgtatgctcccggtttattccgtaacacattttttttacaaaaaatagaactactgcacat

SEQ ID NO: 128340 - DNA, 2225 bp, Zea Mays
atgttcgcatggtcacgcccacggccgcaccaaccaccagccccgatttcctcctcaatcacacccccaaaccaaaacccaaacagcacttctcctgcaatcgccgacgtcgacggaggcttcgccggccggagcagcgccgacggttgttttgcccctccctcgtccggcccagcagcccaggcgagcatgccttcgattgcgccaccgtcttcctccgtcgctgccctcacccgccaaccggtgcaattcttcaaagggtgcagtgtatccaaggagacaaagggaccggtccgcagtttcttcactgcaaattcaaagagcaccacggtgaaatcagcggacttgaaagtagcatcatccttcaaaaatgatggtggttatccagctggcggtgtctcttggaaggacgacactctattgccaaaaagcacaaccattcgtggccaggaccatccggttgctgaccctgtactcccaatggattccatgattacgccagaaatcctctctgctaatgtggaacgtgttatagacatgtttgcagacgatgacactgatactgaacttgatttggatagcccgacagaggacttcacatcaattgcagaagccattgaggacatacagcaaggaaaacttgtgattgttgttgatgatgaatcaagggaaaatgaaggagatctgataatggctgcctccttggttaccccagaggctatggcttttatagtaaggcatgagacaggaattgtttgtgtcagcatgaaagaagatgatctggaaagactgagccttcctttgatggttaccacaaaagaaaatgagaagctatgcactgctttcactgttacagtggatgcaaaagagggcacaactactggggtatctgccaaggacagggcaaaaacagtcatgactcttgcatctcctgactctaagcctgaggacctcaaccgccctggtcatattttccctttgaaatacagagaagggggtgttcttaaacgggctggacacaccgaggcatctgttgaccttgccatgttggctggattacctcctgttgctgtcctttgtgaaattgtggatgatgcagatggttctatggctcgcctaccaaagttgcatgtctttgctgaaaaggagaacttaaagattatatctattgctgacttgattagatgagttgaattaccaaaacttcagcttctggtataggaggaaaagagacaggctaattgaacgcgcttctgttgcacgcttgcctttgaaatggggcaatgtccatgcctattgctacaaatctgttattgatggcattgagcatattggcatgatgaaaggtgatattggtgacagccaagacattttggtgagggtgcactctgagtgcctcacaggcgacatttttggatccgcaagatgtgattgtggcgaccaacttgcgatggcaatggagatgattgagaaggctggaaggggcgtattagtctatctccgtggacatgaaggaaggggtattggtctgggccacaagcttcgtgcttataacttacaggatgatgggcgtgatactgtggaagctaatgaggaacttggtcttcctgtggactcacaggaatacgggattggcgcacagatattgcgggatctaggagtccgttcaatgaagctgatgactaataaccctgcgaaatatagtggtattaagggctacggattgagcattgcgggcagggtgcccttgattacgccaattaccagtgagaaccgtaagtacctagagactaaaagaacaaagatgggacatgtatatggattggccaatgcgcaggccaaccaagcaaataaatggcagccagagcacagaagagaatcattaggcccccaagcatgtttccattattattccagcaatccagcttcgtggcacaaaagagtgatatgattcttcgtttggggagttcctgaaatcttctccccctatatttccgtagattctttcgcaaaaaagccgatatttcggtagatcgatttcttcaattgtaacggtaggttttaaggtggctaatctctactacttattaagttagcaatagtagcctgcctttttgtgttctgccgtgtagtctctgacaggtagggcccgcttgctcctgcgtgtatgctcccggtttattccgtaacacattttttttacaaaaaatagaactactgcacat

SEQ ID NO: 128341 - DNA, 1119 bp, Zea Mays
tcttttcttttcttcccatttatatttcgatgttcttgttgcccccttttttatgttacatacttgcgatgcagatctggagcccttcttcagcgcagctgctactcagtttatccttagacaacaagttcccttctctctgtggctttctcttgcccctgtggtccttggtgtttcaatggcatcccttactgagctttcattcaactagactggcttcatcaatgccatgatatcaaacatctcattcacttacaggagcatttattccaagaaagctatgactgacatggatagcaccaacgtgtatgcttacatctcaataatttctctaattgtttgcattccacctgcattgatctttgaagggccccagctaaggcagcatggatttagtgatgccattgcaaaagtaggtttgacaaagtttgttgccaaataatttgtgagatattgagatcgataacttggtttaagtattgcaccttttgacaaatataatttgccatgaacatggatattgaaggctatactctgaaatgcagtctcactacataattgactaataaaaatctgttttcttattacatgactaggggtgcttccagcagcgctgcccagcggcttaccgtggacactggactgccagtgttgcctgggttagatgacatattggacgtcccggaagggcttgacgggcagggcaacgatatcagctcgtggtttacggatggccttgacgactcgttgcaagacattgatctttctggcgccctggaaatcccagacgatgacctcacccagctgggatttatgtaaggagaaggaagcaatcgttgtttgtcctgtgcatatacatgtctttccttcacctaatgtatggtagcgctgatccattgatctccctgccacaacctggtaggtcagaggttgtaatctgtaattaggctgttggattcgtgtcgatattcagtgtctgctggcatggactggatagttgcagatgaggcgaggtagcagcaacaagaacatgctgagatttgttaatgttatcctgtagtttgtgcttctgcttcctagattatcctgtcggaatccgacagtacgtgtctttgaaaa

SEQ ID NO: 128342 - DNA, 234 bp, Zea Mays
tattaggtcgtttctgaaaccatattggcgcgatggactacatggtgtttgaggttgctgaattggatggatcaacaatgatttgtcacactaacagtaaaatgaaaggttatttgttgtatttaaacgttagtaattgctacgaagtagcataatttatatggagcacatccaatttttattgatgcctgactttagcaatcactccatattttgatctatcttttttattag

SEQ ID NO: 128343 - DNA, 1422 bp, Zea Mays
gataaatagtgtataaattaaagtataattatttatcttaaatttaccgttattctgtttattttgcaaataacaccctaaaagcgtgataatctgcactgcttatcgcaggtccatccacaaatctctccagggaccaggggaacggttgtcccgaatcgccggccatgaagtgccgctctgatgcaccaggcggtggtgacggccaccgggaccgggccccagcccccgttgccacaggcgtcggcggctcgcccccgggcgagcggagtaagaagcagcggacggaggagccgtcctcaagctccagcgtggttggcgagtgctcgtcttcgtcctcgcaggctctgccgccaccgctgccggagcagttgctgcaggacgcaggagtgggcgagcagccgcctccaggccccgagcccgcagggggcgagcaggcgagggtgccggatctcggggaggacctggtgttcgaggtgctgatgcgagcggaggcccggacactggcggccgcggcgtgcgtgagccgcgggtggcggctgctggcgagggacgagcggttgtgggaggcggcgtgcgtgcgggagtgggcctgcactggattctccgagcagatgcttcgcagtgtcgtgcttccgcttggcggcttccggcgcctacacgagatgtacatccgtccggtccagcggcgtgctgctggagcgccgcgcgggcagcagaggcggcagttgccggtgaggatgggccgggatcaggtccaagtctcactgtctttgctctcgacctcattcttcctgaagatgcctaatgctcctccacctcctcctaaggacaaggataaagatggagataagaatggaggtggccagtgtgggtgatcactgatcaagtttgtgaaaaataggagcttacctctcatgcagcatcaccacagctgcttatgttatgtaggtgattatgttgtggttcttcactgtatttgtggcagtaaagaggtgatcaagtcatttggattggtgggcagagaagactattcagataggtgcggatgtactgatcgggaggcaaataaggtgagcgagattggatggaattcattgcaatagcgtattggatgactaccaagtctgtgtgttgtacctaaattacacacgaaatgggctcatctgtaaagtttccatgccatatatgtgaatatgcgaggtgccaagagagatgcagcatgctctttgtgctgttgtgccatgggaataagggtgagcctcttagggcttcatcatgctctttgtgctgttgtgccatgagagtaagtgtgagtctcttagggcttgtttagttgtatggggattaaaggggattgagggacatacaattccttgctagttaattttggagggggattgagaggcatacaattcctta

SEQ ID NO: 128344 - DNA, 123 bp, Zea Mays
atgggggtggcgatgaaactgcttgcacgatcctgcgggttttgttctcttgcttactgtggacagaggcgtgctgtggtgttctggaacacgttggagaaggaacaagctgcgcacgagtga

SEQ ID NO: 128345 - DNA, 2323 bp, Zea Mays
ccagcaacaaccaacccccctcttccccatctctttcccgctccaaaatggcggattcacaggcggaggcgatgaaaaaggcgtacgccgggatcatgctcaaacaaggcgcaggagtcggcggcgcgggtgctggcggcggagcggcgagcggcggcgctagctgccgggctcgaggccgcgaaggaggacggcgtcgctacgctcctgcgggtcaaggccatcatggaagccaggataaaagagaaagacctggaatctttggtgcatgttaagaagataaaggaactagaagagcaattgcatggttcacaaaatgctatggcctcgcttaaggttgagctgcagagggcaattactgaattagagctgacaaagaaaactttagctgatgaaagaataaatagccttcccacatctaacaacgtttattctaataaaaatggtagccctctttctaagatacatcaacaaggaggaaatatattgttgaagaataaaaagtttgctgacaaaagtgatgatacttgccttgttccaatcaccgagaaggagaatgaagcagtggaaaacttggaggacatggatcgtcgcagtcctgatcttccatcattaatggtaaggaacaagaaaccaaagttctatcataatgggtgtacacagcgaatccatgcacttaaacagcagactcaaagtacagatgcattctggaagcaaaatcagaagcaggtcactgcattaaatagctgctcaaaggccagaatgaacaatgctgcaaaaaacccaaggtccatcatggaacaaatacttcaaacaaattttttgggtaagttcaagcgcaagagaggcagaagaagcaggcctagttataagcatgataattctagtgagcatggggaagcggaatataagttatctgatagatctgaatctgatggaaatggctgcttgctgctacttcaggcacttgaacaggatctttcaccttcaaagatgtcagctgaacatgatggggaggctttaactgacctgaaggaagacttcaaaatgagcaggagggatgctgagttaagtcggtgtaatgctttcccagaactgattgatgtacttgcagtcaacaacatgcaaatgaaaagaagaaaaagaacaaagaccgtcagggttttggaagatgatttttccgataccaaaagtgttcctgagccagataacatccagcttatgaccagtgagaaaagcatgtctggtaatcaattggtttctgggatgactaagaatcgctctgatacacccaccagaaacagtgaccgtttcttgaaatgtgctactggaaacatgatgcatcagactgatgctggtaatggtcaatttgatcctgaaatcagctctgcagtgtttcttcagtctatcaaaagtgaaactacagattatggtaacttggcggtggaccagcaggagctgataacaccaaataataatactgcaagcttgaaagaagttaatgaggatggaagctgcagtttggcttcacctaagactgatacttcgactcttagctccgtagacaaagaaaatttgaaggcgtcttctggagttcccgtgcaagctttagagaaacaagatgtttcagttggcagctccctgaacaaaaaagatcatacaaaggcatcttctggagcttccatgcaagctgaaggtgccagacacatcaaatacacattcaatcgcagaaagcgcaagggtatgtctattaacagcacccctcaacgtgctgttcctgaagagagcagtgacctgtgtagtccaactaacaagcaaaagcttcatccagatcatgtggaactgaatcatctgatagattctccacaaggcgacagtcttctagtccaggttgccgaacagctcattttgttgtcagagcatatgtgatgagagttttgatacatgaagctgaagaaaggactggtttggtgacctaataattaggagactcctgatcagtgaattttgtaatattctaaatccattaatttcttccctgggtgcgtaggagacttccggttgcgacaacagaggtactcgaggcgtgttactgtagcagagtgtatagacttagcagtaagttctactattatttagctgatgaaatttaattagtgtttaagtaggtgataaattattagttatctttgtgtaattgtgttatttatcgacttgccagaattcagaagggaaagaattgctccctgcacagatgtatttaaattttgaatcaatttctatcactttaatctcctttccctcaagctacagtggaaagtga

SEQ ID NO: 128346 - DNA, 1907 bp, Zea Mays
cgtgatcaaaggaacgcaacgcgacggcaggcaaaaatcaaaaggagagcacgcgtcgcgttacctgagcctgtcagtgtgtgcgaccttggccgcggcgaacccgtggagctcggcggcgtcggcgggcagcggcagccggcgcttcctccacgccgcggcgagcacccggccgaccgccgtcagcgggctgccctgcgggcggcggtacctgtaccggggcgtgccggccacgagcacggcgacggcgagcgccatggcgactgcggagacgccgtagccccagccccgccccacgttgtcctgcacgtacaccagcacggtgaccgcgaacagcgaccccaggctgacgcagaagtagaagcggttgaagaagaacaccatggcgcgctcctcccgcgggtcgcgcccgtcgaactggtccgacccgaacccggacacgttcgccttgagcccgccggcccccgccgccaccgtgtacagcgccgcgtacagcagcgccagctgcccgccgcgcgccggcacgcactcgtgcgcgcgcggcccgcgggcgtccaggcacgccggcggacgcatgctcggcaccgtcgtgtccaccgtcagcaagctcacgccctgtgccatgtcaccgttccgctagattagattagaattagtcgcgcaatgcgacgacacgacaccaacatgatgtataccgtggcggcgattgtggcggagatggcgatggtgaggtagcggccgagcttggcgtcggcgaggaagccgccgacgagggcgagcaggttgagcgtgcccatgaagttggtcaccacggtggcggacttggagttggagaggtgcagctcgccgacgaggtacgtcaccaggttcatcgagatgcccatcacgcacacgcgctccgccagctccgtgcccaggatcagcccggcgcccagccagcctccggtcctcgacttgtccgccgggttgccccggaagtccacggcctgcccgtcgtcgccgccgccgtacccaccatgacccgcaccggaaacctacacacgtacgtgttcagaagttcaggtacgtatatacgccatcagagctatctccaccatgcattagacagagagcgaggatgtgcgttgtgcggctcttaccatttgctgccctgcagctgtagctgcagctagctgtgtgcctagcacgtacagtacaggggttgcacgcgagaagaggggactagacaggcggggccgggagcggcgaggacgacgatggaagaggagaggaacgtttgtgctgtgagtttgtccaagagggatgaggcccgggtgaggatttatagctagataggagggcgtggctgtggctgctcctgcactgctactcggaattgttacttttattttccactgcaaattacatcacatttacttgctgcatttgggtcgcagcgtacgtgaggtggccaaaatgaagatgacgaccggcggagacgggagagtccgttcgggcccccgggaagcgggaacggacaagtcgcggtcgcgcgacgatgacctggcgcctgccgggtttccgtggcctgccaaaatcttcatgcggtagtctgtttggtttagcttttttctgaccagctgtgaggagaatctggctgtgaggagaatcgtccggtacgtgttgaagtggcggatcctatgcgcatatgctcgtattttggggtaagcggggggtggtctggttttagccactgtatccgtatgtttatcagccgcatgccggccgtcatgtaaaaaatctagaccccatgctacatgattagtgtctcgacaaaagccacctgtaacgtccaaatgtagcccccatgcatgttacgtgactgtagtatctcgacaaaagtctacttggatctagtatgtttagag

SEQ ID NO: 128347 - DNA, 1329 bp, Zea Mays
gagtctgtttctcttcttctctcggctggccgcgccgctgtccctgtccatccaacgcccctccgctttctgcggtctatgtagggctggtccagaaggactgccgctagcggttgtattcgtcggaacatcgctgagtcctccgacgcgctcctggcgctgctctgagaactggatatgctgggcctagcacccctccgctctgcgcctcttcctatccgcgcctccgccaccgcctgcggccgaaatacctcgcagctcgccaatggctgccaactctctcttctcgcgccagaggcggccgaaggtgacacggcgctgccggagaacatgcacaagtggaggatggtcatcgcctacgatggaacaaagttcaaaggttggcagtatcaaccatcaattccaacaatacaatattttctagaggatgcgctgatatgcatcactaagctggatcggaagaaactatgcttagtcggtgcaggcaggactgatacaggtgttcatgcatggggtcaggtggcacattttactacacccttcagttacagttgcctcagtagtattcattctgcaatgaatggactccttcctcctgagattcgagtcagggaaattagtgcagcacgtcctgaattccatgctcgctcatccacaaagagcaaagtctatcgctacaagatctataatgaagcaatcatggatccctttcataatcactatgcttatcatagtgcttataaacttaatccccatgccatgcaggaggctgcaaattattttgttggaatccatgacttcacgtcttttgctaatgctgcacataatgacggtgagcgcaggcccacaaagaagataacacgttttgatgttactgaaatgggtgctgtcttacagctcgaggttgaaggcaccggttttctgtacagacaagtgaggaacatggttgctttgctgcttcaagtcggaaaggaagcacttcctcctgatatcgttccagcgatcattgcggccagggaccgcaaagaactggcgaaggtggccttgtcagcaccaccacatggattgtatctcatgtcggttaactatgacgaggaaatcctgaagcctcctgaaggttcccctccaatttcgtttggcagaactcatcatcttagtaagtgcaaacttacgttgtattaatttgttacagatgaattgtcttccagaaatgtatcatcttttagtttccgttgcctcctaggattttcttggttcagaactgtcaaccgtgggctctcatggcctgctagtttctgctaacggaccaaagtactcttttgtactgtc

SEQ ID NO: 128348 - DNA, 1514 bp, Zea Mays
gagtctgtttctcttcttctctcggctggccgcgccgctgtccctgtccatccaacgcccctccgctttctgcggtctatgtagggctggtccagaaggactgccgctagcggttgtattcgtcggaacatcgctgagtcctccgacgcgctcctggcgctgctctgagaactggatatgctgggcctagcacccctccgctctgcgcctcttcctatccgcgcctccgccaccgcctgcggccgaaatacctcgcagctcgccaatggctgccaactctctcttctcgcgccagaggcggccgaaggtgacacggcgctgccggagaacatgcacaagtggaggatggtcatcgcctacgatggaacaaagttcaaaggttggcagtatcaaccatcaattccaacaatacaatattttctagaggatgcgctgatatgcatcactaagctggatcggaagaaactatgcttagtcggtgcaggcaggactgatacaggtgttcatgcatggggtcaggtttaataaacatactgcataactgtatactgaagcttaaattgatatctatcatctggtttgcgtatcctgcactgttaaatgtcaatattatgttttatatgaaatactgggggattacatacaatatttgttgttttcaggtggcacattttactacacccttcagttacagttgcctcagtagtattcattctgcaatgaatggactccttcctcctgagattcgagtcagggaaattagtgcagcacgtcctgaattccatgctcgctcatccacaaagagcaaagtctatcgctacaagatctataatgaagcaatcatggatccctttcataatcactatgcttatcatagtgcttataaacttaatccccatgccatgcaggaggctgcaaattattttgttggaatccatgacttcacgtcttttgctaatgctgcacataatgacggtgagcgcaggcccacaaagaagataacacgttttgatgttactgaaatgggtgctgtcttacagctcgaggttgaaggcaccggttttctgtacagacaagtgaggaacatggttgctttgctgcttcaagtcggaaaggaagcacttcctcctgatatcgttccagcgatcattgcggccagggaccgcaaagaactggcgaaggtggccttgtcagcaccaccacatggattgtatctcatgtcggttaactatgacgaggaaatcctgaagcctcctgaaggttcccctccaatttcgtttggcagaactcatcatcttagtaagtgcaaacttacgttgtattaatttgttacagatgaattgtcttccagaaatgtatcatcttttagtttccgttgcctcctaggattttcttggttcagaactgtcaaccgtgggctctcatggcctgctagtttctgctaacggaccaaagtactcttttgtactgtctgaggtaattgtttattcggctggacaggctccgttttactg

SEQ ID NO: 128349 - DNA, 1374 bp, Zea Mays
gagtctgtttctcttcttctctcggctggccgcgccgctgtccctgtccatccaacgcccctccgctttctgcggtctatgtagggctggtccagaaggactgccgctagcggttgtattcgtcggaacatcgctgagtcctccgacgcgctcctggcgctgctctgagaactggatatgctgggcctagcacccctccgctctgcgcctcttcctatccgcgcctccgccaccgcctgcggccgaaatacctcgcagcagctcgccaatggctgccaactctctcttctcgcgccagaggcggccgaaggtgacacggcgctgccggagaacatgcacaagtggaggatggtcatcgcctacgatggaacaaagttcaaaggttggcagtatcaaccatcaattccaacaatacaatattttctagaggatgcgctgatatgcatcactaagctggatcggaagaaactatgcttagtcggtgcaggcaggactgatacaggtgttcatgcatggggtcaggtggcacattttactacacccttcagttacagttgcctcagtagtattcattctgcaatgaatggactccttcctcctgagattcgagtcagggaaattagtgcagcacgtcctgaattccatgctcgctcatccacaaagagcaaagtctatcgctacaagatctataatgaagcaatcatggatccctttcataatcactatgcttatcatagtgcttataaacttaatccccatgccatgcaggaggctgcaaattattttgttggaatccatgacttcacgtcttttgctaatgctgcacataatgacggtgagcgcaggcccacaaagaagataacacgttttgatgttactgaaatgggtgctgtcttacagctcgaggttgaaggcaccggttttctgtacagacaagtgaggaacatggttgctttgctgcttcaagtcggaaaggaagcacttcctcctgatatcgttccagcgatcattgcggccagggaccgcaaagaactggcgaaggtggccttgtcagcaccaccacatggattgtatctcatgtcggttaactatgacgaggaaatcctgaagcctcctgaaggttcccctccaatttcgtttggcagaactcatcatcttagtaagtgcaaacttacgttgtattaatttgttacagatgaattgtcttccagaaatgtatcatcttttagtttccgttgcctcctaggattttcttggttcagaactgtcaaccgtgggctctcatggcctgctagtttctgctaacggaccaaagtactcttttgtactgtctgaggtaattgtttattcggctggacaggctccgttttactg

SEQ ID NO: 128350 - DNA, 1269 bp, Zea Mays
gagtctgtttctcttcttctctcggctggccgcgccgctgtccctgtccatccaacgcccctccgctttctgcggtctatgtagggctggtccagaaggactgccgctagcggttgtattcgtcggaacatcgctgagtcctccgacgcgctcctggcgctgctctgagaactggatatgctgggcctagcacccctccgctctgcgcctcttcctatccgcgcctccgccaccgcctgcggccgaaatacctcgcagcagctcgccaatggctgccaactctctcttctcgcgccagaggcggccgaaggtgacacggcgctgccggagaacatgcacaagtggaggatggtcatcgcctacgatggaacaaagttcaaaggttggcagtatcaaccatcaattccaacaatacaatattttctagaggatgcgctgatatgcatcactaagctggatcggaagaaactatgcttagtcggtgcaggcaggactgatacaggtggcacattttactacacccttcagttacagttgcctcagtagtattcattctgcaatgaatggactccttcctcctgagattcgagtcagggaaattagtgcagcacgtcctgaattccatgctcgctcatccacaaagagcaaagtctatcgctacaagatctataatgaagcaatcatggatccctttcataatcactatgcttatcatagtgcttataaacttaatccccatgccatgcaggaggctgcaaattattttgttggaatccatgacttcacgtcttttgctaatgctgcacataatgacggtgagcgcaggcccacaaagaagataacacgttttgatgttactgaaatgggtgctgtcttacagctcgaggttgaaggcaccggttttctgtacagacaagtgaggaacatggttgctttgctgcttcaagtcggaaaggaagcacttcctcctgatatcgttccagcgatcattgcggccagggaccgcaaagaactggcgaaggtggccttgtcagcaccaccacatggattgtatctcatgtcggttaactatgacgaggaaatcctgaagcctcctgaaggttcccctccaatttcgtttggcagaactcatcatcttagattttcttggttcagaactgtcaaccgtgggctctcatggcctgctagtttctgctaacggaccaaagtactcttttgtactgtctgaggtaattgtttattcggctggacaggctccgttttactgaa

SEQ ID NO: 128351 - DNA, 1579 bp, Zea Mays
gagtctgtttctcttcttctctcggctggccgcgccgctgtccctgtccatccaacgcccctccgctttctgcggtctatgtagggctggtccagaaggactgccgctagcggttgtattcgtcggaacatcgctgagtcctccgacgcgctcctggcgctgctctgagaactggatatgctgggcctagcacccctccgctctgcgcctcttcctatccgcgcctccgccaccgcctgcggccgaaatacctcggtaaagccctgcgcctcctcgttctccagtcctccctcgctcccttcctcctcccgtccccttcttttttcatctcaagtgaaatgatgtattgttttctccctcggacgggcagcagcagctcgccaatggctgccaactctctcttctcgcgccagaggcggccgaaggtgacacggcgctgccggagaacatgcacaagtggaggatggtcatcgcctacgatggaacaaagttcaaaggttggcagtatcaaccatcaattccaacaatacaatattttctagaggatgcgctgatatgcatcactaagctggatcggaagaaactatgcttagtcggtgcaggcaggactgatacaggtgttcatgcatggggtggcacattttactacacccttcagttacagttgcctcagtagtattcattctgcaatgaatggactccttcctcctgagattcgagtcagggaaattagtgcagcacgtcctgaattccatgctcgctcatccacaaagagcaaagtctatcgctacaagatctataatgaagcaatcatggatccctttcataatcactatgcttatcatagtgcttataaacttaatccccatgccatgcaggaggctgcaaattattttgttggaatccatgacttcacgtcttttgctaatgctgcacataatgacggtgagcgcaggcccacaaagaagataacacgttttgatgttactgaaatgggtgctgtcttacagctcgaggttgaaggcaccggttttctgtacagacaagtgaggaacatggttgctttgctgcttcaagtcggaaaggaagcacttcctcctgatatcgttccagcgatcattgcggccagggaccgcaaagaactggcgaaggtggccttgtcagcaccaccacatggattgtatctcatgtcggttaactatgacgaggaaatcctgaagcctcctgaaggttcccctccaatttcgtttggcagaactcatcatcttagtaagtgcaaacttacgttgtattaatttgttacagatgaattgtcttccagaaatgtatcatcttttagtttccgttgcctcctaggattttcttggttcagaactgtcaaccgtgggctctcatggcctgctagtttctgctaacggaccaaagtactcttttgtactgtctgaggtaattgtttattcggctggacaggctccgttttactgaactagttgccctctcatgcgttgttgtcgtcacagaagctgaaaatgatgaacgcaataagtgctccatgcaagaacatacgacttgtctggtt

SEQ ID NO: 128352 - DNA, 1313 bp, Zea Mays
ccctgtccatccaacgcccctccgctttctgcggtctatgtagggctggtccagaaggactgccgctagcggttgtattcgtcggaacatcgctgagtcctccgacgcgctcctggcgctgctctgagaactggatatgctgggcctagcacccctccgctctgcgcctcttcctatccgcgcctccgccaccgcctgcggccgaaatacctcgcagcagctcgccaatggctgccaactctctcttctcgcgccagaggcggccgaaggtgacacggcgctgccggagaacatgcacaagtggaggatggtcatcgcctacgatggaacaaagttcaaaggttggcagtatcaaccatcaattccaacaatacaatattttctagaggatgcgctgatatgcatcactaagctggatcggaagaaactatgcttagtcggtgcaggcaggactgatacaggtggcacattttactacacccttcagttacagttgcctcagtagtattcattctgcaatgaatggactccttcctcctgagattcgagtcagggaaattagtgcagcacgtcctgaattccatgctcgctcatccacaaagagcaaagtctatcgctacaagatctataatgaagcaatcatggatccctttcataatcactatgcttatcatagtgcttataaacttaatccccatgccatgcaggaggctgcaaattattttgttggaatccatgacttcacgtcttttgctaatgctgcacataatgacggtgagcgcaggcccacaaagaagataacacgttttgatgttactgaaatgggtgctgtcttacagctcgaggttgaaggcaccggttttctgtacagacaagtgaggaacatggttgctttgctgcttcaagtcggaaaggaagcacttcctcctgatatcgttccagcgatcattgcggccagggaccgcaaagaactggcgaaggtggccttgtcagcaccaccacatggattgtatctcatgtcggttaactatgacgaggaaatcctgaagcctcctgaaggttcccctccaatttcgtttggcagaactcatcatcttagtaagtgcaaacttacgttgtattaatttgttacagatgaattgtcttccagaaatgtatcatcttttagtttccgttgcctcctaggattttcttggttcagaactgtcaaccgtgggctctcatggcctgctagtttctgctaacggaccaaagtactcttttgtactgtctgaggtaattgtttattcggctggacaggctccgttttactg

SEQ ID NO: 128353 - DNA, 1195 bp, Zea Mays
ataatacttattggattagcttcaagatggattaaatcaaatagttccagcttttggctatatctcactcgagcaaataaacgggatcctcaatcttttaaactctattttgttcaggttattttagtcgcaatatcttcgataatggtgtggctatctacctcacaccggtcccagaacagagaattgctctcactacaccagtttatcaattggtctgtagctggtgttgctatggtgctacctcttttctcaccacctagtgttctatcccgtcttacatctatattcttgggttttgctcctccatttctgctgctttccattggctatgaagcagttttctatagcgcttttgcaatggtactcattggatggatatttgtggaatctgccaacctgtattgctcagaagaaagtggttctgcacgtcgcagaagccttgcggataactcagtttttggctatgaagaaagacacctgcgactatctgatttaagaatccctttgttatttgtgatattatttaatgtcgccttctttggtactggtaattttgcaagtattgcaagctttgagatctcgtctgtgtacagattcattacagtttttagtccatttcttatggcaggacttcttatctttaagttgtttattccgtttatgcttgtcatatgtacgtttagtgcgatcaccaaggtcgtccgtatcccacggctgggctgttattttcttgtaatactgctttcagatgtaatgactattcatttctttttcctggtacggaataccggtagttggatggaaatcggcaacagcattagccatttcggaatagtgagcgcccaagtggtcttcgttttgctgctctttgccctcacgaatatatacactagagatattttggtctcgtctcggcaactaaccgcacggaaagttatgtaaatcgttcagtttatttagaaatccaaatacatccatccttttatttattcatttttgggtcgactttcattttgggatcaagtttgtagcttagcttttggctaaagttttgtagcttagcttttttgttttctgtgaatggaccttggtgtcaaatttttgtgctaatttcattcgcttacttacagcctgaacagattttacgtacaccattataactatattagctttcctctcgggctatgataaa

SEQ ID NO: 128354 - DNA, 762 bp, Zea Mays
atgttcgttttgatatctatatagactttatatactatctgcatagttatctgttgagcaactttaagattattttgggagttcctgcacagggtaacaagctataacaaataaaatgtgaagaagacagttttctccaaatgttaggtctttgacatttttctataacacttcagcttaaatatgtacttttttcttttaatttgcgctgaacttgatgctaccttggtgacaagtgcagatgtacgtttagtgcgatcaccaaggtcgtccgtatcccacggctgggctgttattttcttgtaatactgctttcagatgtaatgactattcatttctttttcctggtacggaataccggtagttggatggaaatcggcaacagcattagccatttcggaatagtgagcgcccaagtggtcttcgttttgctgctctttgccctcacgaatatatacactagagatattttggtctcgtctcggcaactaaccgcacggaaagttatgtaaatcgttcagtttatttagaaatccaaatacatccatccttttatttattcatttttgggtcgactttcattttgggatcaagtttgtagcttagcttttggctaaagttttgtagcttagcttttttgttttctgtgaatggaccttggtgtcaaatttttgtgctaatttcattcgcttacttacagcctgaacagattttacgtacaccattataactatattagctttcctctcgggctatgataaa

SEQ ID NO: 128355 - DNA, 1052 bp, Zea Mays
tcggctgcatctggtccgcccgttccttatcctctcccaccacacaaccacgggttatccagcacccgcgccctcccctccgccacgtcacgccgcccggccacatggcagcggcccagtggccgctcacccccaggcgggataaggcgtcctctccgttccggaccgcagcttaatataaccatgcagtgcaggcccgccgccaaaaggcaaaagctccccaacgaagtgcgagcgacccacgtccacacgacacgaaccaccaccaccaaccagcagccgcaccacgcacccagcgcaaagcgatggcgtcgctcaccatgatggcgtccttcgccgccgtggcggtggccgcgccctcgcgccgcggcaccttcgccgtggtcaggtccgccaaggtcgaccgctgccaggagcccgccacgctagcagcaaccgaggccaggcccgccgccgacggacgccgcgccgtcatgctcgcggctgctgcggcggccgtggcagccatcggcggcgccggcgccgccatggcgggccccaagaacgggacccccgaggcgaagaagaagtacgcggccatctgcgtcaccatgcccaccgccaaggtctgccacaactgagcacgcccgcgttgcatgcagctgcagggccggggggtggtatataattaatgtacgtgccacggtgttgttgtccctattgttggttcgagctttagatgcatgcctgacgtgaggccgcttaattgctttctgacggcctcggagctgtaagaatatcaagtgcactgcaaaactgaattcggttgaaaccgttcttattttatcattataatttcgttcgtgcatttcgacgacgtacgtggaacgaatggcagcaaaaacgaccagcgttgcgtatataggaacaaactgttgcgtgttctatttgatcagactacaagatgaaaatcacgcgaagctttgctgaggcctgagggagacgaacagacgaggagcacgaggctatgctaggctatgcatcggttggccaaatgggaaattaaaaatgcc

SEQ ID NO: 128356 - DNA, 535 bp, Zea Mays
atgggaggaggcaagtcgttcttctgccccagcatcttcagctttctgcgcaagtggaggcgctacgacgacgacatggccgactgggacggcgggtacgcgcgcaaggtgcgctccagcgacgaggactacggcggctggtgggtcggcgagcccgacgtcgaccgcaaggcctccgacttcatcaacaacttccaccagaagaattgaagggtcgcgttctctgctagctgcgactgctaccgcttccccacgccagcatagcatgcaatatgcatatatatggtcgacgacgacgatggcacacggccggcagcaccaccgcccgccgccgcgccggtccacgctatgcatgcatgcagctacgtttcatttattaccaggttctttgatattcttatatatatgttgacgactatacatattagctgatctcgtttgtcatgttattatgtcgtgctcatttaatcagagagtgagagagaggatgaataattcaatctgctcgacagacatatatcgctgtcattggatt

SEQ ID NO: 128357 - DNA, 373 bp, Zea Mays
gaagaagacagataatccatttatatacttcaacatcatattaaagtggatatactaaccggtttaacctaaaaggcctaaattgttagaaggaaatccacttatgcacgcactttaatattaaataataagtctacaaaggatagacgcaagaggaatataagggatatagttggagacaactagtcttactatctcaccttttactataatctacagggtgaaacaatacaaaacacacggtcggctagctaatgcctaaaaaaagagcctgcagctatggaacaacaggagctcaagagaagcgtttcaccggcggccagcgctaccgttcacaaaactccaagcggtgtcatcctggcaaacataatgt

SEQ ID NO: 128358 - DNA, 396 bp, Zea Mays
atgctcgccgtctctccctctccccctcctcgccttcctctcctcaccttaacccacctctgcgctttccctctcctcccacctcgacgccgcggcctctctcgcctccgcagccaccgcagtggcacccctctcgtcctgctccgcgcgcgcgcagtgcgtcacgctggtatcgtgatcgacatcgacgagatggtcgagaatgaggaccgtgacctacccgtggacgtatcgttcacgaggaggcttcctcccgcgctcactttcggtgacggcctcgacgcactgctgcgggccgccaacgaggtcaaggccaccccgcctgctggcgccaggagcggcgtgatcaggttcgaggtaaggtgtgggtatcatcagtattgcattctgctttaa

SEQ ID NO: 128359 - DNA, 2515 bp, Zea Mays
atgagtgctatgcggcccgaggggtccgtaggtcatgagtgggaagcgaaccggtgcccacgatgtggctcggtgccagacgtggttaatgctgtcagtcatttatggcgggttgcaccaatcgaaattcatgaagaggatctgttggatgtcgaagagcaaattagatatcttctccatagggtgaaagattctgtgctagatattattcccttactgagagggtccttttccaattggatatggacaagcctcggggttcctccttcttcgatattcccaagtgttaaatgcggtttggagatggctattcttaatttacttgcatcacaacggaaatgtagtttgttcaaagttctctctggttgtgacctgttctgccgagacgagaatgtggttgaatataatcagaacagttctgcaagcatacaaatttgtgcactcgtagattgcaatggctctccaatggaagtagcacttggtgtcgccaaactggttgctgaaggttttaccacatttaaactgaaggttgggcgccgtgaaagccccattgaggatgcaactgttcttcataaaataagagaagttgtggggtaccagatcaatatccgtgttgatgcaaatcagaaatggacatatgaacaggcagttgaatttggatccagggtacaaagtcttcatttggaatacattgaggaaccagtgagctctgtatatgatctcatcaagttctgtgaaaagaatgtcttgcctgttgcacttgatgagactattgacaaccttaggggggatgtaatttgtaagcttcatcaatttgttcatccaggaataattgctcttgttataaagcctagtgttgttggaggttttgagaatgcagctcatattgccaaatgggcgcagctacatgataagatggccgtcatcagtagcacgtatgagagttctataggtttggcatcctatatacagttagcacattatgttgaccaacagagctctatagtctccagaataagaaacaaagatacatgtagagccactgcacatggacttggaacatatcagtggttaagggaagatgtatcagaacaaaagttaaagatccatgcatccccacttggtgacggaatccgagccacagtagaagatgcccatggttatcttcaccatttaaacataaacaatgagaagataaaaagtacgtatggtgaagaaaaacataggtcatattctatccaagttgatgtggacgattgttcttatctagtcaaacttcgagaggctggtgatcatacaaatgaaaaggttgtccttttacttcatggatttcttggtacaagtgaagactgggttcccacgatgaaagctcttgcccccagtgcacgggtaattgcaattgatcttcctggtcatggcgagtcacagatactgcaacgtcacaaaaattcagaacaacctgctgtaacagttcaactagttgcagatttgttgttgaagttgatataccacataactaatggtgaggtggtggtggttggctattcaatgggtgcaaggattgcactccacatggcactaaatcaagatcacaagatccgtggagctgttacaatatcaggaagtcctggactgagagatgaagcaagcagaagacgccgtattgctattgataaatcaagagcccagttcctgatgtgttgtggacttgaatgttttcttcagacatggtactctggaaaactgtggaccagtctacgagagcatcctgagtttaattctctggtgaggacacgcagtaaacacaaaaacatcaaagctctagctaaggttcttgcagactcaagcgtggggagacaaaagtcccctgtgggaagacctgaagcacttgaagaggcctttactcgtcgttgctggtgaaaaggacgcaaagttcaaagacatctcgcagaaaatgcgcacggagataatgagccacgcagaatgcggatctgatggtcctaaagggaaggaactttgtgaagtgctcattatcccagatagcggccatgctgtgcatgttgagaaccctcttcctttggtgagagccgtgaggaagttcttactgaagctgtattgaggagaacatctgagtagaaccggtaaatggagcatcatgcaggtatattggtgtcctcacatatgcaggtgaagaaaggtttcaaattcgtgccgcccaagaagaactgaaatttggtctccgtctcgtccaatttgtcgtcgttggatcgttgcagtaactttttcccgtttggccttagtgttaatagcgtggctggtagatccaactggtgatgcctcttacgagggtttttgaaccccaatggactggcttccctttggtgattgtcagggttctgcatttcctagagataaattctcagcatgttcagacctggagtgccgtgccctttgtacaaggattccttttctagagttgtatgaaataaatgctcgctctcgagaagcggatttg

SEQ ID NO: 128360 - DNA, 790 bp, Zea Mays
attttccttaagcttcattttgggatcgacatgggttgcacaagggcctcttcaactcttctcatggtcgtcgtggccatctccgtgctcgcactagaccattccgttgctaatgctcgccaggtgaggagcccgtccatgtcgaccggagagcaccatccgtctaggaacaaggaagcactgcaagcgacgacgacgaaggagcacggcgcggtgcacaccgggggcggcgctggaaccgtgcacatgagtccgggatcaaccggagaagcaggcgtggtcggacaaccgatcttcggcggccgcggagaaaacagcagccccgccgctgccgagaaggtagcagtagtggtcgcgagatatggacccaggcctcaccccaaaaaacacaactaagctagtctgactctggggtgcccgtccaagtgtctgccgcctgtatgtatttcttgtagcctaggcgcctagctagtgtctcaataggtagcaagataggataggatggatcaaactactccatacttatatgttatatcgtagtagtgtactagcccagttattaatttcgtcacgtatagaacagtactgatcgatgcttactttcaagcctttggtatttcaaacatcgcaccttcgagtttttcctatctttttttgtttttgttttgttgttgctgtggttggacgggggagaaaaggagttcctgagtttggctcaaatggagtgaaattcacctcatgccggtcgccggatcgagtcgtgtttaatgaactaaataatcgttcaaac

SEQ ID NO: 128361 - DNA, 779 bp, Zea Mays
aaacaacagcgatacggattagtactacgtactactactactagcactacagcatgaggacggagatggtgatccggatggaggaggggggctccgagaagggccacgccaaggccatgaaggtggcggcggcgacgccgggggtggagtcggtgacgctgtcggggaagggcaagagcctgctgcgcgtggtcggcgacggcgtcgactgcaaccacctcaccacccgcctgcgccgcaaggtgggccacgcagacgtcgtcgagctgcggaccatacactccgcctactccggcgggtcccggaccggcggcagcctctcgcgcgacgccgggtacgggaacggagagacccactactacggctacgcctatccgaccacgaccacgacggctacggcggcgcccgactactactaccactacggccagcaaccgtcgtcccagtactacagctaccagccgccgccttacgccgctcccgccgccgccgtgcactacgagtactacccggccgccgctaccgaccccaacggctgctccatcatgtagtagtacagtattatattgctacacttgttcagtttgttcatagcgtacgacatgtgtccctctcgtctcatctgctccctgtacatatgctgctagctagtgccatgcatttcgtctccgcaaccggaccgggttattgtttttagtttgtaccccgtttcgtcacatgtgctgtgtgctgtggattctgtgaattgctgtgatcaatgatacttttttttaaaaaag

SEQ ID NO: 128362 - DNA, 438 bp, Zea Mays
cgccccaccccacggtcacggccaacaacctcagacacgacgacgaagaagaagatccggccggcgcgccgcagcagggctccatatctgaaggcgacctgcgcgctctccaggcggagggcggtctcagacatggcggttgtcggcgccgtggccctctccacgcccacgccgacgcgagcaaagaagcctgatgtcaccaggcaaccacctgacctgctgcttccgtttctcgaagctttcaggtaccggaagctggggagtggagtcatactcgaagatgtcgtcaagggggagggggccgaggcgcgggagggtgacctggtgcagttcaactacgtgtgtcgccgcgcgaacggctacttcgtgcacagcacggtggaccagttccgcggcgagagcaggccggtgacgctcgcgctcggcggtgaagaggtc

SEQ ID NO: 128363 - DNA, 1270 bp, Zea Mays
cgggtagccaaaaaccgcgcgccgtttgggcaaggcccaacccagccagccagagaggcgccccgttggaatcctgattgggagcgctgggacggaaccgaacgcgttgccattagctgtcgctgggacggaaccggaacgtttcgctagccctcgttcccgttcggccttgacaaccccaccccaccccacccccaagttcccaacgcagaggatcgaaccgaatcctccgcaactcgccgccgccgggaccgaccgacccggtcctatcgatcgaggatgtcgtacgcctacctcttcaagtacatcatcatcggcgacacaggcgtggggaagtcgtgcctgctgctgcagttcacggacaagcgcttccagcccgtgcacgacctcaccatcggcgtcgaattcggcgcccgcatgatcaccattgaaaataagcccatcaagctccagatttgggacacggctggccaagaatcattcagatctattactagatcatactacagaggtgctgctggtgcccttttggtttatgatattactaggagggagaccttcaatcatctcgcaagttggttagaagatgcaaggcagcatgcaaatgctaacatgactgtgatgctgattggaaacaagtgtgatctttctcatagacgtgctgtcagctatgaggaaggtgaacagtttgccaaggagcatggtctggtctttatggaggcatctgctaaaactgcacaaaacgttgaggaggcattcattaagaccgctggtacaatatacaagaaaatccaagatggcatatttgatgtatcaaatgagtccaacgggatcaaagttggctacgctgttcccaactcatctggaggtggtgctggctcgtcctctcaggctggtggctgctgcagttgagtggtggcagcaagtcatacaaatgcacaaggttctccctgcagtatcttgatgtttgcctatagctggacccggatgatttgttctttcagccatcatgtttcaatccataagcaaatcatcttcagtgtttaactgtccttttgcaattcacgattactgctccctatgtgtcttctgtaaccaaattgaaatcagttttatggtattcatttgttcaacatgtatatatgcttctctggctagtcatgttttctgcaaccctatctcaagttgaaaattggcagtgctggacaatctctccttgactgcattacttgattctgtaaagacaatcttcacgattactgcgcaatgg

SEQ ID NO: 128364 - DNA, 112 bp, Zea Mays
tttctttttacaagtgcgttgttcctttccgcttctctgggcgccaaagaaccaaagcccatttcagtgccagtgaactgatgagcgcattgtttgcaacatggttcgttac

SEQ ID NO: 128365 - DNA, 790 bp, Zea Mays
acacatcactcagctctcatctcgcagccgcagctagttacagttcagagagaagaaagagaccgagatctcgccgatagctagcatcatggcgtccaaggcgctcctcgtgctaacgctcctgctcgccgccaccttcctcgccgcctccgctaacgagcaagccagtgagttcaccgttcagtttcacgcactgtagctaatactgataacttgcaggcttattagctttcctagctcattcaagcaaagcaacaaattaatcaaaagctagccatgatccgcccgaattaataagtatccatctcatactatgcacgtgttgggtcgttgtggcagaggcggccaaagaggagaagaaggtggaggtccaagactggcacggcggcggcggctacccgggtcacggcggcggcggcggcggcggctacccgcactgccggtggggctgctgcaaccgcgggtaccatggcggctgccggtgctgctcgcaccctgatcagataccagagcccatgtaccgtcctgagctcgtcgaggtccacaactaaatagtatacgggtacgtatgccccgatgggaatgaatgggaagcaagagcacacgcgtagtacgctcgtcgtagtagtcaataaaagtttggttccatcaccgtcatgaaataaaagtaaggaggttgcacgctttgtgtgcgtgcttggaaacgtcgactgtatctcatgcatcgaataaatagatgttaatgaatatcattgggacaactttttacggaacataaaatcaaaacaaa

SEQ ID NO: 128366 - DNA, 631 bp, Zea Mays
acacatcactcagctctcatctcgcagccgcagctagttacagttcagagagaagaaagagaccgagatctcgccgatagctagcatcatggcgtccaaggcgctcctcgtgctaacgctcctgctcgccgccaccttcctcgccgcctccgctaacgagcaagccaaggcggccaaagaggagaagaaggtggaggtccaagactggcacggcggcggcggctacccgggtcacggcggcggcggcggcggcggctacccgcactgccggtggggctgctgcaaccgcgggtaccatggcggctgccggtgctgctcgcaccctgatcagataccagagcccatgtaccgtcctgagctcgtcgaggtccacaactaaatagtatacgggtacgtatgccccgatgggaatgaatgggaagcaagagcacacgcgtagtacgctcgtcgtagtagtcaataaaagtttggttccatcaccgtcatgaaataaaagtaaggaggttgcacgctttgtgtgcgtgcttggaaacgtcgactgtatctcatgcatcgaataaatagatgttaatgaatatcattgggacaactttttacggaacataaaatcaaaacaaaatctgaaacccca

SEQ ID NO: 128367 - DNA, 761 bp, Zea Mays
catgcatctcatcacactcgatcgcagttgatccagtacacaattgcagagagctagaagacacaagaccatggcgtccaagcgactcctcgtgctagctctcctgctcgccgccgttttccttgccgtctcaggagcagctaacgacgaccaagcccaaccgaggaaggacggcggcgagaacaaagccgacgtgcaggactaccgtggcggcggcggcggctggcgcggtgggggtggctaccccggccgtggctacccgggcgggggcggctaccctggcggcggccgcggcggttactgcaggtgggggtgctgcaaccgcgggtactatggcggctgccggtgctgctcgcgcgccgacgaggtcccggagcccatgtaccgcccggagcccaccgaggtccacaactgaagccgagccacacatcgatctacaaagatgcatggacgacgactcttatcttagctaattaataagcactacatccatgcatgtccacaatagggccctagccctactatactatacgtcgtcagcagaaagtctggttttgatttcaataataagatgcacctatatgtgtgtgttacatgtacgccgttgtcttaattactgtgtggtgattggactcactagtagctattgtcgtcgtgttgtcgtctctcggtgagtcggtgtagcgtagtacttgctcttggaccaaatgctgcgtttaatctgtaaaactaccaaattatactagacacgtgttgcgttt

SEQ ID NO: 128368 - DNA, 524 bp, Zea Mays
ttttttttttttggcgctgaacgcatcaaagctgccaagaatcagaacgtcgacgagcggatttggatggaatctgaagcaccatggcaagaacaggagaatgaatcagcaccaaccttcctggaggggtaaagtaaaaaagggaggtcttctgccttcgaagagaacacaattttttttctcttcttcttctttttcgtttggctcaaattactccctcctcacggaagattgcttcctaacgacagagcccaagaaaggtgggggaggggacgtgtggtttggggttgcatgcagccattctatgaaaaaagagttaaaactctcctgggagtggggaagctgaaaaggtggctctctttcgcttcgcccgccacaaatagctcgcctgctaatcttaggagctcaatgcttgtggaggatgccaaacctttttccttgtgttcccttgaaaatttgggtgggatctctgatcagacatctaaaattgttcacgacaacggctggatcattgacagacgatt

SEQ ID NO: 128369 - DNA, 2838 bp, Zea Mays
tgaccaccttctcctcctgtacacagctcagcacttcagcagcagcatcgcatcatatcgccctcgtctccagttctcctctctctcggtcttaaaaatccagcgccaacgcggccgccggacgcgcattgctctccctccctgcctcgtctcctcacctcattctcgccacatcttcctctgctcccctcctcccaggtggcgttcttggagctccagctcctcgagctgcgtctgtctacgccgccgcggttgtcgcttgggtggcggcagcccgcaatggggaggagcagccgcgcctgctcccttctcggttccgcccagctgctcctcctgctgctgctctcgctcggctccgcggccgcccagaagggctccacatggaagaccctgagcggcaaggctccagtaatcgttgctaagggcgggttctccggtctatttcctgattccagtgattttgcttatcggattcttgggaccattagctcccctgacacagtcatgtggtgtgatgttcggttgacaaaggatggcgatggtatctgcctaccgagcataaacatggataactgcacaatgatagacaatgtttttccagaagggaagaagacctacaatgttaatggtgtatctacggtgggatggttctccgtggactatacgagcactgatctgctgccaaacgtgacactgaagcaatcggtcctatctcgtacccctgtttatgatggttccatgttgataaattctgttgaaaatgttttcacctcatttaacgcctctgcagtttggttaaatgtccagcaagacagtttctacagccagtttaagcttagcatgcgaaactatatcctgtctttatcgaaacaattcattactgattacatctcatcgcctgaagtgaacttcctcaccagtatatctggaagagttagcaagaagacaaagcttgtgttccgctttcttgacgaaggctctattgagccatcgacaaaccagacatatgggtccatgttgaaaaatctaacatttgtcaagacttttgcctctggaatacttgttcccaaaagctatatctggcctgttacaccagataattacctactgccttatacttcagttgttgatgatgctcacaaagcggggctagaaatctatgctgctgattttgcaaatgactttactatcagctataactacagctttgatccattagcggaatatctttccttcattggtaacagtgccttctctgtcgatggtgtgttgactgatttcccgattactccttcagaagcagttggttgctttagtaacctgaacaacagcaagatcgaccatgctaaacctctggttatctctcataatggtgctagcggtgactacccagactgcactgaccaagcttatgaaaaggcagttgccgatggtgcagatgtcattgactgtcctgttcaagtgaccaaagatggcatactgatatgcatgagttctgttgacctaatggatgttactactgttggaaaatcatcatttacttcgcaagtaactaccatcaacgatctgaaggctggtcctggagtcttcaccttcaaccttacttgggatgatatttctaagaacctacagcccatgatatcgaacccaatgagcacctataaactgtacagaaatcccagaaacaagaatgcaggaaatttcatgagattatcagactttttgacgtttgcaaagggaaaggatttgtcaggaatcatgataactgttgagcatgctgcattcatggcagagaagcttggatttggagtggtagacgcagtggtcaaagcacttgatgactctggttatagcaaacagactgcccagaatgttatgattcagtcaaccaacagctcggtgctaaagaagttcaagcaggaaaccaagtacagccttgtctacatgattgaagaaggtgtcagagatgccgcaccttcatcccttgcagacattaagaagtttgctaatgccgtctctgttagcaccacatctgttttaccacagacccattattatttgacaaaccagaccaataagcttgtcacgtcccttcagtctgcgggcctccaagtttacgtctatgtgctcatgaatgagtttgcatctcagccgaatgacttcttcgcagacgccacttcacagattaatgcttatgtgcaaggtgctaaggtggacgggatcatcactgatttccctgggactgctcacagatacaaattgaactcctgcacgagcatgggaaacagcgcaccactatttatgcagcctccgcaaccaggtagcctccttttaaccatggccccagatgtacagccaccagcagcggcgccaatgccgctcttgacggacgctgacgttgcagaaccagccctacctccagtcagtaacaccacaacagctgcatctccttcgcatgccgccctcagaatgcgaaccgatgtctcgatcctcatcgcattgctgatgctatgtgcttccctcctcatctgaaggtagtcctgcacaacatcatatgcggcgtggtgcattagagctgaggatttcacattgagctgctaatagcaattctttccaccatttatgtagcgatttttttttcttgttctgtccggtgttttgaaggatggatggatgttcagcttgatacctcaacggtgacacttgtgtgtgctgccgctgcctctaggtatattttggtacatatatgtggtgatacattgttcaggtcatcttttctactgccaaaccctggcccggagggcaaaaatattcactgcaaactgttgtaactgatgt

SEQ ID NO: 128370 - DNA, 1224 bp, Zea Mays
tttttaaattattgtttatgtaatctaaagtttagaaaaggttgtacctgagacgaaatccgggcggcagcagccatcggaggctgggcggcagccgccagcctcccgctcgcacgggagccacacacggacaccacgctgcgttcactcgcaaccgtggcccgtggcccgtgggtttcgcctgtggtcaccgcgaggccgcatccagtcgcccatgccgccttccgcatcgatgccggcgacgcacacggccgtgtacgtggcggcggtgcccctgcgggcgcccaagggccccgcccagctgctgatgtcggcgggctactcgctgggcatgtgggacctgcagcacttcatggtgctcctccgtcccgacccggcgctggcccaggcgctggtcttcgatttccagccgcgggacccggaggacgtcctcgccgcgctcgcggtgctgtcgcggagagagatccctggcgtggttcgcagaagaacgctgcggagggtcccggacgggcggtgctggctcgtggggcactgctgcgacgccgtcggtgccgccacaaggttcagcgagcggtggacgaccggcctggtggtcggggagcacgactgccgggactacaccaacggtaatctgtcagcactctcatagtcgtcgccattgcaaaatcgttgtgtagtgcgatccgtctcatatatcctctctttgtttggtggatcgctaagggctggtcgaggtcctgacaggtgaaaaacgtgtcctggagtcgctcagattgcgcggcaacggcagcagcaccagtggggcggcgccgccgtgatggatgatctaaactgtacggactacggtcatatatcggattctataaactggagacccaacacgcaatgcagaaatttcatggaaacgaggagacgttttgaaagggaaaaaaaatgaggagagaaaacaaagaagctactactcaagacaaggcgatggtgtaacgaagaaatgaggccacttgactagttgactgtgaaagatactagaggtgctacgtgaagcaagaaattagacacgctatgtggagaagcaccgttgactaagtaaacttaggaggtgtttggtttgaagaaatcaatctattctaaatgaggtggtatatcatgagtctattatacaaattttgtggaataaacttattctttatattattactaattattagcccacgtagaatgaaa

SEQ ID NO: 128371 - DNA, 1379 bp, Zea Mays
aacggccaaacccccaacaaggacagagcagaaacttagccagagattcgtccaggataggggctgtatcgtagggagtagtcgttgcggagattgggtcgaagcggactggacaggagccgagcaaactatctgcagaagaggttaaagggttgccgtgcggactccggagctgtgagaatctaccccgaggtaagctcttagagtcgtagtcaaagaggagaagccaggccgggaacaaacagaaaagagaagagcaacaggagtacaggactcagtgcaccaagaataggaaagagcaaagaccataacagttgaacttcaagatgcttgaagtgaggactgcaagaaggccggctctcgccgacatctctggtggtgggttctttatgaggacagtagaatcgccaggagctgtgctggtgaatggtgctgtcaagcggccggctcggcagtttctatcaccttcaagcaacaaggagaatgtgccaccagtgggagctttcagggctacaccaaagaggaggacccccttgcctgactggtacccgaggacaccactccgtgacatcacatcaatcgtcaaggcaattgagaggaggagaagtcgtctgcagaatgctgcagctcagcagcagatccagtggacagaagacccttcccgatctgtggatccaataactccagtacaggcagagcagggtggtgtgccaacaactgtggatggtcaaggtgttggaagccctgcaacctgtttggaggatggcaagctgaagacatcgtcctatccatcatctgactgctccttgcaggccactccatccaaaccaaacgatccagctctcgcagatctcgtggagaagaagctgtccagctcgatagagcagatcgagaagatggtgcggcgaaacctgaagagaacttcgaaggccgctcagccttccaagaggaccatccagaggcgcgtcctgatgtccatgcgatgagctgagaaagctatctgctctgccatggcttcccttgtctgctgctttcttagcagcaagtcgtaaccaaccattacgccagttttgcctgaaggaggggtggggccgtgggggctcctggttctctgcttgaggaccccggggtatgcggcttactactagctctctgcttgagggtacacattatggtgactgcgtatttttaatttgagaaattagtagttctatgtatagttttatagtgtggaacggatatgagaaattagtagcaattgtgacttcgacagcttgaatactgttgttatggagtagttcctctatactgttgtttccgagtaacataacacagttttggccatcagtaatggaatcataaccttaccgatttcagtt

SEQ ID NO: 128372 - DNA, 1464 bp, Zea Mays
gaccgtagcagcgtagccagtagcccagtacccagtagtacccagtagccatctccatccaggctcaaaccctagggaatctacccagaaatcacaccccaagcagggtcctatcgtatcaagaagccgtcgcgggggccggatcgccgcggctcggagaggagcggagcgaaaatcatctgcggacaggtaaggattcggaggcgggatcaggagctgagggaacctgttcgaggtggcctagactcgtagggatcgcgttgacattgggagaaatcacggagaggcggaaaccgagcaatagccaataggggaagggaagagcaacagtgcccggggcaccaagaattcgttgcatagatccaggagaagaacaatagaaatctgggcagaacgagagcagaactgactacaagatgcctcaattgagaactgccagcaggccggcgctcgccagcaactctgctggtggtttttttatcaggagaagggtggcatcaccaggaacttcccaggcaaagggcgccgccaagccgctggctcgacgggtccgaacacctgcagcgagggctaaaccaaagaggagaagccccctacctgactggtacccaagggtcccactccgtgacatcacatcaatcgtaaaggctcttgagaaaagaaatcgcctagaggaggatgcggctcggcaacacatccaatcgaatgaagattcttcacagcctgtggatccaacaactgcagaacatagtaatcctgattctcaaagcacgcaaactcaagaaacaccgggtgctgttgcttctggtccaagctcaacttcagctgttgcaaaccgtgtgacttctgtggctgagggcaagcaagaggcaacggactgctccttgcaggtggctccatccaagccaaatgatccatctcccgctgatctggtgaagaaactgtcaggttcgatagagcagattgaaaagatggtgaggcgccatatgaaggaaactcatccaaaggctgctcagccttccaaggtagttgtccaaaggcgcatactgatgtccatgcgatgagctcagcaacgatttctcttgtctgctgcgttcttggccgctagtcaaggtatgtctagggatggggattcctggttctctgcttgaggacactgtggtaggagtaaaagagggatttctagcttctctgcttgagagcatggctatctgttggtacaacttgccatggtatgcttactgcatacgacttcagttggcttcaccagaaacgaaccactgttgttcacgtctttctgtttgtgaagtataagacttcactgcgtagtagtaaggcgtactagatatttgtggcgtttagttcaccgaaaagatagagcagttacgagttgtagtaacagcttgaattcttgacacttcaattgatacagttagccttgcttattgttccagattttggttg

SEQ ID NO: 128373 - DNA, 1270 bp, Zea Mays
gcctgtttggtaattggtactcggctccactcggcgagattcgggagcgcgcttccaaacgccgccgcgattcggcatcctgctcgcgtgagaagcgctcatccggcattccggctccaaccgtccattctccgccccgcttcgccttttttcccgtcgcttccttctccgctgctcccgccgcccttctccggcaggattcgacggcggcggcggtctctgcgagcctcctcttacttcacggctgcctggagggcttcccgagccgcggcgatctctcacagctcgccttcctcgtcatcctgcaccgctgcggcctcccgcgccgtcgagagtgagcgagttcgggagcgctaccgctaccaaacatggagcttagctggagcgggagcccgtgtgagctggttgggagtcctaccaaacaggcattctaaccctaatcgagtggtgccttccctagccgtcggctatggacaagttcctcgtgccggcgccgcctcattgtggcgaggagcccgcgccgcctcctaggagacaccggtggaggcgcatcatcgcggagctggacggccgcatagactccaggttccagcacagagattcgcgcctccttcttgattccttcaccgaggttggggccttcgatcacaagtattacattcatggcgaggaaaggtgtcggacatacgtggatcgaataattagtgcttcaactataaattttcatccagtaagggagggtgtttcagcaatagaattcgatagaaagggaatatacattgcatcagtgacactctcagggtgtctgacggtgcatgactttgagactttgtactgctctaaatatggcccaccatgcagtatgccagatgaatcatcaaattatgtgctccatatatctaaccgaattcccctaaatgctgtccgatggaatccaggaaaccaagacgagattgcttgcacatcaaatcaaagtgataacgttttcctctttgatattggctatgtctcatctacaccaactgaagttttgcataaaggaaaatcgaaattcccctcgctctactctgaatcctgcaagagtttgactgatataacttttacttcagatgataagtcacggatatttgcatctggccttgatggggcagtgtacatgtgggacaggcgatcaagtaagacacactgtcttgagcttgtggcatctccagaagctcagttcaacactgtcaagttaactgtggataatcgggtatgcataagaatttga

SEQ ID NO: 128374 - DNA, 1505 bp, Zea Mays
gcaagtgaagattcaaaccttatgatggaccgcttgctacaacagttccaggaagtgtttacacacctagtggccttcccccagctagaaggtgtgatcacaggatccatcttctgccaggaacagtaccagtagcagttcggccatataggtacccacagcttcaaaaggatgagctgaggcacagtgcatgaccatgttagagcaaggcattatcagatatagcacctcagctttttcagcacctgtccttctagtaaagaaaccagataattcatggcgtttctgcattgactacagggcactcaatgagaaaacagtcaaggataaattccctataccagtggtcgatgaactactcgatgagcttcaaggggcaaaatttttcactaagttggacctccgttctggttatcatcaggttcgggttcacccagatgatgtccacaaaactgccttccggacgcaccatgggcactttgagtttttggttatgccatttggcctctcaaatgccccagcaacatttcaggctttaatgaatgaagagtccaagtgtaactttggggctacatctgttgcttatttgggacacataatatcagccaaaggggtggccatggacagtagcaagattgaggcagtaacatcatggccaatcccaaaatcaccacggggtctgcgaggatttttgggactagcaggctattaccggaaattcatcaaggattttggagtaatcgctgctccattaacaaagctcctcaagaaagaaggcttcaagtggtcaactgacgcagactcagcattccaaacacttaaacaggcactctcctcagcgccagtactgcagctcccagatttcgagtgccctttcatagtggactgcgacgcgtcagggtcaggatttggtgctgtcctacaccaagaccagggacctatagccttcttccgccggccctttgcagcacgccatataaagctagcagcctatgaaagagagctcattggattggtacaagcagtacgccattggcgtccgtacttatggggtagacagtttgtggtgcgtactgaccattttagcctcaaatatatgctggaccaacgattgtcaacagtaccacaacatcagtggattagtaaactgtttggatttgacttcaaggtagaatatagggcaggaagacttaacacagtggcggatgcattatcgcgccgtgatacaaccaatgaatcaatttatgctctgacagcacccactttccaactgtacaaagatctagaagaagaatgtgcacacagcgaggaagggcagcagctcagtgcacaaatcaaagaaggaagcttgggggatccatggcatacacaggagggactaataatgcttggcagccgggtgttttgtaccagcctcctccacactcattccatcaatactagaggccgcatattctgtaagactcgtgggatacaaataccctacaaggctcaaatcagacttc

SEQ ID NO: 128375 - DNA, 880 bp, Zea Mays
gagagatgcatgggcctcaacgtttaggcccactactacacgcagatgagcccaacgatctagggtttccagctctacacgccgcacacataaatcccgagaccaaaccttcgcctccattcgtcccccgccgccgccgctcccagtctccacgcggaagcagcgcctcgcaacgctcctacccaatggcgccgacgtcgaagctgtcgatgggcatcaagcgcgcgtcgcggtcgcacgcgtaccaccgccgtgggctctgggccatcaaggccaagaacggcggcgtcttccccaaggccgagaagcccgccgccgccgcggaacccaagttctaccccgccgacgacgtcaagcctcgcgttcccagcacccgcaagcctaatcccaccaagctcaggtgccgaagccattcctttaagtcgctgcccgcgtggtgttcgtgtttattttgcctggaggttcgattccagtcgcccttcgtttgttcaggtcgagcatcacgcctgggacggtgctgatcctcctcgcggggcgcttcatggggaagagagtggtgttcctcaagcagctcaactccggcctgctcctcgtctctggtgagcacgcttggtccacttattcctttggtgtgcttccgtggtcagtcgcgtcgctgcccctaaccacagccaactagccgagatgtgcgaatctatatctatccgtagttccgtacatcgtacttaagtttttttagtttaggcttaatcagttgaaagttgtaaatgtttacctcaatctggaactatattatttgtagtctggtgtgaaacgtggtgtatatattagcagttggaaattggaataattaggtactttgaagattatcttgcaacta

SEQ ID NO: 128376 - DNA, 1417 bp, Zea Mays
gagagatgcatgggcctcaacgtttaggcccactactacacgcagatgagcccaacgatctagggtttccagctctacacgccgcacacataaatcccgagaccaaaccttcgcctccattcgtcccccgccgccgccgctcccagtctccacgcggaagcagcgcctcgcaacgctcctacccaatggcgccgacgtcgaagctgtcgatgggcatcaagcgcgcgtcgcggtcgcacgcgtaccaccgccgtgggctctgggccatcaaggccaagaacggcggcgtcttccccaaggccgagaagcccgccgccgccgcggaacccaagttctaccccgccgacgacgtcaagcctcgcgttcccagcacccgcaagcctaatcccaccaagctcaggtcgagcatcacgcctgggacggtgctgatcctcctcgcggggcgcttcatggggaagagagtggtgttcctcaagcagctcaactccggcctgctcctcgtctctggtccattcaagatcaatggagtaccgatccgtcgtgtcaaccagacctatgtcattgctacatcaaccaaggttgacatctctggtgttgatgtcgcgaagtttgatgacaagtactttgccagggagaaaaagcagaaggtgaagaagacggagggtgagctttttgagacagagaaggaggcgtccaagtctctgcctgatttcaaaaaggatgaccagaaggccgtggatgctgctctgatcaaggctattgaggctatcccagagctgaaggcctatcttggcgctcggttctcccttagggatggtgacaagccccacgagatggtcttctaaaccgagttttggagttcggaggaagtcgctttggctgtgctctcttgtgacaagccccacgagatggtctcccagagctgaaggcctaccttgtttcattctgcttgaagtctgtcaaatattatgagaagatctaagaaagttttatcggtattggtggttcagcatggcgttatctgcttttggttctttgtgtaggtcaatgttgtcttaagatcatattttgtttgaattgctgactgtcgtgtttttttgctatctttgaacgtcttaaccgttccactaagagcatgtttggatgagttaggttttagttactagttgagctaaggctatctccaggacattttctatttcaaacttttctctgcaaacattgttaactgttaaacagtgttattcatagttttgcgaaccttgttttttaaaccaatcaaagttaaattaatacttgtaataaactctactgccaaatagcttaaattaaatcaatcaaagttaaattagtacttgtaattgtcattcaaacatttgatgtgacgtggtattgtggtatgaaactctagtttggt

SEQ ID NO: 128377 - DNA, 2523 bp, Zea Mays
gaccacacgtccacaccccaccagcggccaccttcgtcatcgccatgtctccaccgctccacgtctcgaccctttcctgcttccttccttcctccttccttcccgtcagactcgccaaagtgcgcccgggcgcgccgaatctccagacgagatcgcactccgcacctgacgccgccagtgccggagccgacggagatagcgggcctccacctccgatctagtgaaacatttggagaaccatacccaacaaaataagcaccagcatttcatcctttgtctcggcattccaataataataatgtggaaacgtaatccctttgggggtaaagcacatagtggactggatgggcgcactattgttgttagaagtctgaagatctcagtacgaaatgtcattgcacaaggaggcttctcttgtgtatatctggcatgtgacacagtacatccatcaaagatgtatgcattgaagcacattatttgcaatgactcagaatcacttgatcttgtcatgaaggagatccaggttatgaacctccttaaagggcatcctaatgtggtcacacttgttgcccatgatgttgttgacatgggccgtacaaaggaggcacttcttgtaatggagttttgtgagaagtccttggtgagtgcaatggagagcagaggtagtggttactatgaggagaagaaggtgcttttaattttcagagatgtctgcaatgctgtctttgccatgcatggacaatcactgccaattgcacatagggatctgaaagctgaaaatgttcttcttggatcggatggtgcatggaaaatatgtgattttggaagcacatcaactaatcataaatgctttaacaaaccagaagagatgggcattgaggaagatgtcatcaggaagcatacaaccccagactacagggccccagagatgtgggatctctacagaagagaagttatcagtgaaaaagttgacatttgggctttggggtgccttctatatagaatatgctacttcaagtctgcatttgacggagaatccaagttgcaggtactcaatggcaattatcatatccctgagcaacccaaatatagcattgctgtcacagggctgatcaaagatatgctggaagcctcaccaaatgccagaccagacatcacacaggtctggtttcgtgttaatgagctactgtcgcttgagttacagaaaaggttacctgatggaccttcaccagccgtttccttgagctcgcaagatgaaggtgctcataaaagaacacctgtgatgcctagaaggaaccctccacctccaagagagcaatctaatagttttttaccgcatggaagctcaaaggcaggagatgcacctttaggtgcattttgggcgacacagcatgcacaaggtgctcaagctgtagttaataggaaccctttgtttgatggggagtcaattaaggcaccactgtcatcaaagcagaaccaaagctgggtggacaccagcatcagtattcctggcaataggcatgatcattctggtcagatgtcactgacaagtaaagcacaaaataactctttgtccaataatggtttcagaggtctctctgacacggagatacaaaattctgggaaaagtagagcacaacaacctcaacccgagccaaaatgtgagaaagacccatttaatagctttgttgcagattttgacactcacaatctcaacattgccgttggtaaggcatccgaacttgaacttgaagtgtccaatctgaaggagcagttgaagaaaaccacattagaaaaggctgagatgacagccaagcatctcctcatcgtcaggagatccaagagctgaagctcactcttgccgagccaacacctccctcaaacaaagtcagctcaaggacacaagattctggatctcagcgaaaggaaaagatccaaggtactgtgtgggagcttgaacaagggatgcttgctagcaactcctcatcagccagttctgatgccaaaacatggcaggctttccctgacacaaagactcaggcccgaccaaaggtcgatcatgcaactaatgggagccaaaacataaccaagaacacaacgtcaggtgcttcccccgatgcgtggggttttggtactgataatttcagaacaccagcaacagcattaagcgctaccacacagatcaacagggcagctgcccaacggagctcatcccaaagatttaacgctggtgtggccaaggtagagcagccatctggatgggctggtttttaacttcaatcgacatgcgttaaccatcattctggtcaacatttgcaatccgcgctacacagctgctgttgccgatggagttgtgatctttgacatccacagggcatcaaaatcggttatttttagtgtgttcatcaattttggttgtgccaactttgatattgattcatgagatcacttgaaattacccgttgttaataagtaaatatatattgacagtattgtgcgtatttctttgtatgattatgaata

SEQ ID NO: 128378 - DNA, 2059 bp, Zea Mays
caaacaaggagcttccaactttcttcctcgctctttctctctctccgtgcgtctgcggtctgccatcggcatcgcccccaccccaccaccacacgtccacctctcccgcaattgggaatttctcctcaccgcctcgtctctgccgggctcgctcgtacgtcgctccccacccgcaatggcggccactttcgccctcctccttctcctgatcctgtcctcgtcggtccgcgccgcccccgacgccgtggtgtccaggatcgccttcggatcctgtgccaaccagagcgagccccagcccatttggaacgccgtcgcggggttcgacccgcaggtgttcgtctggctcggggacaacgtctacggcgacaacaagcgcccattccgggtcttcgggagggagcgcaccgtggggccctggaagaacgtgccgcgcttctacccttccaccgaggaggagctgcggaggcggtaccagctcgccagggcgcagcccgggtacgccaggctcagggagagggctcaggttcttggaacatgggatgaccatgattatggattgaatgatgcaggaaaagaacttagtgggaaagtgattgctcaaaggcttatgttagatttcttggatgaacctgaagacagtaaacggaggaaacaagctggtgtttatgcctcatacatgtttggccctgaaggaaaacgtgtgaaggtaatcttgctggataccagatatcacagagacccgctattaagtgatggaactattctgggagatccccagtggcagtggctagagagggagcttcatggtccacaatcagagatcaccatcattggatcttcgatccaggtagtgtctaatctttcagccactactgggcctttgttctatgtggagtcctgggcacgcttcccgagggagagagaaaggctgttcagattgattgatagtagtaagagacctggagtgctatttattagtggggatgtccatttcggagaaatcaccagattcgattgtggagctgaatacccatcatatgatgttacttcgagtggtcttacccaatctgtcgagaactctgtgccagaagtgtttcaacctcttatgagacttctggcaatactaacaccaactaccatgcgagttttgagcccaaattgccaatataaatcatgtacaataggccaaccaaattttggagcgattgaaattgattggaacgctgtacctccgcggattaaacttgaactaagagatgttgagggtcattctgttcacagcgtagagttccctatatctgaactgcagccctcggaagcgcatgcaatcaaaagacaaacccatactttccaacgtcactgtactctcgaaacagagctcccatggctaacacgataccggcttgctctgatgctgtttgtcatcatagctgtttttgcggtggttgtggtgatgctagcgatcgcctgcttgtcaaactttaccaagtccagtaagaaaagcaagaaggaatagctgtgagctgcagaggagaaacgaagattcggtccagctataagctggatttcacactgaccagggatcacatatctcaaaccatgcctttgagcaggcaagagccagattgcaccacagtatcaagcagtacactgcgttgtgcaatttgcaaagcgcagattggataaatagatatgatagctaacaaataacttacaaccatgtgcctgcctcgtacagcttcgctttttgttttccgtcttcatgccttccgccctgtttttgttttctggtaagcattacattgactaagaaaaatcttggcggtggaagtgtcccacaagtcagctaactagtctgctgtgtgcctcctcgcacacggatggcatccctggtgctctcggttaattgcagtgtactcagacacgcgttcacatgtaccctgctagggccaatacggcctccagtctcgaaatagaactgatgtgaaacacgtgagcgacggtttatcttcgtatcgcatctatattcatatttaacattaaggactcgtttggtttg

SEQ ID NO: 128379 - DNA, 1938 bp, Zea Mays
cgtccacctctcccgcaattgggaatttctcctcaccgcctcgtctctgccgggctcgctcgatcgccttcggatcctgtgccaaccagagcgagccccaggtggtcgacggaacgcccacacggccatgcccgcccatttcgatcaagttgtgacggggattgtttagtgcagcccatttggaacgccgtcgcggggttcgacccgcaggtgttcgtctggctcggggacaacgtctacggcgacaacaagcgcccattccgggtcttcgggagggagcgcaccgtggggccctggaagaacgtgccgcgcttctacccttccaccgaggaggagctgcggaggcggtaccagctcgccagggcgcagcccgggtacgccaggctcagggagagggctcaggttcttggaacatgggatgaccatgattatggattgaatgatgcaggaaaagaacttagtgggaaagtgattgctcaaaggcttatgttagatttcttggatgaacctgaagacagtaaacggaggaaacaagctggtgtttatgcctcatacatgtttggccctgaaggaaaacgtgtgaaggtaatcttgctggataccagatatcacagagacccgctattaagtgatggaactattctgggagatccccagtggcagtggctagagagggagcttcatggtccacaatcagagatcaccatcattggatcttcgatccaggtagtgtctaatctttcagccactactgggcctttgttctatgtggagtcctgggcacgcttcccgagggagagagaaaggctgttcagattgattgatagtagtaagagacctggagtgctatttattagtggggatgtccatttcggagaaatcaccagattcgattgtggagctgaatacccatcatatgatgttacttcgagtggtcttacccaatctgtcgagaactctgtgccagaagtgtttcaacctcttatgagacttctggcaatactaacaccaactaccatgcgagttttgagcccaaattgccaatataaatcatgtacaataggccaaccaaattttggagcgattgaaattgattggaacgctgtacctccgcggattaaacttgaactaagagatgttgagggtcattctgttcacagcgtagagttccctatatctgaactgcagccctcggaagcgcatgcaatcaaaagacaaacccatactttccaacgtcactgtactctcgaaacagagctcccatggctaacacgataccggcttgctctgatgctgtttgtcatcatagctgtttttgcggtggttgtggtgatgctagcgatcgcctgcttgtcaaactttaccaagtccagtaagaaaagcaagaaggaatagctgtgagctgcagaggagaaacgaagattcggtccagctataagctggatttcacactgaccagggatcacatatctcaaaccatgcctttgagcaggcaagagccagattgcaccacagtatcaagcagtacactgcgttgtgcaatttgcaaagcgcagattggataaatagatatgatagctaacaaataacttacaaccatgtgcctgcctcgtacagcttcgctttttgttttccgtcttcatgccttccgccctgtttttgttttctggtaagcattacattgactaagaaaaatcttggcggtggaagtgtcccacaagtcagctaactagtctgctgtgtgcctcctcgcacacggatggcatccctggtgctctcggttaattgcagtgtactcagacacgcgttcacatgtaccctgctagggccaatacggcctccagtctcgaaatagaactgatgtgaaacacgtgagcgacggtttatcttcgtatcgcatctatattcatatttaacattaaggactcgtttggtttg

SEQ ID NO: 128380 - DNA, 387 bp, Zea Mays
atgaagaagatctggtcatctggtgcaccacctaagctacgtctcccattcacgttcccatccttgtcttgtcttgactggccgcctgccgcgcacggtggtggcgtcctcgtccatgaagatctgccggcaccggcactcctcgctgcagaacgcccggtcgcctttgtacatgtagatgtccatgccctcggcaagctctttgtggcacaggcagcagcgctgcaggaaggagcccgcagccgccgcagagacagggatcttccgctgctgctggtggtggttggggccgtgggtcgtcgtcacgagggtggccttgctgatgatctgcgccgccgccgccttcccggtgtagctcttgctgtggttctccaggagaacgcttag

SEQ ID NO: 128381 - DNA, 589 bp, Zea Mays
aaaacgtcaccagatcgtttcgttagaaagatttgatgcttcatagtgtgccgaccgcagaaggcccagcatctgcttctgtagcagctcagtttgagactctgaatacacatttggctgcacaggaagaaacaaaaaaaaacagattgctaagggatgttacatgcaaaaatatgaaacataaacagcaaaggatcttgcaaagagaaaaggaactgtcagtggctgaaactatcttttcgaagaggactagcgtttcttgtcgcaaaggtattcgcgtaatagcacgtaaacagtccggacctgttgctcagcttttctcacagaaatcttcctggcggccaccattcttccatccagtctcaccgtctgcttctccccccgtggcggcaccgttctcgccgtcgctttcgctagctgtctcccactcggagtcgtcggcctcctggccaaacgcagcgtcgctagcatcccccgcgcgacggacgcccccgtgcttcagggctgcttccctgaacagccaagcggcgcgcatctgcttcttcaccagccgctcggcataatcagggactttgttctgcttcaggga

SEQ ID NO: 128382 - DNA, 554 bp, Zea Mays
atgcttcatagtgtgccgaccgcagaaggcccagcatctgcttctgtagcagctcagtttgagactctgaatacacatttggctgcacaggaagaaacaaaaaaaaacagattgctaagggatgttacatgcaaaaatatgaaacataaacagcaaaggatcttgcaaagagaaaaggaactgtcagtggctgaaactatcttttcgaagaggactagcgtttcttgtcgcaaaggtattcgcgtaatagcacgtaaacagtccggacctgttgctcagcttttctcacagaaatcttcctggcggccaccattcttccatccagtctcaccgtctgcttctccccccgtggcggcaccgttctcgccgtcgctttcgctagctgtctcccactcggagtcgtcggcctcctggccaaacgcagcgtcgctagcatcccccgcgcgacggacgcccccgtgcttcagggctgcttccctgaacagccaagcggcgcgcatctgcttcttcaccagccgctcggcataatcagggactttgttctgcttcaggga

SEQ ID NO: 128383 - DNA, 341 bp, Zea Mays
agtcggatcgcagaggtatcctgccctgcagttcctcctcggcggaaaccaagaccctagctctcgtcgtcgtcggcgtcggcggcggcgaccgtggcggatccgacagccagccctcgtcgcagccgggccgccattgccgtcgtccagctcccaagacggcgtacctccttatgttctccagatccggaaccgtgcggatggtgttcggggttcggcgaccggaaagaaaaacgttttggcccgggtatacagcgtcttttgttactctttcctcccatattatggttcgtttatttgaccctgcagctggactgtgaggagcctatatattctatatt

SEQ ID NO: 128384 - DNA, 360 bp, Zea Mays
atggattgctgtgtggattgcaacgtctttggtgaggtcattcgttgtgatgtgcctggcggcatgaacatctcagaggtggatctatggaaagaggagattggaaggctacgcttgaaagagagacgaaaggttgcgctgtgggatagacgaaaggttgtgcctgcgctacatttgggaactggaggaaaagtgaaaagaatgatgcattttctttgtgtaatcggtggtcatggtagttgtgctgcctcacccaaacctgttggtccaggattcgtcaaggacagggacagggtgccggtgccgatctgcaagataggaggaggatttaaaggttgttctaggtccttgcaggattaa

SEQ ID NO: 128385 - DNA, 274 bp, Zea Mays
gaattatgagctacacttttggtattatatcatgctctatcctctatggctgtgtactgctactatgctgcaagctataatttcagtttatagttatggtgtgtgtgctatgaagcaagctataatttcattttatagttatgaactttcaaattttatcatgggctatggttgctgcattttttatttcatttggagttcagttttttggttactgcaatgtaccagtacctcttgttcccggcaattgattcataagtttcttacacatggt

SEQ ID NO: 128386 - DNA, 2320 bp, Zea Mays
cgctcacttcttcccatagctaggttcctatgcccacagtcacacagcttgtctccttcctcctctccaccccggccccttgatctcatctcttccatcctagcttgctcgccgctgccagtctctcctccacctgcaactcccatgtctcagtcttctcctctcttctccgtcgcccgagcgcacgccggagcaggagggcgagccgtggcagccgctctcctgctccgtcgtcgccccattgcacagctgccgcacagcatccatggcctacggtgtctctctccagccagagcgacaccttccaagacgctcctcagcctcccccgcgccacgctgtcctccttcgccgaccccgacggcgacggcggctccagcgcgaaagccagcgacggcggcgccaaggccggcgccggcggggaggagcaggtcggggaatgcgagatgtcggagatggccagggcgttccacatctcgccacgggtggcgacgtccatctccgtgacgatcgcgttcgccgccctcaccgtgccgctggcgatgcgctcgctggtctgccacgggaccttcaggatgaacgcgctggcgtacttcacgctcctgtcggggttctacatggcgtggaacatcggggcgaacgatgtcgcgaacgccatggggacgtcggttgggtccggagctctgacgctccggcaggcggtgctgaccgccgcggtgctcgagttctccggcgcattcctcatggggacccatgtcaccagcaccatgcagaagggaatcctggttgcgtctgcgttccaagggaaggactctctgctcttcgctggactcatatcctcccttgctgctgccggtacatggctgcaggttgcttcgtcatatggctggcctgtctcaactacacattgtatcgttggggccatggttggtttcgggctggtgtatggaggggtggatgcagttttctggagttctttggctagagtatcttcatcctgggtcatctctcctttgatgggtgcagctgtctcttttcttgtttacaagtgcatacgcaggtttgtatacagcgcaccaaatccaggccaggctgcagctgctgctgcaccaatcgcagtcttcaccggtgtcactgcaatctcgtttgctgcttttcctctcagcaaggtgttctccattgccatcctgcaagcagtgtccagtggggcaataggagccatcattgtctcccgagtgatccaaaagcagctaggtgacttgctgtcttcagaagcagagaagatcgcgtctgctgagaagtcaagtgcccagcaggctggatttctctcggacattgctggccctacgggagctcagctgcagatcgtgtacggtgtgtttggttacatgcaggtcttatcggcatgcttcatgtcatttgctcacggagggaacgacgtctccaatgccatagggcccctggctgcagctttgtccatccttcaaggtgtggcaagcagcgctgagatagtcatacccactgaagttcttgcttggggtggttttgggattgttgcagggctcacaatgtggggatacagggtgatagcaacaattggcaagaagatcacagaactaacacctaccaggggctttgccgcagagtttgcagcagcttcagtagtcttgttcgcatcaaagctcgggttgcctatatctgccacgcatacacttgttggtgcggtgatgggtgtcgggtttgcaagagggctcaatagagtcagggcagagacagttcgcgaaattgtggcgtcctggttggtcacaattccagttggtgctgtcctatctatcttctacacattgatcttaaccaaaattctggcgtacttcatgtgagtggattgtaaaataaaagggctgcttttaagtggtacagcccattgtcacttcataaattttgatcagtggaaaaaggattttcttttgcaaaagtaaagagatggactgattccacaagttccaccagaaatttacaagaatttccaagaccaaataaccattttcttggaaactgagcaaattagaagtgtttcccagcaaataatcatggtacaggctcctgaattattatttttttcaactttttatactaccttgtatgtctatcacaaggtcgaatactgtaacttctcgtagagctgttatacatatagatgtaatgtaatggttggtcaaatttattcttgtaaattgtaatgatatcgcatgactttgttcattgccaatcatcctagaataagagctcattcctctgcaggaaattatatgacaaaaaaaa

SEQ ID NO: 128387 - DNA, 1739 bp, Zea Mays
cccggaacgcgcggccgttcactcaagctctcgaataaaatttcccggttttccggtccggatcccaaatccagaaatcctacgactcgctcgtcctctcgtctcctccgatccgttccgttcgcgagccaccgatcccgccaacgggagcgaacgagaacgatcgcgtcgtcgtcgtcgcagccgccgccatggatccgacgccgcagtcacacccgatccttgcctacgtgctctcccgcctcccctcgctgcccgcggtgaggacgccgaggtccccgcgcgagcgggacctcgagcagccgtccccgcgcacgccgtcgggtgccgcggagatcgacttggtggggcgcatgccaggcctgcgccacccgtccgtgctgtctgccatgacccgcgccgtcgccgacgtctcctcggcgcgcgacgcgatccgcctcctggggccccggcccgaccacgagcaagtcgacgcctcccgcgaacttctccgcttggccgatgctgggaagaaggcagacgccaacgcggacgtgaagacgaaggatctcgacgaggagaagctggccaagtgccgggaggtggtgcggctggaggaggaccacgaggcgtacggcgccctgctgcgcgacgcggaggggaagctggagcacgtgtaccagatggcgatgcacgggagggacatcaagaaggtgggcggcggtgatggcaaaggggaagagggttccggggcggtggacgaggaggtggtgcgggtgctcaaggacgcgggggaagggaaggtggtggagcgggtgaacctcgccgatcggcagatgcgcctactgccggagcccattggccggatccgcggcctcctcgcgctcgacgtctcccgcaaccagctcaaggtgattcccgacgcgattggtgggctcgaacacctagaagaactccgcctcgcttccaacgacttggtttctcttccagactccattggccttctctccaacctcaagatcctcgacgtctccggcaacaggctgagggttctgcccgacaccatctcgaaatgcagatcgctggtggagctggacgcgagctacaacgccctggcttacctcccgacaggcatcgggcacgagctggtggacctgcagatactgcgcgtgcacctcaacaagctgcgctccctaccgtcgtcggtctgcgagatgcgatcgctgcgcctcctggacgcacacttcaacgagctccacggcctaccggccgccatcggacagctgtccgcgctggagacgctggacctgagcagcaacttcagcgacatgcgggacctgccgccatcgttcggcgacctagctggcctgcgcgagctggacctgagcaacaaccagatccgtgcgctgccggactgtttcggccggcttgccaagctggagagactccgcctggaccagaacccgctcgctgtgccaccccccgaggtggtcgccgacggcgtcgtcgcggtgaatgagtacatggcgaggcggtgggccgaggccgttgccgaagaggagcggcggcgtgcgaacgcggccgccgtggcggagagccccagggcgtccacgcccagggagtggctgacgcggagcgtgtcgtcgctgagcacctgggtgtcggacgtgacggtgaaggttgtcgggcaggagaaggtggacgatgaggacgagttcctgcagcaacagttctgaacgtgagctggcaccaccatcgcc

SEQ ID NO: 128388 - DNA, 95 bp, Zea Mays
gtatatctgctaatactaaaagaaagatttcatcttgccatcacaactttctctcgaatatgcaggagttgtatatcattgcatcaagaagaaaa

SEQ ID NO: 128389 - DNA, 872 bp, Zea Mays
cattgacctagtacacgtacacgcagatccatcgctcctactccccttccctatcgtatcgcgtcgtcctcgtcgccgccctacgccccaactaccttggtggctagggttcccaaccaacgcgcctccatcctgcacctacctagatcacctcctccacttgaagcattcgtgccggcgtgtggaaggacgccacgaaggcgactcgggggatagcggcctatgcggctcggtacagtcttcccatccccaacaaccagcttagaggttcggttcgagcagagatcgccgaagcgaagacctagagtcgaagcggcccaaatcgccgcttggcagattcatcttggtggaggatggactcaggattcgtcagggccagaggaggatgccagcaccagatccagcaagacctaactcagaggaagcagcgatcaagcgtagccgtcagatagacaatgacaaggacgagtccatgtcttcgcctactcccccgctggacgtaggtgctggcgcgctgtgggtggaggtgctacaggagtgcctgaggtccgctgtcgacctgagcttcgcccaggtcgtcgctaccactgataatcggcctccagcccactgctttagctttagtctttacttttggcgatgagttgacgactaggcaactgccaccgcccaaggtcaggtgctcgagtatccgttgaccccttcgctagtccattccccgttgacagcaagcattaggtatgccagcctcttgactagatttttaaaaataatattaccatttatatgcttaaataagtttactgcaaaaatatattttttgattcatctactgctatttgtttagggatcataaacattaagttttatat

SEQ ID NO: 128390 - DNA, 981 bp, Zea Mays
gacctagtacacgtacacgcagatccatcgctcctactccccttccctatcgtatcgcgtcgtcctcgtcgccgccctacgccccaactaccttggtggctagggttcccaaccaacgcgcctccatcctgcacctacctagatcacctcctccacttgaagcattcgtgccggcgtgtggaaggacgccacgaaggcgactcgggggatagcggcctatgcggctcggtacagtcttcccatccccaacaaccagcttagaggttcggttcgagcagagatcgccgaagcgaagacctagagtcgaagcggcccaaatcgccgcttggcagattcatcttggtggaggatggactcaggattcgtcagggccagaggaggatgccagcaccagatccagcaagacctaactcagaggaagcagcgatcaagcgtagccgtcagatagacaatgacaaggacgagtccatgtcttcgcctactcccccgctggacgtaggtgctggcgcgctgtgggtggaggtgctacaggagtgcctgaggtccgctgtcgacctgagcttcgcccaggtcgtcgctaccactgataatcggcctccagcccactgctttagctttagtctttacttttggcgatgagttgacgactaggcaactgccaccgcccaaggtcaggtgctcgagtatccgttgaccccttcgctagtccattccccgttgacagcaagcattagaacaatgcacccccagtacctagtccactcttgagcagtatacgacagatacgtccagtacccccagatgatggacaaggtacaccatgacagtagaattttttacaccctcattatcttgttttaattcatcctttctacgctccaattattttggtgaatcttagcatagaacttgaccttctattattttgtatgtttggtttgcatgggatatatttatgaacattgatatcgtttttatgct

SEQ ID NO: 128391 - DNA, 452 bp, Zea Mays
atgccagcaccagatccagcaagacctaactcagaggaagcagcgatcaagcgtagccgtcagatagacaatgacaaggacgagtccatgtcttcgcctactcccccgctggacgtaggtgctggcgcgctgtgggtggaggtgctacaggagtgcctgagttcaataattccaataaggatctcaagacctacagttagggaatgctatttgacaataacaatgcacccccagtacctagtccactcttgagcagtatacgacagatacgtccagtacccccagtatggacctcggtggttttctccacattaggaaagctggaagagccttttgaactcagtttttttgctaacagtggtgttatggtgaaacagagttttgtgtgtatgtaccaacaactaaaatgtaaacacgacattatcatagttgagtacaggaataattacctt

SEQ ID NO: 128392 - DNA, 793 bp, Zea Mays
gatttcaattgcaagtaatgttcaaatcagagcttgtttctctatattcgcagttgctgctgttgctattgttgtgtatcctgcaactagcagccctcaatctttatcacaggatatattcatcgtagtaatccagcaacactatttttatatagcaacttgtttgtctcttgccaaagaaagttattagtcaaagggagggtttactatgtgttgataatgggcatttggctgtgcgtcactattttcatatagttatctttgtagccaaagttttagacctactacatgtaccttttttgttgttcctacacttgaaagattaaatgtatgtttggttcgtgtctaactatgccacaatttgcttaaatgcctgtaatttttatttcctaaatatgtcttttcatgctaatttgaatacgctattacgcccaattactagatcacgcgtatgctccgctttgtaaacacgtagaccaccaatcctacattgttcttgttcttccttttgtgcttttacgatgatttgaattggtccttttcagaacaatgcacccccagtacctagtccactcttgagcagtatacgacagatacgtccagtacccccagatgatggacaaggtacaccatgacagtagaattttttacaccctcattatcttgttttaattcatcctttctacgctccaattattttggtgaatcttagcatagaacttgaccttctattattttgtatgtttggtttgcatgggatatatttatgaacattgatatcgtttttatgctt

SEQ ID NO: 128393 - DNA, 1269 bp, Zea Mays
gatttcaattgcaagtaatgttcaaatcagagcttgtttctctatattcgcagttgctgctgttgctattgttgtgtatcctgcaactagcagccctcaatctttatcacaggatatattcatcgtagtaatccagcaacactatttttatatagcaacttgtttgtctcttgccaaagaaagttattagtcaaagggagggtttactatgtgttgataatgggcatttggctgtgcgtcactattttcatatagttatctttgtagccaaagttttagacctactacatgtaccttttttgttgttcctacacttgaaagattaaatgtatgtttggttcgtgtctaactatgccacaatttgcttaaatgcctgtaatttttatttcctaaatatgtcttttcatgctaatttgaatacgctattacgcccaattactagatcacgcgtatgctccgctttgtaaacacgtagaccaccaatcctacattgttcttgttcttccttttgtgcttttacgatgatttgaattggtccttttcagaacaatgcacccccagtacctagtccactcttgagcagtatacgacagatacgtccagtacccccagtaagtatatgatcttttgttttttgatccactgcccaaatatccagaagacaattagattttgatgtctgcatattaaaattgccgatatcaaataaatcgtccattaaatcagttttctatgttttcaggatgatggacaaggtacaccatgacagtagaattttttacaccctcattatcttgttttaattcatcctttctacgctccaattattttggtgaatcttagcatagaacttgaccttctattattttgtatgtttggtttgcatgggatatatttatgaacattgatatcgtttttatgcttactcatatgggataatctgatcttctaactaaagagatttttcttttggtaatctgatcgtccaactcaagtttgcattcagtttagactttaggttatgttagccataacaagcttgaaaagacatattaacaaagaaagatcatattagcagttcatgttacgtttgcaggtatggacctcggtggttttctccacattaggaaagctggaagagccttttgaactcagtttttttgctaacagtggtgttatggtgaaacagagttttgtgtgtatgtaccaacaactaaaatgtaaacacgacattatcatagttgagtacaggaataattaccttagatc

SEQ ID NO: 128394 - DNA, 220 bp, Zea Mays
atggatgggcacgctacgccggaaacctcccccgcagccgcttccttcgcccacaagcgcgcgctcggaatactccgaggacggagctccaggcgaaccaagggcgacgaaaccgccgccggagaaggtacccgtcgatccgccctcgcccgcgattcgtttgtcttgctccgggcggcgagcagcagagggggtcctccacgcggatccgccttccagc

SEQ ID NO: 128395 - DNA, 2341 bp, Zea Mays
ctcccggacgcgcgagcgcgatcgtcccgccgtccaggtgaggtacaagacatgctcctaatgtgggcataaagcgtggtcaaagagaaataaactgtccaactcaaacccgtgtaaacattttctttcatttgtcgagtatcaccgttgaaaggtggagaagtaaaagttgtggcagtttctgtggaaccaccatcccctcatactaggcaaagcaagacagcggtcggaggaccaaatcagtgttcatacaaagaaatcattatgtctagaaaacgtgccttttccgaagaaattggaggcgctactgcattgaagagcctaccaactccaatcggtttatttgaagatgaatgcgttttttgtcattcatttagaacgagccagtttcacgggccgatggtatgttacctgaagggaagagttgtgtccattgacgagtgcgactcatcagatgccatctacgtccataggaaatgtctcgagtgggcttctggaatatggtttaagggtgacattgttatggactttaagccagaaattacacgtgcttcaaaactgagatgcgcaagatgtggactcaagggagcagcccttggttgttattacggtccttgcctcacaagttttcacgttccatgtgcagttcagacaattggttgccgctgggatggtgatggttatatgctgtgccctcagcatgtttcaaatgctctaccatgtgataagcagggcacagatacaaaggagaattacaatgcttcttctttgcatcaaagccaacatacagataagaaaggaagtttcgacgatcataatagggaaaatgaacaagctgatcagctcaacatctcaaacgcttccttgctgcctcagactcggagcgattgtcacgaagcagaattttgtaccaatttctcaagggatggtgaacaaacggatcagcttaactctagtccatacatagaaagggaacaagtttttgacagtcgtcgtcgaaggaaaaatggacaaacagatcatcttgacatttcgactccttgtgtgccacacaaccaacattctcatccaaaagaagaaatatccaccgatagttcgagagatcatcaccagcaaatagatcagcttcagacttcaagatcatccttgccactgggggcctgccaaggggaggagatggaatcagatcagcctgacgcatcaagctgccctgctgatgagttagttttgcttggtctgtgtttaagtgtggacgagaaggacttcgtgcaaaagtttgcgtgttggaccaaggcgacgctggcggaggagtgggccgagaatgtgacccatgtcattgtgggcaaaggtgctggtagttcgtggtgcaggtcatttgaggtgcttatggcaatactgctcgggaaatgggttgttcgtttcgaatgggtcgcggactgcttgcagctgactccaggtccagaggcctcctatgaagtactactactagcagcatccagcatcgattcactcggcgcgaacgacgggccgaagcagagcagaatccgggcaactgaagggttgcaggaaccgaaactgttttctgggctgtgtttctgcctgagcgacctgatgagccctggcaacagaggccgcacgcggggcctcatagcggccggcggcgggcgggtgctggacaaacgcgacctgcgccttctgccgaagaaggatccggatcctgacggccgccgctctccgtctccggtgaacccgaggccctacttcgtgtacgacgtcgaagcgcccggaggtggtcggttcagcgcgaggctgctgcggcgggagatcgacgaggcgagggagcaggcggcggccggggcgcaggtgatcggccacctcagcgtgttcgacgccgtcgcggcctatgacgcggggatcctgctcgtgtgagcgatgcgggcattgggccggggatgtgtctggagcttggacttgcatgggccgattgttgggccgccagcacgttgggcctcgacgtcgctggagctaattattttggacggatatatctgacacctagaactaccaagcatgttcggttagctctcaattcatgtagattaaatggaattagaaaaaattaagaagtttggtttgtttaggatttaaccgaacaaagtctaacgtaacttgtggtggtagtgtgttattatttatgatgatgatatagatgagagaatttagaatatgggatatacagtttgaaagctggctggaaccaagaagaaacgggaaagcaacttgcaatgatggccacttgggctggtaatataagcatcattacaggtgctacgctaatgct

SEQ ID NO: 128396 - DNA, 391 bp, Zea Mays
aatcaaaacaaaaaaaatagttggactggtatttttttctctaaagatcgcgtgttctaaatttttttgaagccccagtcccagagtgtgcgactctattgaatatataaaaacgagaaaaagggacatacgtgcaggtccaaggttcggttatttcttctttttccttcatgcggagtccggaccactataggtgtacattcgggccgcccgacccggcccggcccaagcccaaaaaggcccgtattgtttgaatttcgggccgtgccgagccggcccatgggcctagccctcggcccacggcccgtttgaatttcgggccgtgccgagccggcccatgggcctagccctcggctcacggcccggcccgtaattgcttaaacgtgccggg

SEQ ID NO: 128397 - DNA, 1053 bp, Zea Mays
gccatttccaagggctctacacgaagttaggcggccaagtgttcgcaaccaacccctcttcctcgcccactgaaaggttcagaggctcccgttttagcatagcgaccgagacgaaggagtgggggggcggagagctttgggccctggccaggatgaagtttatgagactcggcacccggccggacaccttcttcgccgccgccgactccgtgaggtctgtctgcacggaggtggccacggacctgcagatcctcgtggataactgcctctaccatctccacaaggtaattagctcaaggatcgtcagagatcgtgcccaccctttggcctttattcaggaatttgaatctttagttaggatcgttccatacagtgggatcccgtctaggctttgttcggttttcacggattggagacccagaataattcctagccggattacttctctaatttatataaattttgatgagttggaacgaaaccgggtttattccaatagaaacgaacggccccctaggaaatggagaagtcccccccggccgatcttgagattaaagactctttctgtttcttgccattgtccgtcctgtgcatgccttgcctggacgccgcagttccccctgctctcgaaatgcatgctcctgcaagcgctgtgcgccgacgccggcgacgtcgtcgtcgagctcccggggttcccgggcggcgccgaggcgttcgaggcctgcgccaagtactgctacggcatcaccatcacggtgagcgcgcgcaacctggtcccgctgcggtgcgcggcggcgcacctcggcatgtcggaggccgccgacaggggcaacctcgcggccaagctcgacgcgttcctcgcctcctgcctcctgcgccgctggaaggacgcgctgggcgtgctccactccacgcgccaccacgccccgctctgcgaggacctgggcctcacgtcccgctgcgtcgacgccgtggccgccctcgtcgccagcccggacaccgccccgacgtccacgtcggcgtcgccgtggtgggcgcacgacgtcgccgagc

SEQ ID NO: 128398 - DNA, 2245 bp, Zea Mays
gccatttccaagggctctacacgaagttaggcggccaagtgttcgcaaccaacccctcttcctcgcccactgaaaggttcagaggctcccgttttagcatagcgaccgagacgaaggagtgggggggcggagagctttgggccctggccaggatgaagtttatgagactcggcacccggccggacaccttcttcgccgccgccgactccgtgaggtctgtctgcacggaggtggccacggacctgcagatcctcgtggataactgcctctaccatctccacaagttccccctgctctcgaaatgcatgctcctgcaagcgctgtgcgccgacgccggcgacgtcgtcgtcgagctcccggggttcccgggcggcgccgaggcgttcgaggcctgcgccaagtactgctacggcatcaccatcacggtgagcgcgcgcaacctggtcccgctgcggtgcgcggcggcgcacctcggcatgtcggaggccgccgacaggggcaacctcgcggccaagctcgacgcgttcctcgcctcctgcctcctgcgccgctggaaggacgcgctgggcgtgctccactccacgcgccaccacgccccgctctgcgaggacctgggcctcacgtcccgctgcgtcgacgccgtggccgccctcgtcgccagcccggacaccgccccgacgtccacgtcggcgtcgccgtggtgggcgcacgacgtcgccgagctcggggtcgacctcttctggcggatcatggtcgccgtcaaggccaccggcgccgtccacgagaagaccgtcggcgacgcgctcaaggcgtacgcgcgccggtggctgcccaacgtcgccaaggaccagccgctcgaccgcgacgccgcggacgtgaagcaggtcgccacgaggcaccgcctcctgctcgagaagatcgtcagcctgctccccgcggagagggacgccgtctcctgcggcttcctgctcaagctgctcaaggccgccaacatcctgggcgcgtccaaggcgtccagggcggagctggtgaggagggtggcgtggcagctggaggaggccagcgtctccgacctgctcatcccgtcgctgtcctgcgtcagcgacacgctgtacgatgtgggcgccgtgtcggccatcctcgacgagttcgcgctgcggtgcgccgcgctcccgccggcgccggcgctggctctgtccgggagcctcgacgacagcccggcgcactcgggcggccaccggcggtcccgttcggcggagagcgtgagcttcgacggcacgcgacgctccttgtcggccgcacccgtgtcgcagggcggtctggtgcaggtgggcaagttggtggacgggttcttgattgaggtcgcaaaggaccccaacatgccgatggacaagctgctcgccattgccgaggccgtgccagacagcgcccggccggagcacgatggcatgtacaaagtcgtcgacacatacctcaaggcgcatccggagatgagcaaaagcgcgagaaagcggctgtgccgggtgctcaactgccggaagctgtcggagaaggcgtgcgcgcacgcggcgcagaacgagctcctcccgctgcgcgtggtggtgcaggtgctgttcttcgagcacgcgcgcgccgcggcgctggcgtcgggcgggcacgccgtggccgcggcggcggacctgccgagcaacatccgggcgctgctgtccaagtccgggtcgtccgaggacgacgaggcggaccgcgtcgacgagcagcggctccgggcgctggccgccggcgcgtcccccggcgacgactggagcgtggagggcctccgtcgcgcggcgtccaagatcgccacgctgcggatgaagctggcggaggacgaggacgaggaccgtgacgccgacgagttcgcgcgcaaggccgggctaccgcgcagcgcgtcgctgcggttcagggcgttctgcgccatccccgccgggaagccgaggcggatgctcagcaagctgtggccgctgggcagaagcggcgttagccactagtagcagacagtgttagctcctgtgatctcctgtttctctctctctcgttttcctgagggtgatttgtctgtctcttctacgagttcctcctctctctctctctctctctctctctctctctctctctctctttgttacgctttcaaggcaaattgtaccttgcatgtagttgtaatctcaacgggcacaataaaagatagaaattgcacaggcagatt

SEQ ID NO: 128399 - DNA, 429 bp, Zea Mays
atgaagggcgctgcagggtcgcgctcgcgcgagcccggggacgtcgacgtggagctgctcaaggcggtggcgcaggcgtgggacgcgcagtcggccatcctgcggccgtcgttgcgggcctcggattcgggcgcggaagacgaagtcgccagcgccggcgcgcgaggccgcgcgggcgccgcgccgcgccgcccgtctcggttcaagctagaggccatggcggcggccgcggcatcggacgccgcccgggcccgcgagagctcgtgggacttcgcgcagtcgctgttggacacgtacgagctcgtcgccgtggcgcggaggctcgagtccgtcctcgacgtcgccggccacgacgccgccgccgccgcgccgcaggagggcggcgcgccttttttagaaatttgggggggggagaaagaaaaaaaataa

SEQ ID NO: 128400 - DNA, 307 bp, Zea Mays
gaatccagctagcaagttattggcatcaagaagaaaattgattactcaatgcagctcaatgcttctagaattaaagtccttcaagctcaggatgatttggtaacagatatgttgaagtcagcaagcaaagagctactgcgcataagtagagatcacctcacttacaagaagcttctcaagacacttattgttcagagtttgctgcgcctgaaagaaccagctgtgcttctgcgctgcaggaaggaggatctccaacttgttgatttagttttggagtctgcaaggaatgagtatgcaaataaagcaa

SEQ ID NO: 128401 - DNA, 762 bp, Zea Mays
cgcggaaacctggcggcctgttcttccccttgccctctcgaatctcgagttctgtccctgcccctggcatcctcgctaccgcggccttcctccccctccctccccctcccctgatcgcatccaccctgaaaccctagcggcctagcccccggtcatggcgcggcggtcgacccctctcctacgccgcctcctcgccccatcgccttccccctccgcctccactcccctcgccggcgccgtgtcccgccgcaccgtcacctacatgcctcgcccgggggacggcgccccgcgcggcgtcactctcatcccgggcgacggcatcgggcccctcgtcacgggcgccgtgcggcaggtgatggaggcgatgcacgcgccggtctacttcgagacatacgaggtccgcggcgacatgcccacggtccccgccgaggtcatcgagtccatccgccgcaacaaggtctgcctcaagggcggcctcgccacccccgtcggcggcggtgtctcctccctcaacatgcagctccggaaggagctcgacctctacgccgcgctcgtcaactgcttcaacctccctggtctgcctaccaggcacgacaacgtggacatcgtcgtcattcgggagaacactgagggcgagtactcagggctcgagcatgaggtagttcctggcgtagtcgagagtctcaaggtatggaaaattccatgtattgctctacctttgttgatgtaatgtgtgacacgctggcagctgatacgtgcata

SEQ ID NO: 128402 - DNA, 542 bp, Zea Mays
cacactatcatttactccatgtgcacaattcatatgtaacagataatattagtacgatgagattgaagaaaattacaacaacatattgttccataacagattgtaacataaattattcttatcataaatgataacattcgttgttattaaatctaaactatcttctgcactatgttaaaattcgattgcccaacaaaatctattgcttccttttctagctatccatctttcgatacatataactaatagacacagttatagataatactacttcacactttcatttacatttaacaattaccattatcttcttgccagttctttatgaataatttttacatatacaacatgatgcaatacttgacgacaagggaaaaggttcaacaactacaattgattctccacccaaaatgttatactctgctacacaatatcttacatgtattttttctatctattataaaagcatcattccatttttctttggtaattattgctactacagaagtgaatttatccaaaactatatttctttcacacat

SEQ ID NO: 128403 - DNA, 865 bp, Zea Mays
cacacaaaccctaatgaacctagcgccgcttcctccctcccaaacccatggcttcccaccttgacttccgctgcctggatgagggcctcggcggcgaacgcggcaagcgcaagcgccgcgaggatgcctcggcggcggccgcggactccatggacctcgatgctgacgccccccggccgtctaagctccgcgccatgccttccctctccgacccctcgaagccggcctccttcggccagcccacctacgacggcgtcatcgcagggcggttgtcggggcgccggtggaaggagccccgcacccggcggtcgtcggccgtggcggtgtcgcggaagccgatcccgctggaacagcgcgtccgggagaagtctctgaagcgcgcgtaccaggcccgcaaggcggagctcaaggaggagatccggcagaacaaggttgcgaagcggaaggcccgcgaggagcgggagaagcggaagcaggagaacgtgctccgcacgggcaccaagctgcagcgggtcaccaacccgaagacgatccagaagatcgccaagtccaagaagcgcaagcagctcaaggtcgtccccgacgagttcttcggcggcaagaagtcggaggccagccggcgcatgcaggtgcctggacttgagaattgaatctcaattctcaatctctgtttctggggtcgcgttgagttcatagtggttaattcgacgacgattttctacttgcttatggtagtttgaagtatgatcagattaagtgattacaatggtacgcaagttatcaagttctgatatgagatttttactgccgtgtacccaattttgcttgtattccgggctctccatataaagttttctatgcatct

SEQ ID NO: 128404 - DNA, 2007 bp, Zea Mays
ggcccgaggcgcccacccatcgagcggctggcgattgcgcccgccggcttatcccccgccctctcctctcgctgcgcttcccttctagataagcagcgcaaacccctactctctcgcctctccctatccatccccaaataatccccacctcccgctcatcctccgcctccgccgcccgccatggcctccctcacctcggcctccacctcactcctcttcccgcaggcctcctcatccaggagccgcgtccggctctccacctccctgggcttctccgcgcagccggcgcggctgcggagccgggcggcggcaggagggcagcggcgcgggagcctgctggtggtgcgcgcggcgaggggaaagttcgagcgcaccaagccgcacgtaaacatcggcaccatcggtcacgtcgaccacggcaagaccaccctcaccgccgcgctcaccatggtgctcgcctccgtcggcggcagcgcgcccaagaagtacgacgagatcgatgccgcccccgaggagcgtgcccgcggtatcaccatcaacaccgccaccgtcgagtacgagaccgagacccgccactacgcgcacgtcgactgccccggccacgccgactatgtcaagaacatgatcaccggcgctgcgcagatggacggcgccatcctcgtcgtctctggcgccgacggtcccatgccgcagaccaaagagcacattctcctcgccaagcaggtcggcgttcccaagatcgttgtcttcctcaacaagaaggacatggtcgacgacgaggagctgctcgagctcgtcgagctggaagtccgcgagctgctcagcaactatgagtacgacggcgacgaggtgccaatcgtcgctggctccgccctcaaggcgctcgaggccctcatgggcaaccctaccctgaagcgcggcgacgatgagtgggtggactgcatcttcaagctggttgattctgtggattcctacattccagtgccacagcggcagaccgacctcccgttcttactcgctgttgaagatgtcttctccatcaccggtcgtggtacagttgccactggccgtatcgagcgtggcaccgtcaagattggtgacacagtcgatatcgttggaatccgggacacccggaactgcaccgtgactggcgttgagatgttccagaagaccatggacgatgccatggctggagacaatgtcggactgctgctccgtggtatgcagaaggatgacattgagagaggcatggtgctggcaaagcccggctctatcacaccgcacaccaagtttgaggctgttgtgtatgtgcttaagaaggaagagggtggccggcactcacctttcttccctggttaccgcccgcagttctacatgaggacaaccgatgtgacagggaatgtgactgtgattatgaatgacaaagatgaggaggcgaagatgtgcatgcctggtgaccgtatcaagatggttgttcagctcatccagcctgttgcttgtgagcagggtatgaggtttgctatccgtgagggtggtaagactgttggtgctggtgtcatcaacaaaatcattgagtaaactggatatatcacatccaccacgagaattttccttgtttactcaaagcgaaatgctctgtagttgttattatgtgttgagttttaggggttgttcatgtgaaattgtagtatgacactctttcgccaagtgaatttgcataatttatgacattcacgacaaagatacacttatctggttgcaactgatttggctaagaggtaccatctactgttacatgtccaattgtttcttggttctgttaccctataatagtgttgatacgcttaaaatgaagcttgatgatgccacagacacatgaatgtagtctatctgcaccttttagactttagagtatataagcagcactataacatatacaatcttgcttgctggactttcttagcaaacctatcttgattcatttatattgcttttgtgatacgaatc

SEQ ID NO: 128405 - DNA, 615 bp, Zea Mays
ttgatacagggattcacaacatatgctgagaggaggattgttgaggttgtgcaaggggaggagcgggcaaccttaaacatggggattggatggagggggttgaacaggatgatggagaggtttaaggataacatggagttcaccaagttgaagccgaagatggcagggattgaccctgatgatgtttactctgaagtgccctatgagaaaggtttccagttcctttggagaattgagcgtgagattggcagacctgctttcgacgagtttttaaagaagtacattgcaaccttcaagttccaatcaatagatacagagacatttcttgaattcctcaaaaccaatgtacctgggatagaaaacaaaattgaccttcacctgtgggttgaggggactggtatccctcctgatgccatggaaccagattcagctacttacaaaaagatctgctccttagctgcagaattcaaatctggaaaacttccaagtgaagatgaggtggcaaagtggagtgggcaagaatgggaactttacatagaaaatctaccagcagatgttgaagcctcacaggtatgggctcttatcaaataccaatgttatctctcatttattggt

SEQ ID NO: 128406 - DNA, 2034 bp, Zea Mays
acagcaccgcgcccgccttttcaccccgctcgatcgatcggcacccgcgcatcgcgtcggcattctctccagccgctactccctccctgcctctccacgatctcgcgaaccctgctagatccttgactcgccatgtccaacccctggggcggcatcgttggtgccggcgcgtgggcgctggacgcggagcgcgctgaggaggaggagcgcgacgcagccgcggcccccgtccccgcccccgcccccgccgcgggcttccccagcctccgcgaggccacagcgggcgccgccggcaagtccaagaagaagaacaaaggaacaacgctctcgctctcggagttcgccgggttcggcccggggcggcggcaagcgccggcgccgccggagcccaggggcctcaccacggcggagatgatgatgctgcccacggcccccagggagcggtccgcggacgagctcgaccggccccgcggcctgggcggcggcttccgctcctacggctccggagaccgtggcggcgggtttgacgacgacggccgccgggggccgcccggcaggggctcggatctcgacatgccctcccgcgccgacgaggaccgcgactggtccatgagcaagaagtcgttcacgccctctcccgccgactccggctcgcggagccggtacggtggcctcgggagtggcgcgcccgcgtccgtcggccgcgctgacgacgatggcgactggtcgcgcgggaagaagccgctgccatcaggcccgtcgcgctacccgagcctcggctccgcgggcggcggcttccgcgactcgcccgtctcgaccgactcctccgaccgctggtcccgtgccgcgccgagcaatgacgagcgtgagaggcctcgcatcgtgcttgatccgcccaaacgtgacgcctcggccacccctacccctcctgctgaggcaggacgcagccggccgagcccatttggagccgcgaggccacgggaggacgtgctggccgataaggggctggactggaaaaagatggaaactgagattgatcagaagaggactagccgacccactagctcgcagtcgagtaggacagagagtgctcaaccatcacgtcctgggagccccgggtcacagatatcagccaccggtagtgaagccgcacccacggcgcggccgaaggttaatccttttggtgaagcaaagccaagggaggtgattctgcaagagaaagggaaggactggaggaagattgaccaagagctggagcatcgccagattgatagaccaaagacaaatgaagagaacgtgttgaaagaagagattaacctacttaaggtggaactagacgaaagtgaaggcaagataagtgatgaggatgcaaaagccatgtctgagaaaataactcaaatggaagagcagctggaacttcttagaactgcgatggatgacaagatcagatttttgcaaagacctggttctggagcaggcagggttatagcatcgccacctactaattttgtagatgaaccccaaataaaagagtccatggaaaggccacgagcacacagcagcacagagcaatatacaaaaccaactgaagaaagatgggggtttcaggggagcagagatagaggctcttttggtggcaacagaatttcagagaggtcgtccgcaggacagaggtggtgagactataggggtcagatttttttttgccatcgtttcttcgaaactgcagaagaataagttatgttcctcttgctacttgactcccattttgtttggcttggaagaatggagagcatcgtgggcaatacagattacattgcacgaacctgttaattaccacctttatatggtgtttttcttccatttcctctttttttgtgtgtgcgtaatttttcttttgccctcctcttccatgtcaaaacaggtgctttgagcctttcatacataggctagctattgctattgattcctgcataactatgctttaacattctttgccaatgttttgtttaaaaaggcggtagattagaccgt

SEQ ID NO: 128407 - DNA, 511 bp, Zea Mays
aatcgtttggaaatctctcccctgcaggtggacggaccagcaacgcgcgcaggctgcaagggaagggctgggataccggctcgtcttcactggtcgcttggtcggagcattggtgctacttgacgctttgtttctaggcgcccaaaggatcggccctatgctccaagaaatgcaaccgcgttgatctcctccgcagaacgtttctgtagccaagggtagctctgcaaacgcttgggttttctgcgtcgtagccctaatcatgctgtccgctgtgcaagtgtacatgtatgttcgcagctgggtcttctcggctgcggacaggcggtgcgtagtagattggctttgttgtaggcttacgccatttttttgtgtatgcacatggcaaaaacaaacaaacaaaaatgtttatgcaccggagcagattctatttctactccactctcgtaaaatagttgactttataggattcaaattttgttctaaattaatggttattctcacctctcaatgc

SEQ ID NO: 128408 - DNA, 186 bp, Zea Mays
gaaggttttattggcatggtctaggagaaatggctagagttcagaagagtaaattagtccatggttactttctagataggtggcatggttgcctgcaagttttaaggaaatatctcaggggtcgggagtatgcagaaagagcagaagttacagctaaataggaggatagaggagctagacttaggg

SEQ ID NO: 128409 - DNA, 1452 bp, Zea Mays
atggacaccgcgctctgcgacgacctgctgcaggtggtgttcggccttctaccgccctccgctgcaccggccgtgtccctcgtctcccgccgctggctcgcactcctcagggccgcgacgtcgtccctcagcctccgcctgcctgcctcctcggcggcgaccctcgccgccctgctgtctcactaccccttcctcgccgccctgaccgtggtctccgctggtacgccggtccacgacgccgacgccgtgctgctcgctgtcgcggccgcgccggccgcttcccggctctccacgctgcggctcttgcccgattgggcggtctcccccgccgcgctgctcacggtctgccctgcactcgccggtctgacgtcgctccacctcaccgctgtccgccccctatctttccgctggctcaagctgttgccgcgcctcaagtcgttcgcccttgtcaactccgccgccaccgttgactccgcgggctcgagctcggatgacgccgacggcgaggccgaggacgtcgcagggacattgccgctggagaagctgtcactttgcggcatccgctccggcgaccgcgggcttgggtggctgtggcggcggtgcgggagcctcaagtggttgcagctgcgcgcctgcgacggtaccggggacgggcccgcgtcgctggccttcgcgggttgccttgctggcttgctcgcgcttgagcttcgtgcttgccgtgctgtcgccgaccgtgtactcctccttgcagccgaccattgccgcacgctaacgtccctcctggtctatgacggcggcggcagcgaggcccttcaccggttcatccagcagcgtgctgctggtctgcacaccttggaccttcgcctcccgcttgacctgcacaacgatcatctcctcgccattggagctgactcagttcacaatgctacacatggcctagcttcacttcgcctccagagctgcgtccttatcacaggggacggcctccggtccctggcacgcacagccgccggagccggcatagaagagctcgccttggtgagttgcgacgtggtggagcgggagcccgggttgctgacattcctcagtcagagcatgccgcggctccgtcgacttaacctgtcttacaatgagacactgaacgacaaggtgatcggcgccatgctttcatcctgccggaatctcatcgacatcaggctcagggggtgccggggcctgacgggaggctcgctcctctcgctgcttaggcactgtgggcagtcactggagatccttgacatctcccgctgtccgggcattgctgtaggtaacgttgagctctttgcccagcgcgccgctaggttgaatcatgtgatcatcgaggagagcgcgatgtcggaggaattgaaggcaatcgctcagaaaaaaggcatgaaggttggctcattgccgtgcgaaggaggaccattctga

SEQ ID NO: 128410 - DNA, 1249 bp, Zea Mays
accgtcccacgacccttgtgtgtgtgtgtgtgttttttggaccctcggcctccggccggtcttagaacccagttctttcatagtttcgttcttccgcgtttccacttattctttgaaggcagaggcagctatatcagtactcgagtgttctcgagtcctgctgcatcccagtttcccaacaagagcggcacggggatcctagagcagcagacattcgcgttgcaatggtgttctgcgcggatttcgctgccctccggccgtcgccggccgacgtccgtgtcgtcacgtccgacgggagcgccatccgtgcgcattgctccgttcttgtgagcgagcgaggctttcctgttcctttccgtgtgtcaattgatgcggaccgatcacccgacgctgataaggtttctcggtattcccgcgtgcgtaaattcgaccaaggccgcggcgtccccggtgctggagcggatgatcgagggcacgcgccgcgggtgggacgccggctgcaccgtccacgtcctcggcgcgcccgctgacgccgttgccgccttcctccgcttcctctactccagccccagggcggaggacgcggtgggcgcgcacggggcggcgctgctggcgctggcgcacgcgtaccgcgtcccgtggctgaagcggcgcgcggaggccgcggtggcggcgcgcctgaccgcggagcgcgcggtggacgcgctgaagctggccgcgctctgcgacgcgccgcggctgtacctggcgtgcgcgcgcctcgcgggcaaggacctggacgccgtggagcggtccgaggggtggcgtttcgcgggccgccacgacgccgcgctccagctgaacctgctccagctcgtccacgacgcccaccagagaaaggagaggtgggagagggagcgcgcgtcgcagcacgtgtacgggcagctcagcgacgccatggccttcctggaccgcatcttcgccggcgatggggagggatggtccgcgtgcgccagtgcagcctcgtcgcgcgaggacggcggcgtccgccgggggctcgagcagctcatgcgacacttggccgcgtgcggcggcaggaccaggaagcccgccgcctgcccgcgctgcaggcgcgcgctccagctcctccggctccacgcctcagtctgcgaccgcgccggcggcgagccttgcaacgttcccttgtgcaggtaaatgcagtgcagacggattaccacacatcaatgtcgtgtaaagaaaaagatccctt

SEQ ID NO: 128411 - DNA, 1979 bp, Zea Mays
cagcgctccccaaagcagaaagaccgcgacccaaagcaagctcaagccgctccgctcctccagtctccagtctccaccgcccgccaaccccgagatatacctcccttcctctcgaagcttcgtctgcagacgaagtcgccggctcttccctcggcgctggtgccggtgggttgcctgtggcggtgggtgggtggccgggtggtggtgttgctgggatgcccgccgcgacggcgaccgcagcccgcctccgcgtgccgctgccaaaagccgcccaccactcgccctgctcgagccggcgccaccccgactgccgccgccgctgacgagacgagcggccacacgcttggcgcgcgccatggatgccttgtcccgccctgctgtcgtcatcgacaacggcaccgggtacacgaagatggggttcgcggggaacgtggagccctgcttcatcacccccactgtcgtcgccgtcaacgattccttctccggctccgcccagccggcggtgaggggcacccccgccagggggaactggctcgctcagcacagcgccggcgtcatggctgacctcgacttctacatcggcgacgaagcgctggcccgatcccgcgccagcagctcgcatagtttgagctatcccatccgcaacggccaggtggagaattgggataccatggagaggttctggcaacagtgcatcttcaattacctccggtgcgacccagaagatcattattttcttctaactgagagccctctgactgcccccgagacccgggagtacaccggagagatcatgttcgagacgttcaatgtgcctggcctctatattgcagtccaacctgtccttgcgctggctgctgggtacactacaaccaagtgtgaaatgacaggtgttgtagttgatgtgggtgatggggctacccatatcgttccggttgctgatggttatgtcattgggagcagtatcagatctattccaattacaggcaaggatgttacccagtttattcatcaacttctaaaggaaagaggtgagaacattccagcagaagaatcttttgatgtagcaagaaggattaaagaaatgtactgctatacttcttcggacattgtgaaggaattcaataaacatgacaaggagccatcaaagtacattaaacactggacgggcaccaaaccgaagactggtgcaaaatacacatgtgacattggatatgagcgattcctagggcctgagatcttcttcaacccagagatatataacaacgacttcaccactcctttgcaagttgttattgacaagtgcatccaatcatctccaatcgacacaaggagggctctttataagaatattgtcctgtctggaggctcgactatgttcaaagatttccataggaggttacagcgggacctaaagaagatagtggatgcacgggtccgtgcatctaatagccggcttattagtggggatgctaaggcccagcctatagaagtgaacgtggtcagtcatccgatccagagatatgcggtatggtttggtggctctgtgcttgcttcaaccgccgaattctacgaggcttgccacacaaaggcagagtacgaggagtacggtgccagcatctgccgaacgaatcctgtcttcaaagggatgtactgactcagagcggttccctgtggctgacgtcgtggatgatatccactcaaagcttaaatggggagaagtgacagtggtcgtggagacaggactgtcgagagggatcctgatcgtggggaagcatagccgtacgagctgtacaaaagagaagcgcaaatagataggtttatgtttcaccatacaatttagatgctggtaggcctgacaggatgggtttgccacccctgctgaattgggtggcattgtaatttgtagcgtcaacacttctggcggtgcgagattgctccttgtatacatgttgattcggcagcgatgttttctctct

SEQ ID NO: 128412 - DNA, 498 bp, Zea Mays
atgatcaagctgagctactccaagaggctcttcaagaggatctcctccacgtccaataagcagcaggcggccgcttccggcggcggcggtgacaatggcagcgcggccgcggccggcggaggaggcgcccgggagatcgagtgggaggtgcggccgggagggatgctggtgcagaagagggacgggaggggcggccgggagacggtcgccgtcagggtttccaccggcttctcctggcatgatgtgtccatcggagccacctccacttttggggagctgaaggtgatgctgtccatggtaacagggctagagccacgggagcagaggctgctgttcaggggcaaagagaggaacgacaccgaccacctccacatggttggggtgagggacaaggacaaggtcctcctactagaggacccggccctcaaggacatgaagctccgggctctgtcggctcgagtcgtgccgaggccgtgccagtcttttatccaagtgtaa

SEQ ID NO: 128413 - DNA, 217 bp, Zea Mays
ttttcaatcagccgcgccgacctccacttcaaacttagaccggcggtggacgcgtgccttcctgtcctcgcgttcggatcgacgtcgctcagtgtctcacgccatcgtgccgtctcagccatccccagctcttcctcgtttgtaccgtgtgtcgcagcaagctcgtcgtcggcccaggcgctcgcctcctcgccatcgctttacggattcggcgtcg

SEQ ID NO: 128414 - DNA, 386 bp, Zea Mays
taagtagtaacagtacactattatatactgaaatctttatccagttcaggcatggtcggaatgttcaaacggcagagagcaaaatcgaccatgaccaccgcgcgcacatggctgcaacatcacagcacatggttacaccaccacttccaagtcccaaccacacaacacatcacaattcatgttgcagtcccacactgcccgacttctacagtactactacagctgtgtcgctctatgtttttataggctgtggatcgtcaaaaatccacgcagaaacgcctgacccacatggtttctccatgacttccagcaaaaaaaagggggggcagacccacatgcttttcacaaggtccgcaagtcggctgcaccatgcttcttggaggtct

SEQ ID NO: 128415 - DNA, 3462 bp, Zea Mays
atgggtgaccactctgactccgattcctcccccaagtcctcctcgtcctcgtcctccccctccgcccgccgccgttcctcgccgcagcgcagccgggcccacactgacgagaccggcagcagcgacggcgtcctcgtcgagcttcctactcaggaagcgcggagccccggggccgaccctgacagcggcgtcctcgtcaacatgcccgctgacgacgccaccagcggcgagaccttcgacgacgcccccgaagatctcgcggccgccggctcgctctccgcacgctcgctggacgagtccatagccgtcatcgacttccctgaggtttccagcaccagcgccgagctccgcaagtaccaggaagagaaggctgtatttgctcgggaggcagtggcactccggaggttgctacaggagatgttggggcaggaagcttcagttgcgttgcatggagaggacgctgacgagacactgttgcattcaatgctggacgactgctcgaggcttgtgcttgaacttaactcgatggcacgggccagggagcaagagattgagagcctacatgccagggctgcagaggcagaggtatcaagtgaggttgctcatgtatacctgggttcgtggagagaagggtctgagcaagctgttgggcggatgcttgcatcaattgatgctgtggttaggcaagatgatgccagctttgagggtgctgaccaggatgggatttctattctggaaaggaagacttcattgcttgtggagaggtacaggcaggcctcgatgggtattgaacagcttgagcaaattttagctgaggtgaagcctggtttcgcggccacagggcacggtgaccttgctaccactttaagtgttctttcagatgaattggttggtagcaagagaaatgaggtggatttactgcagaagatgaatgcttttgctgaagagaagaaggctattgctgatgaacttgaggaagtgaaagctgctaggaatgcagtgaatgctgaggcaagcaaagcaaaggcagagtttgagcagatggagcaaaagttatcaacgactaaggagaagctcagcatggctgttacgaagggcaagtcactggtgcaacaccgtgattccttgaagcaggccttggctgaaaagacgggtgagcttcagagttgcatgacagaattgcaaaagaagtctgatgccctgcaagcagctgagagcagggttgatgagctacagatttttttagatgaaaagacaagtgagcatgaaaagtgcttggatgagcttcgagacacatatagtgcatgggaagctgctaagaccagcatggagcaattaaatgaatcaaaaagtgccctgcatgcttccctttcactaaaggatggggtttttgaacgcattgaagatatcatgtcagaggcaacatttccagaagatcttctttccttggagatgacagataggttgggatggttagttgagcagaagaaaattgcagatatgatcttctcagagcatcagaaagttaaagaaatcttgagctctgttgacattccacattctgtcttaacctctgaacttgattcccagatcagttggcttgccagctcactgaaccaggccaaagatgatgcggtccggttgcgtgatgagtctgctgaaatgttggctaaaatggctgcacatgaatcaaagctggtgtcaatgcatgaggaaattgaccgtttgacaattattctactggaagagaaacaggaaaaggatattcttttaaatgaacattctgaattgatgtccctatacaaagctgctgttaataagttgtcccttgtctcatcacaaaataatgagttgctaaaggcatttgcggaattttttgatgtcacattggagggtagtcagtctatggatattgccaaattggtacagcagggcctcagaaatatccaacaaagaccaaaatcttctcctattgagagtggcagctttgagaagctacaagcactactgtataccctagaccaggaatcaacactatgtaagatgattcttgaagaagacatgattaacagatctgagaggactggtgaacttcaaagaatggctgaggagattattgttctgaaaaatgagaaggtatcactgcagaaggaggttgaacgggtggaggagagatcagcattgcttagagagaagctgtcaatggctgtaaagaagggcaagggtctggtacatgagcgtgaaggactcaagcaagctctcgacgagaagagatctcaaatagagaatttgaaacaagttttggaagggaagagctctgagatagagaagttaaaacatgctctggatgaaaataagtctgtaacagagaatgtgaagcaagttttggacgggaaaaacactgagattgaaaggcttaaacatgctctgggtgatagttgcgtggaaacagaaaacttaaaacaagcttttgctgagaaaacctctgaagcatataaaataaaacaagaactggatgcaaagaacatggatattgagaatctaagaggtgcgatagagtcaagagaatctgccatgacagatctcagagagcatgttgaacatctattgtcgtcgcaggttgcacgtttggaaaagttgcaagtagatattgttacccttaatgatgaaaaggtgaaattagaaagcatgttggaagaagccagagcttcctgggacactcttgctgattcaatatcaagccttactcttcctattgatcagccttttgaggggcctatggaaaagtttagccagattgcccaatacatccaggaatctcaagttgctaagagttctcttgaaaatgagctacagaaagcaaatgagcaaattaccttacatgctagcaggcattctgatgccctttccacaataaacatgttagaacatgagttgagtaaactaaaagatcatatttcttccatttctgaagaaaaacgtcaaatgcagttaaatacttctgctgtacaggaggagttggagaaaacaaacgaggaactggcaatcaatttcaggaaccttgaaagtgccaacaccaccattaattcactacaagatgcactatcacaggctagatcaaatatttttattcttgctgctgaaaagaatgaagctgaagctaaatatgaaacagaaataaatgctcttaatgctgagctaaccaaatgtttggaggagttggataaaactcatgggcacttacaaagtcattcaacagaatatcatggttaccttgagaagcttggcatgtttatgatggatgatagtctcttgtctctgatagctgaagaatatggaaagacattcaacagcttgagagatatgtgtcttatagtcaagagtatgcatgagcagctttctgtgaagagttttcagaatgattcaattgtggaggattctctgttctgtgcagtgaagtga

SEQ ID NO: 128416 - DNA, 728 bp, Zea Mays
cttcacatgagcatcagttgtctgttgaaagggtatgcatgctggagaaagaactcaaaatattacaggatgagtgcaacaaaatggaactaaatattcaagagtataaggaaagggagggtgcattgaaggcaagggagttagagttgctatcagttgagcacactcaaatttcagcagacagaggtttaactgacaatgcaatttcaaaagatcaaacggaagctcttgttgagaagataagtaagttaaatatgctgtcaggcgagtcaaatgtgcagagggaagaggctacaagtccgcttgacaaactttttgttgtcattgatgaattcagtgcacttcaacacgaggttgagaccttaagatatgaaaatgaagatttacagttaaatattgaatcctatacccgtgaaattgaacagctaagagaggtctccagaaatagtgatctaactaatagggagttggaatccaaaggaagtgagcttcttgaggtagctgttagtatggagcgaatgattcagcggttaggatatcttggaggaaaagatgtactagaagataacaaacctgctagcacacaagctctcttatcgaagctggaaaagctaataatagcttcaagtactgaatctgggaattctaaatccataatacaggagctgggagcaaagctgcagtcaagggaaaaggcagttgatgagctatcaacaaaagtaaagatg

SEQ ID NO: 128417 - DNA, 1007 bp, Zea Mays
gaacgattgattgctgcacaagattcagatgacaaggggcgtataaaatcgctccatacatctggcttcattccagctcagggaaagcacatcgctgatagggtcgatgccttctgggtctcggggagccaaattctgatgaaccggccacgagcaaggctagggcttatgttgtactggctggctgtgcacctatggttgatgggcagcatcttgtgacaccgcttctcaataccgagacccatctcataattgtacaatagcacgtattagcagtttcttcttccattcatacaatacatggtagatgttagaaataccatttttttcattgtcttcctcctgctgagatttgcacttgagcagtatgtgttgaatttttgcacacaagatgtaacgcgcagaaaaaataacgttgtcattctttggtatagtgaagaggtggtaattgtatttgtagatgtggtggccctgatcacctggtgggccccatcatcgtaaattcgttgtttgaaattgcgtgcgtttgaggtctgacaatgtagaggccttatgggtcgacctttgacgtatgaatagaaacgtatatagttggttacacttttcgctcctccatgaataattttcgattggaggtgactggttatacagtcacaaatctttcctccaaaaaacataaataaaggagtgaatatgtatttgttatcatgaatctgtgtagtttcataagggataaggcataaatcttcatggcatcatttgtgtttttccacacaatttgtaatgcaaaagaatgtagggtgtttcaaccaaacaacaagaaacaaaaaagatttaaatacatccttaacatactaacatttttacggtggggctgctcatttaaactggactggaaacaaaataacaccgtaaaaatgttggcttttgacaaatctgacactgaatacgccaaagaccacagttgttaccaaaagaaatgcagagttccaatctctcactctcac

SEQ ID NO: 128418 - DNA, 381 bp, Zea Mays
gttgctgacaatgggacttgcaaagttcactactgataataacacccatgtttcgacaagagtaatgggcacctttgggtatttggcacctgagtatgcagcatctggcaagctcacagaaaaatccgatgtattttctttcggagtcatgcttcttgagcttattactgggcggcgaccaattgacacagcccaattggcactgcttgctataagcacatatgtacttccatttgcatgttgtataatactaataccaattgcaaaattatagttattttttctacccttgttagttaattagcatatttctggtcaataggttgtattcttattcttgtaaccgtgttaattaatgttttggacttgtagtcttgtatt

SEQ ID NO: 128419 - DNA, 1816 bp, Zea Mays
gagccggttgaagtagaaactaccgaaacgagtctagcaaacaaacagcagcctgagcacccgaggagactccgtgcgaccgaagccagagccagcggaaccgaacggaagcgagacccccggcggctagcgagatggacggcggcgccggcgaggaggggaagcaggagcggcacctggtgctggcccacaagctcttccttctatcccacccctccgttgatgacctctccaaggtcgccctccgcgccgaagtcctcgacaccgtgaaatccgatgatatggcgacgctgtttgagtcgctggtcgccgcgggtgtgctggagggggacgccgcgctgctggccgagatgcgtgggaggattgacgaggagatccgcaagctagatgagaaaattgctgatgcggaggagaacttgggtgagagcgaagtccgtgaagcacatcttgccaaatctttgtactttataagggtcggtgagaaggaaaaggccctggaacagcttaaagtcactgaaggaaaaactgtagctgttggccaaaagatggatcttgtgttccacactttgcagattggttttttctacatggattttgatctgatatcaaaatccatcgataaggcaaagaacttgtttgaggaaggaggcgattgggagaggaagaacaggttgaaagtatatgaaggcttgtactgcatggcaaccagaaacttcaagaaagctgccagcttatttttagactcgatttcgactttcacaacttatgagatattcccatatgatacgttcatcttctatacagtcctcacaagtgtcatcacattggatcgtgtatctctgaaacaaaaggtggtagatgcaccagaaatcctggctgtaattggcaaagtacctcacctctccgagtttctcaactccctgtacaactgccagtataagtcgttcttcgttgcattttctggtctgacagagcaaatcaagttagaccgttatcttcagcctcatttccgctactacatgagggaagtgcgcaccgtggtatactcacagttcttagagtcatacaagagtgtgacaatggaagcaatggccactgcgttcggtgtaactgttgatttcattgaccagtacgtgattctgttgttgcaattcccaatgaacgataatttggttttctcatactgtgttgtattcataaagtcttccttccacctgttgcagggaactgtcacggttcattgcagctgggaagctgcactgcaagattgataaggttgctggtgttctggagactaaccgacctgatgagaggaatgctttctaccaggcgaccatcaagcaaggggacttcttgctgaaccgcatccagaagctttcacgggtcattgacctgtaaggactgtttgtgttggagctattcctgcaatcggcgcctgcaaatgtttcccaccctacgtcttccacaagacatctctccttgagtggggattggggaacaagccctaagaacatctgtgttttaagtgcagaatatttgtgttttaatcagtaaacgctgtcctgtcatttcgagtttcctatctgtggctctgtctgtgattttcttccttaagttgttagcttgacaatctggtgcccttttgacctacatacataatgagctctgatacgcggcccgtaaaagagagttcagttgaaaatggaattcgtattcgcactgtacagccacattcactttcaaccttccaagaaaccaaatcaatacacggttgtacactttactccatccattttatttacgccccgtttggatc

SEQ ID NO: 128420 - DNA, 1818 bp, Zea Mays
gagccggttgaagtagaaactaccgaaacgagtctagcaaacaaacagcagcctgagcacccgaggagactccgtgcgaccgaagccagagccagcggaaccgaacggaagcgagacccccggcggctagcgagatggacggcggcgccggcgaggaggggaagcaggagcggcacctggtgctggcccacaagctcttccttctatcccacccctccgttgatgacctctccaaggtcgccctccgcgccgaagtcctcgacaccgtgaaatccgatgatatggcgacgctgtttgagtcgctggtcgccgcgggtgtgctggagggggacgccgcgctgctggccgagatgcgtgggaggattgacgaggagatccgcaagctagatgagaaaattgctgatgcggaggagaacttgggtgagagcgaagtccgtgaagcacatcttgccaaatctttgtactttataagggtcggtgagaaggaaaaggccctggaacagcttaaagtcactgaaggaaaaactgtagctgttggccaaaagatggatcttgtgttccacactttgcagattggttttttctacatggattttgatctgatatcaaaatccatcgataaggcaaagaacttgtttgaggaaggaggcgattgggagaggaagaacaggttgaaagtatatgaaggcttgtactgcatggcaaccagaaacttcaagaaagctgccagcttatttttagactcgatttcgactttcacaacttatgagatattcccatatgatacgttcatcttctatacagtcctcacaagtgtcatcacattggatcgtgtatctctgaaacaaaaggtggtagatgcaccagaaatcctggctgtaattggcaaagtacctcacctctccgagtttctcaactccctgtacaactgccagtataagtcgttcttcgttgcattttctggtctgacagagcaaatcaagttagaccgttatcttcagcctcatttccgctactacatgagggaagtgcgcaccgtggtatactcacagttcttagagtcatacaagagtgtgacaatggaagcaatggccactgcgttcggtgtaactgttgatttcattgaccaggaactgtcacggttcattgcagctgggaagctgcactgcaagattgataaggttgctggtgttctggagactaaccgacctgatgagaggaatgctttctaccaggcgaccatcaagcaaggggacttcttgctgaaccgcatccagaagctttcacgggtcattgacctgtaaggactgtttgtgttggagctattcctgcaatcggcgcctgcaaatgtttcccaccctacgtcttccacaagacatctctccttgagtggggattggggaacaagccctaagaacatctgtgttttaagtgcagaatatttgtgttttaatcagtaaacgctgtcctgtcatttcgagtttcctatctgtggctctgtctgtgattttcttccttaagttgttagcttgacaatctggtgcccttttgacctacatacataatgagctctgatacgcggcccgtaaaagagagttcagttgaaaatggaattcgtattcgcactgtacagccacattcactttcaaccttccaagaaaccaaatcaatacacggttgtacactttactccatccattttatttacgccccgtttggatcattggaattgaattccattttaataatagtaattttgacatatatcaattaagttaatttggtttttatgtaaaatatatttgtatactattattg

SEQ ID NO: 128421 - DNA, 1956 bp, Zea Mays
catgcccttacaaatccctctcccccccctccctccgtaaatcgcgaagtcaaatctcacctcaccagtggctgccttctccgctccgcgctgcgcctcccccaaagcttcagtggctgctgcgacccttctgttctccgctcttggtcttgggtgatcgccggcggtacttgtagcgggcctttgtaggtatttatctgagggaagaagaaactatacaattcatcatgtcaggagggtcgtctgaatcttccccgttatctggacaaaatagccttagttctctatcaatttccaaggacaatgaactatcttcagagtctggctgcttgtccattgttgtactaggcgcttctggagaccttgctaagaagaaaactttcccagcgctctttcaccttttccagcagggatttctgcaatctggagaagtccatatatttgggtacgcaagatcaaatctttctgatgatggattaagagaacgcattcgtggatacctcaagggagcttcagatgaacatctttctcagtttttgcagttagtaaaatatgttagtggctcctatgatagggtggaaggatttgagttattaaataaggcaatctctgagtatgaaacttcaaaaaacaatgactcgggaagctaccgcagattattttatttggcattgcctccatcagtctacccatcagtatgcaaaatgataagatcatattgcatgagtccatcttcacacaccggttggacaagggttattgttgaaaagccctttggaaaggatttgaacactgcagaggaactgagtgctgaacttgggcagctgtttcaagaagaacaactctatagaattgaccactatttaggaaaagagcttgtccaaaacctgcttgtgcttcgttttgcaaaccgcttatttttgcctctctggaaccgtgataacatagctaacgtacagatcgtatttaaggaggactttggaactgaaggacgtggaggatattttgatcaatatggtatcattcgtgatatcattcagaaccacttgttgcaggtcttctgtttggtggctatggaaaagcctgtctctcttaaacccgagcacattagagatgaaaaagtcaaggttctgcaatcggtggagcctataaagcatgaagaggtagtcatcggacaatatgatggctacaaggatgaccctactgtgccagatgactccaacacccctacttttgcatctgttgtactgagggtacacaacgaaagatgggagggggttccattcatcctcaaggctggcaaagcactaaattcgaggaaagcagagatacgtgtacagttcaaggatgctcctggtgacatttttagatgcaagaaacaaggcaggaatgagtttgtcatacgcctgcagccatcagaagccatgtacatgaaactaacggtcaaaaaacccggactggaaatggcaaccgaacaaagcgaactggatctatcgtatgggatgcggtacaatggcgtcaaaatcccagaagcatacgagcgtctcatcttggatacgataagaggagaccagcagcacttcgttcgccgagatgagctgagggccgcatgggaaatcttcactcctttgcttcacgacatcgatggtggcaagctcaggtccgttccgtacaagccgggaacccgaggaccgcaggaagccgacgagttgagcaggaggatggggtatgtgcagacccatgggtatgtatgggttccgccgaccctttctaaggtttagctgtttgattatcagctgccgtgtaaccacagaatgacagaaagcggggaagatccctttgtaatacgtgggtcgtgtaataagagaaacttctgcttgttgtttgagtgaccctttacggtattggaataaaaaaagaatgtgatgttattatctcactgttgtttttagtttc

SEQ ID NO: 128422 - DNA, 1947 bp, Zea Mays
catgcccttacaaatccctctcccccccctccctccgtaaatcgcgaagtcaaatctcacctcaccagtggctgccttctccgctccgcgctgcgcctcccccaaagcttcagtggctgctgcgacccttctgttctccgctcttggtcttgggtgatcgccggcggtacttgtagcggggtatttatctgagggaagaagaaactatacaattcatcatgtcaggagggtcgtctgaatcttccccgttatctggacaaaatagccttagttctctatcaatttccaaggacaatgaactatcttcagagtctggctgcttgtccattgttgtactaggcgcttctggagaccttgctaagaagaaaactttcccagcgctctttcaccttttccagcagggatttctgcaatctggagaagtccatatatttgggtacgcaagatcaaatctttctgatgatggattaagagaacgcattcgtggatacctcaagggagcttcagatgaacatctttctcagtttttgcagttagtaaaatatgttagtggctcctatgatagggtggaaggatttgagttattaaataaggcaatctctgagtatgaaacttcaaaaaacaatgactcgggaagctaccgcagattattttatttggcattgcctccatcagtctacccatcagtatgcaaaatgataagatcatattgcatgagtccatcttcacacaccggttggacaagggttattgttgaaaagccctttggaaaggatttgaacactgcagaggaactgagtgctgaacttgggcagctgtttcaagaagaacaactctatagaattgaccactatttaggaaaagagcttgtccaaaacctgcttgtgcttcgttttgcaaaccgcttatttttgcctctctggaaccgtgataacatagctaacgtacagatcgtatttaaggaggactttggaactgaaggacgtggaggatattttgatcaatatggtatcattcgtgatatcattcagaaccacttgttgcaggtcttctgtttggtggctatggaaaagcctgtctctcttaaacccgagcacattagagatgaaaaagtcaaggttctgcaatcggtggagcctataaagcatgaagaggtagtcatcggacaatatgatggctacaaggatgaccctactgtgccagatgactccaacacccctacttttgcatctgttgtactgagggtacacaacgaaagatgggagggggttccattcatcctcaaggctggcaaagcactaaattcgaggaaagcagagatacgtgtacagttcaaggatgctcctggtgacatttttagatgcaagaaacaaggcaggaatgagtttgtcatacgcctgcagccatcagaagccatgtacatgaaactaacggtcaaaaaacccggactggaaatggcaaccgaacaaagcgaactggatctatcgtatgggatgcggtacaatggcgtcaaaatcccagaagcatacgagcgtctcatcttggatacgataagaggagaccagcagcacttcgttcgccgagatgagctgagggccgcatgggaaatcttcactcctttgcttcacgacatcgatggtggcaagctcaggtccgttccgtacaagccgggaacccgaggaccgcaggaagccgacgagttgagcaggaggatggggtatgtgcagacccatgggtatgtatgggttccgccgaccctttctaaggtttagctgtttgattatcagctgccgtgtaaccacagaatgacagaaagcggggaagatccctttgtaatacgtgggtcgtgtaataagagaaacttctgcttgttgtttgagtgaccctttacggtattggaataaaaaaagaatgtgatgttattatctcactgttgtttttagtttc

SEQ ID NO: 128423 - DNA, 575 bp, Zea Mays
cctatcctagtcctagcgctaaatttgtttccagcacattcagttctctgaaacttgctggatgaagcaattcttccccagtcatggtagtatatattcacacccctgactatgttttcacaggataagaggagaccagcagcacttcgttcgccgagatgagctgagggtttgtgactggccatgcatttcctttgcagtggcttccttgtgaatttgcttattctgacaatgtgtctgttggtctcaggccgcatgggaaatcttcactcctttgcttcacgacatcgatggtggcaagctcaggtccgttccgtacaagccgggaacccgaggaccgcaggaagccgacgagttgagcaggaggatggggtatgtgcagacccatgggtatgtatgggttccgccgaccctttctaaggtttagctgtttgattatcagctgccgtgtaaccacagaatgacagaaagcggggaagatccctttgtaatacgtgggtcgtgtaataagagaaacttctgcttgttgtttgagtgaccctttacggtattggaataaaaaaagaatgtgatgt

SEQ ID NO: 128424 - DNA, 2014 bp, Zea Mays
gcagacccgccaccgcataacaggacttctctcccacttccggtgggcccgaaaccagcaacggtccagggtttccaaggtccaacgttccgaccaatgggaagcttctcgaaaccatcgaccgccccggtcgcgtttctcctccgggccccacttgtcacccgcacgtcctcacgtttccgccccaccatttttgccgaaaccaggttccgcgacttcgggtgggcccagccagcagcagccgcagccgcaaccgcagtcgcagccgcagccgccagtccccagtcccttttatatatggccccttcgatccattggccgcatcacactcgccaaccccgtcatcgatctcgtttcaaatccatccatcctcgtttcctccgtcccgcagcatctcaaccccatggccaagatcaagatcgggatcaatgggttcggcaggatcggaaggctggtggccagggtggctctgcagagtgacgatgtcgagctcgtcgccgtgaacgaccccttcatcagcaccgactacatgacctacatgttcaagtacgacactgtacacggacagtggaagcaccatgaagtcaaggtgaaggactccaaaacccttctctttggtgagaaggaggttgctgtgtttggctgcaggaaccctgaggagatcccgtggggttcggttggtgctgaatatgttgttgagtctactggtgttttcactgaccaggagaaggctgcagctcacttgaagggtggtgccaagaaggttgtcatctctgctcctagcaaggatgcccccatgtttgtcgttggtgtcaacgagaaggagtacaagtctgacattaacattgtctccaatgctagctgcacaaccaactgccttgctcctcttgctaaggtcatcaatgacaagttcggtatcgttgagggtctgatgaccactgtccatgccatcactgctacccagaagactgttgatgggccctcatctaaggactggaggggtggaagggctgctagtttcaacatcattcccagcagcactggagctgctaaggctgttggcaaagtgcttcctgtccttaacggaaagttgactggaatgtctttccgtgtcccaaccgtcgatgtttctgttgttgatttgactgttaggcttgaaaagtcagcaacctatgatgagatcaaggctgcggtcaaggccgaggcagaaggtagcctcaagggcatcctgggttacgttgaggaggaccttgtttccaccgatttccagggtgacagcaggtctagcatctttgatgctaaggctggcattgccttgaacggcaacttcgtgaagctcgtgtcctggtacgacaacgagtggggatacagcacccgcgtggtcgacctgatccgccacatgaacagcaccaactaagatgaagaactcaagtcaaggtctggtgatacgagcgagttgtcttcttcccccccgggagaaaagtgcttccgagaataaattttttccatcggaatgtctgaaactatgttgggtgtatcctagtggttggttgagcattaatggctcatattttgtcaggtctatgtgtcgccgtgaaacttttaatcaaatcagttcactcttttgcctctgtcattgccgtgccatttgacttcagagttccacgtcgttcactggctattctgctgccgtcgttcacaagcgccctcctgcacacgcggggggcctggcgcagggtttgcgcgggctgcttccggcagcagcaaccacaggcagctaatggctgaagctgcagccgcagccggtgatgatcagtgttttcaagtctgttgtccgaagtcggtttctgtagcccgattagggtttgtttgggtaatcttggattggagtggattaaggtagtataaggtgtattgaagtgtaatatgaactaatttccctttcaatccctaaaatacattttaatctacttcaatccctttttatccaaacaaggccttaggtgttctggtc

SEQ ID NO: 128425 - DNA, 1372 bp, Zea Mays
atggccccttcgatccattggccgcatcacactcgccaaccccgtcatcgatctcgtttcaaatccatccatcctcgtttcctccgtcccgcagcatctcaaccccatggccaagatcaagatcgggatcaatgggttcggcaggatcggaaggctggtggccagggtggctctgcagagtgacgatgtcgagctcgtcgccgtgaacgaccccttcatcagcaccgactacatgacctacatgttcaagtacgacactgtacacggacagtggaagcaccatgaagtcaaggtgaaggactccaaaacccttctctttggtgagaaggaggttgctgtgtttggctgcaggaaccctgaggagatcccgtggggttcggttggtgctgaatatgttgttgagtctactggtgttttcactgaccaggagaaggctgcagctcacttgaagggtggtgccaagaaggttgtcatctctgctcctagcaaggatgcccccatgtttgtcgttggtgtcaacgagaaggagtacaagtctgacattaacattgtctccaatgctagctgcacaaccaactgccttgctcctcttgctaaggtcatcaatgacaagttcggtatcgttgagggtctgatgaccactgtccatgccatcactgctacccagaagactgttgatgggccctcatctaaggactggaggggtggaagggctgctagtttcaacatcattcccagcagcactggagctgctaaggctgttggcaaagtgcttcctgtccttaacggaaagttgactggaatgtctttccgtgtcccaaccgtcgatgtttctgttgttgatttgactgttaggcttgaaaagtcagcaacctatgatgagatcaaggctgcggtcaaggccgaggcagaaggtagcctcaagggcatcctgggttacgttgaggaggaccttgtttccaccgatttccagggtgacagcaggtctagcatctttgatgctaaggctggcattgccttgaacggcaacttcgtgaagctcgtgtcctggtacgacaacgagtggggatacagcacccgcgtggtcgacctgatccgccacatgaacagcaccaactaagatgaagaactcaagtcaaggtctggtgatacgagcgagttgtcttcttcccccccgggagaaaagtgcttccgagaataaattttttccatcggaatgtctgaaactatgttgggtgtatcctagtggttggttgagcattaatggctcatattttgtcaggtctatgtgtcgccgtgaaacttttaatcaaatcagttcactcttttgcctctcaggacatattaagttccatgaaaaaaaacaaagaga

SEQ ID NO: 128426 - DNA, 240 bp, Zea Mays
atggctattgtccaacgtcttgggaaaccagattacttcatcacaatgacttgcaatccatactgggaggagattacaaacaatcttctacctggccagacaccacaagatagaccagagctggttacaagggtatatagggccaaattacgagacatgaaagatctattgatcaaaaaagcatattttggccaagttgcgggctatgtgcatgttaccgagtttcagaaaagggggttg

SEQ ID NO: 128427 - DNA, 1542 bp, Zea Mays
atgcctctgcgcggtctccggcgccgggggcgttgctgtgatgacgggaggaccctgctacgcctctctctccgcagatcgtcatcgtgcgccgcaccttcgagccaaagttccaacagcgccgcactcacggcggaggaagaggcggcggccgcacaaatcaagagctcgctcctcagggcgcgcaaggggagcgtcgaggacctggtacgggccctggcggcagagtgctccgaggtccggctgacgagcggcgtcgcggacagcctgctgcgcgggtgcggggactgctggaaacccgcgctgggtttcttcctttgggcgcagtcgcggggcggcggctactcgcacacaccgtacgcctgcagccggatggtcgacctgctcgggaagacgaggcagatcgaccggatgtgggatctgctgtccgaaatgcactgcagggggctcgtcacggtggacactgtcgccaagagcatcaggaggcttgccgctgcgaggaagtggagggatgccattctgttgtttgatcagctggaggacttgggactggagaggaacacggagaccatgaatgtgctgctggacgcgctctgcaaggagaagaaagtcgaactggcgcgcgaggtctttgtcatgctcagccctcatatcgcaccagatgcgtacactttcaacatcttcgtccatggttggtgcagcgtgcgcaggattgacgaggcgctgtggacgatcgaggagatgaaaaccagggggttccctcctatcgtcatcacatacacggctgttcttgaggcgtactgcaagcagcgcaacttcaggagggtctacgaagtccttgattccatgggttctcagggctgccatccgaatgtgatcacatacacgatgatcatgacctcactgacaaaatgcgaaaggtttgaagaagctctgagtgtctctgatagaatgaagtcctctggttgtaagcctgataccttgttctacaacgccctgatcaaccttctcggtagagcaggtcacttgtttgaagccaaccaagtgtttcgcgtggagatgccaaggaatggcgtgctccgcaacgtggccacctataacacgatgatatcaattctctgccaatatgggcgagatgatgacgcgctcggtgtactgaaagagatggaagcacaatcctgcaaacctgatcttcagacatatcagccacttcttagactgctgcttggtagaagagggcaagctgctgccgttcaccgtttgttgagtgagcttcgtgatagaaatggtctagggttagatcttgatacatatacccttctgatccatggtctctgcaaggtcggtgagaccgattgggcttatctactctatgatgagatggtaggcagtgaaattgtacctaggcctagaacatgcgagttacttttgagtgagatgcagagacaaaacatggaagcgtacgtggaaagaattcggaatgatgtaagtttctttggccttactcagtaacttcgatagcattgccttctcccatatgat

SEQ ID NO: 128428 - DNA, 2572 bp, Zea Mays
cataacgacatggcacctttgcaccacgctactgccctgcctactactagtactgtctctttgaaccactttggtggcctaatcccgggcccctctgatgatggcttatgagccccagctttgcgcttgcaggcactgcacggtctggttcttgttcctgagcagttgagctgcgcacaccgacttcttttgcacaaggtacagcagcgcaggcgcggcggcagcccgccgctggatctctcccgaggctccggcgatggagcggtcctgctacttcccgctgcggtgggagagcacgggcgaccagtggtggtacgcgtcgccgatagactgggcggcggccgacggccactacgacatcgtccgccagctgctgcacctcgaccccaacctgctcatcaagctcacctccctccgccggatccgccgcctcgaggcgctgtgggacgacgacgcccgcttcgccgacgcggcccggaaccgcgcgtccgtcgcccgcagcctgctgctggagtgcgagtgcaggaaccaccgccccggcgccggggagaacacgctgctccgggccgggtacggcggctgggtgctctacgcggcggcgtcggccggggacgccgcgttcgtgcgggagctgctggagagggacccgctgctcgtgttcggcgagggcgagtacggcgtcacggacatgttctacgcggcggccaggggcgggagcgcggacgtgttcaggctgctgctcgaccacgccatgtcgccgaggtgctcgacgagttgccggaacggcgaagccagcgccaggcgcagctccgtgttccggcttgagatgatgagccgggccgtccacgccgcggcgaggggcgggagcgtggagatgctcagggagctgctcgacgagtccagcgtgtcgacgtatctcgacatccgtggatccaccgtgctgcatgccgccgctgggagagggcagctgcaggttgtcaagtaccttgtggcctctttcgacataatcaattcgactgataatcacgggaacacagcgctgcatgtagcggcctaccgagggcaccaacctgtcgtggaagccttggttgctgcgtctccatcaaccttgtcagttgtcaacaacgccggtgacacgtttctccactcggcagttacaggattcaggaccccaggattccgacggctcgaccgccagttggagctgatgaggtacctcatacgcgagagaaccgcggatatccagaagatcatcaacctgagaaacgacgcgggccttacagctcttcacctggctgtggttggctgcgcacacccggatctcgtcgagctactgatggccaccccgtccatcgacctgaacgctgaagacgctaatggcatgaccgcgctggcgctgctgaagcagcagctgcgctcagcgacgtccgaccggctcatcaagcagatcgtctctgccggaggggtcttgaactccagcatcctgagaacccggtcagccatcgcttctcagatcaagatgcagggcgggatcgcgagcagccccggcaccactttcaaggtatcggatgcggagatattcctgttctccggcatgggagcggcggagtctctgaggccaagctcctgctccagcaacgggaaggatgatgaccctactcacgcagacgcagactgcgccgagaaccgtggatcgtcggagaagaggctgagctccgcgagccgggccaaagaccgcctcaagatgatgctgagatggcctcgccacaaggacaagacgcccaagaagtcagaggacagcagcccgctggggtcgatcagcaggctgaacgagcacggggccgagacccctgctccgctgaggcagaagtttaccaagacgacggcgctcaacggcaagcggaccctagcggtgaagagctccaccccgagctcctcatccaccaagaagaagctcaacacgaagctcatccacggcatcatggaggccatgccacagctggcgccatctacggcgcggtccgcgtccccgacggacactttcctgaggtcctcggtatcgtccacgccgcagccgctggcgaagctgaaggacatctgcctcgacgacgagatctccatggtgacgccgcccgccggcaggctgaaggatagtgacgacgccatggaggacccctcgtgctccaacaactcgtccatggacgacggctgtggcgccgggacggcagagagcgcggcccggaagcacgggtgcggcaacgggaggctcatcaacatctgctttggcgcgcagggcctcaccgtggaggactcggcgagcgggcagcagacgagcaagatgttcaagcagcagtgcctcagggtgtcctgattgacggcgtggtgtctcgactacaacagcgtggtgtgattggtttggtgtctcgcgtgcagctatgtgtgcttgtttgctttgctccttgcacagccagcggtgaactggtgatccaatgaacttgtgcttgtgttaactgtgacgttgacgaatccacagctctttaacttcctcagtgtcaggtcgtgcattcttcaa

SEQ ID NO: 128429 - DNA, 2934 bp, Zea Mays
cataacgacatggcacctttgcaccacgctactgccctgcctactactagtactgtctctttgaaccactttggtggcctaatcccgggcccctctgatgatggcttatgagccccagctttgcgcttgcaggcactgcacggtctggttcttgttcctgagcagttgagctgcgcacaccgacttcttttgcacaaggtattgtatttgtcttcggtgttgcagacgtgttcttcccacgcatgcttttaatctttttaaaatctccatttgcgtaagctcagtctgcagtttacaaatgctttgagtcctgcgctcctgtcctgctgttcttgtctagcagtaaacaagtcatttcctttgttgtcacatggtggctcgccgagtgctggtgcacacattctctcctcgttccaccttgctgctgctgctgcagttcttggcacggccttgtattgtatgaatatgattgtatcacatgccatgtgactatgtgagtagctgaccacggctcaccgcgaggcgcacaggtacagcagcgcaggcgcggcggcagcccgccgctggatctctcccgaggctccggcgatggagcggtcctgctacttcccgctgcggtgggagagcacgggcgaccagtggtggtacgcgtcgccgatagactgggcggcggccgacggccactacgacatcgtccgccagctgctgcacctcgaccccaacctgctcatcaagctcacctccctccgccggatccgccgcctcgaggcgctgtgggacgacgacgcccgcttcgccgacgcggcccggaaccgcgcgtccgtcgcccgcagcctgctgctggagtgcgagtgcaggaaccaccgccccggcgccggggagaacacgctgctccgggccgggtacggcggctgggtgctctacgcggcggcgtcggccggggacgccgcgttcgtgcgggagctgctggagagggacccgctgctcgtgttcggcgagggcgagtacggcgtcacggacatgttctacgcggcggccaggggcgggagcgcggacgtgttcaggctgctgctcgaccacgccatgtcgccgaggtgctcgacgagttgccggaacggcgaagccagcgccaggcgcagctccgtgttccggcttgagatgatgagccgggccgtccacgccgcggcgaggggcgggagcgtggagatgctcagggagctgctcgacgagtccagcgtgtcgacgtatctcgacatccgtggatccaccgtgctgcatgccgccgctgggagagggcagctgcaggttgtcaagtaccttgtggcctctttcgacataatcaattcgactgataatcacgggaacacagcgctgcatgtagcggcctaccgagggcaccaacctgtcgtggaagccttggttgctgcgtctccatcaaccttgtcagttgtcaacaacgccggtgacacgtttctccactcggcagttacaggattcaggaccccaggattccgacggctcgaccgccagttggagctgatgaggtacctcatacgcgagagaaccgcggatatccagaagatcatcaacctgagaaacgacgcgggccttacagctcttcacctggctgtggttggctgcgcacacccggatctcgtcgagctactgatggccaccccgtccatcgacctgaacgctgaagacgctaatggcatgaccgcgctggcgctgctgaagcagcagctgcgctcagcgacgtccgaccggctcatcaagcagatcgtctctgccggaggggtcttgaactccagcatcctgagaacccggtcagccatcgcttctcagatcaagatgcagggcgggatcgcgagcagccccggcaccactttcaaggtatcggatgcggagatattcctgttctccggcatgggagcggcggagtctctgaggccaagctcctgctccagcaacgggaaggatgatgaccctactcacgcagacgcagactgcgccgagaaccgtggatcgtcggagaagaggctgagctccgcgagccgggccaaagaccgcctcaagatgatgctgagatggcctcgccacaaggacaagacgcccaagaagtcagaggacagcagcccgctggggtcgatcagcaggctgaacgagcacggggccgagacccctgctccgctgaggcagaagtttaccaagacgacggcgctcaacggcaagcggaccctagcggtgaagagctccaccccgagctcctcatccaccaagaagaagctcaacacgaagctcatccacggcatcatggaggccatgccacagctggcgccatctacggcgcggtccgcgtccccgacggacactttcctgaggtcctcggtatcgtccacgccgcagccgctggcgaagctgaaggacatctgcctcgacgacgagatctccatggtgacgccgcccgccggcaggctgaaggatagtgacgacgccatggaggacccctcgtgctccaacaactcgtccatggacgacggctgtggcgccgggacggcagagagcgcggcccggaagcacgggtgcggcaacgggaggctcatcaacatctgctttggcgcgcagggcctcaccgtggaggactcggcgagcgggcagcagacgagcaagatgttcaagcagcagtgcctcagggtgtcctgattgacggcgtggtgtctcgactacaacagcgtggtgtgattggtttggtgtctcgcgtgcagctatgtgtgcttgtttgctttgctccttgcacagccagcggtgaactggtgatccaatgaacttgtgcttgtgttaactgtgacgttgacgaatccacagctctttaacttcctcagtgtcaggtcgtgcattcttcaaacaaatcaccgttgatcaatcacttcctcg

SEQ ID NO: 128430 - DNA, 2741 bp, Zea Mays
cctaatcccgggcccctctgatgatggcttatgagccccagctttgcgcttgcaggcactgcacggtctggttcttgttcctgagcagttgagctgcgcacaccgacttcttttgcacaagtctgcagtttacaaatgctttgagtcctgcgctcctgtcctgctgttcttgtctagcagtaaacaagtcatttcctttgttgtcacatggtggctcgccgagtgctggtgcacacattctctcctcgttccaccttgctgctgctgctgcagttcttggcacggccttgtattgtatgaatatgattgtatcacatgccatgtgactatgtgagtagctgaccacggctcaccgcgaggcgcacaggtacagcagcgcaggcgcggcggcagcccgccgctggatctctcccgaggctccggcgatggagcggtcctgctacttcccgctgcggtgggagagcacgggcgaccagtggtggtacgcgtcgccgatagactgggcggcggccgacggccactacgacatcgtccgccagctgctgcacctcgaccccaacctgctcatcaagctcacctccctccgccggatccgccgcctcgaggcgctgtgggacgacgacgcccgcttcgccgacgcggcccggaaccgcgcgtccgtcgcccgcagcctgctgctggagtgcgagtgcaggaaccaccgccccggcgccggggagaacacgctgctccgggccgggtacggcggctgggtgctctacgcggcggcgtcggccggggacgccgcgttcgtgcgggagctgctggagagggacccgctgctcgtgttcggcgagggcgagtacggcgtcacggacatgttctacgcggcggccaggggcgggagcgcggacgtgttcaggctgctgctcgaccacgccatgtcgccgaggtgctcgacgagttgccggaacggcgaagccagcgccaggcgcagctccgtgttccggcttgagatgatgagccgggccgtccacgccgcggcgaggggcgggagcgtggagatgctcagggagctgctcgacgagtccagcgtgtcgacgtatctcgacatccgtggatccaccgtgctgcatgccgccgctgggagagggcagctgcaggttgtcaagtaccttgtggcctctttcgacataatcaattcgactgataatcacgggaacacagcgctgcatgtagcggcctaccgagggcaccaacctgtcgtggaagccttggttgctgcgtctccatcaaccttgtcagttgtcaacaacgccggtgacacgtttctccactcggcagttacaggattcaggaccccaggattccgacggctcgaccgccagttggagctgatgaggtacctcatacgcgagagaaccgcggatatccagaagatcatcaacctgagaaacgacgcgggccttacagctcttcacctggctgtggttggctgcgcacacccggatctcgtcgagctactgatggccaccccgtccatcgacctgaacgctgaagacgctaatggcatgaccgcgctggcgctgctgaagcagcagctgcgctcagcgacgtccgaccggctcatcaagcagatcgtctctgccggaggggtcttgaactccagcatcctgagaacccggtcagccatcgcttctcagatcaagatgcagggcgggatcgcgagcagccccggcaccactttcaaggtatcggatgcggagatattcctgttctccggcatgggagcggcggagtctctgaggccaagctcctgctccagcaacgggaaggatgatgaccctactcacgcagacgcagactgcgccgagaaccgtggatcgtcggagaagaggctgagctccgcgagccgggccaaagaccgcctcaagatgatgctgagatggcctcgccacaaggacaagacgcccaagaagtcagaggacagcagcccgctggggtcgatcagcaggctgaacgagcacggggccgagacccctgctccgctgaggcagaagtttaccaagacgacggcgctcaacggcaagcggaccctagcggtgaagagctccaccccgagctcctcatccaccaagaagaagctcaacacgaagctcatccacggcatcatggaggccatgccacagctggcgccatctacggcgcggtccgcgtccccgacggacactttcctgaggtcctcggtatcgtccacgccgcagccgctggcgaagctgaaggacatctgcctcgacgacgagatctccatggtgacgccgcccgccggcaggctgaaggatagtgacgacgccatggaggacccctcgtgctccaacaactcgtccatggacgacggctgtggcgccgggacggcagagagcgcggcccggaagcacgggtgcggcaacgggaggctcatcaacatctgctttggcgcgcagggcctcaccgtggaggactcggcgagcgggcagcagacgagcaagatgttcaagcagcagtgcctcagggtgtcctgattgacggcgtggtgtctcgactacaacagcgtggtgtgattggtttggtgtctcgcgtgcagctatgtgtgcttgtttgctttgctccttgcacagccagcggtgaactggtgatccaatgaacttgtgcttgtgttaactgtgacgttgacgaatccacagctctttaacttcctcagtgtcaggtcgtgcattcttcaa

SEQ ID NO: 128431 - DNA, 540 bp, Zea Mays
atggagagagagccgcgggagctgagggagaaagaagctgggcgcggcgctgggagatccggtgagccgagagggaggctgcgcgccgtgggagctggagcagcgcgcgacacagagaaccggagggcgcgcaggctgggagctcggccgccatgggcaagtgcagggaagaacgcgacgcgccagggaagagcagaggtcgggggcgagctcggcacggcgcgtgcgcaagaagaagctctagggagcgagcagggcgcggccaagggagaaacgccggctgtgcccagggcaaactcggcccgacggccatggacgaggtgggcgagcagcaaggcgccgagcagaggggccagagcgcggagggagagagagagacagggcgccgagcagaaccgagcgccatgggtgcaggaagatgtgacggcgcacaggaaaggagaaccgaggagcagaggctggggcacgccatggaagatgggaggaggccggctgcgcgcagctggatttgtatccagggccggccgagtgagaagataa

SEQ ID NO: 128432 - DNA, 132 bp, Zea Mays
tttgtttttttttttaatttcaaatcgcagatatttttgggattccgatttttagcgttgtacactgggtcgacaccctattcaactacgcatctcattctccaaatctcgaaacggaaatccgaggactaa

SEQ ID NO: 128433 - DNA, 2729 bp, Zea Mays
cggttctgtctgcctttatttattcgcgttccctgcctgtttcgagcctccagccttaataacccggcattctctccgccgctcgcccgctccgcgtccggcggcccgcgtcgcctccactcccaattagcctatcgtgttcgacgcgagcgaactcgctcagatcagagtgttccctgatccggtcccaatcttttattggattttgtgttttggtaggggatctagggtttgtcgtcgaattccgcctcgaattttagggtttgcttcggatcgattccgttccgtgggattcttgcttgcagcactccatggctgcggcgcggcacgggggttataggagcttcgacgtggccaggaggcgggagttcgacctggagcgttctaggaggagcaaggagtaccgccactcgagccgccaccgcgactcggatcgccaccgtgatggcagcaggggccgtgaagtgcccaacgggtacatccgccaccgctcgccgtatgcgccaccgaagagccgaccttcaaaaaggaaggacgataaggagcctggtgaggtctcaagcgatagcggctcggagtctggtgggcgcccaccagtgctgagggaggatgggggtcttggggtctgcagggatggaggtgcgttgccagcaagcaagaagaggaagcactcacctggattccacgatacgaatgtttcaaagctgcgggcaagagatgaggtgtggagcaggagaggacctgatgccatagctgcggagctccctcttccttcgccgccccctatgtctgcggttggtgggtgctcaccaatggatccagaagttttggtagttccaaatgatgctgaaaggatggacgcgattactgagggggaagaggattgtgcaacgagaaacatttttacttcaaggtgggcggatgctgctgaagaggaggaagtggtgattgtgcctaagaagaagaaaagtgtgccacctgctcatttgcctgaacagaaatccacaaagaaaatcatgggctcagagctgggagaagcgatgggcagtaaaacatcaagaagttcctcaagttcgtctaactcaatgggtagtgaaaactggaatatcgaggtagacgagggtgatggcattgattcttctgttggttgttcgctggatactcattccaggagcaatatgcgtaggtctggatcacctgaggttgtgcgaacaccacgtaggtgctttaacatgcttcagggctgtaggagtattgatgactttgagaggatcaacacaatcaatgagggtacatatggagtcgtatttagggtgagagacaagaaaactggtgagatagttgctttgaagaaggtcaaggtagataaggaaaatggacgggaagggtttccattgacttctctcagagaaatcaatatccttctatcctttgaccatccttcaattgtggatgtcaaggaagtagttgttggtggtcatgacgatgatacttttatggtgatggaatacatggagcatgaccttaagggtgtcatggaggcgatgaagcaaccatatagccaaagtgaggtcaaatgtttgatgcttcagctgctagagggcgtgaagtatcttcatgacaattgggtacttcacagggatctcaagacatcaaatctcctcttgaataaccgcggtgagttgaaaatatgtgactttggactctctcgtcaatatggcagcctgctaaagccttacacccaaccagttgtgactttgtggtacagggctccggaactactattaggagcaaaggagtattcgactgctatcgatatgtggtcattaggttgcataatggcagaactcttgtcaaaagagccactcttcactgggaagtctgagatagatcaacttgataagatatttagaatactcggcacacccaatgaggagcggtggcatggttgttccaaattgcctggcttcaaaggcaacttcgtaaagcgaccgtacaatagattaagggacaaatttccagctgtatccttcacgggaggcttgaccttgtcagaagctgggtttgacctgctaaataggttgctggcatatgaccctgagaagcgcatatctgctgctgatgccttgaaccatgagtggttccgtgaagttcctctgcccaagatgaaggaattcatgccaacttttcctgctctgaatgaacaggacaggaggatcaagagatacatgaagagccctgaccccctggtggagcaacagatgaaagaacaagggagcataggagatcatggcctttttgactgatctgaaagcagacaagtcttgctgcaaatgacagtttttgagtgagtaaacatgttgcaaggtgaggtgtacaactggacagagaagtatcccgtctacttggtgtgcggtgacagcttattgtgttctataacaggctaagagatcaaaggggaacataaattttacttaagttccatgcagctagtgttcaaatggcagggttagctctctacgagaactgtcatattctaacctatcatcattataagttgcagatgtaatgcagttcgtctaaaaggtttggccttgcgtacaccaagtttcacctctgatacttgtaaagtattataaactgttgacttgtaatcagtaatcaatgagatattagtgacatcgtattttattttctcttttcaagtagtgcatcttcttttgatcttt

SEQ ID NO: 128434 - DNA, 1280 bp, Zea Mays
atattttgccactccttcctatcataaaaacatgccgtttaggacaagatttgatcaaaccttaaaacttaaaagctacaaacatttataacttctaatttatttagtttatgattgctgtgtcttgctttgtcagctaccatttttttcatgccataaaatggtggaattgcctgtagagttacataaatgctttctactaacctaagttgagatgtgtgccaatgtatcactgtatcaggtcccaattccacttgttataccatcttttttcttcactggggattgtttttgaataatctgctgataataccgctccgttcttttgagcttttataatctgccagaggtaactagttgactataaaatctgggaggatgctaccatgtgaattatgtctttctttttacctagttgggtaaaatgcgctaatggtttgctatgcctaaatatgaattcgagttgactatgttcctcattgcaatgtttgtggcacacaggtatagcacttctaattactcctgtgagatggctaatatttccgtgttttttattgggttgatgtgttcatatgattttgttaagaacaacagtaaaatacaatgaatcctggaaagcaagttgtgctaagttatataattttagtaaaacgtattcatgtctttgatactgatgtaattctgaatttctgatgtgagattccaacttaagtacctaactgctttcccagttgcctgaacttgtagggtatttaccattcttatgtcacttctctgaacttgcatgatattcaccattcgtatgtcattataatagcatcttactgtcccttgcatttgtagttgcttggaattatgacgtctttagcacgatctgaagtagggagtatatgtaccacagaacgtctaggaattttgttgtagcagttcatctgagtatatccacttactcttaccatgtgcgattaaagtgcacttgagtttgtttacagcttgaaatgtccgcactggtagcagacatggcagattgttagggcacctatggagacgacgtcaaacacatttgaagttaggtgaacttgaatatcgacggagggcagctgataatttatgttggtcagtgaattgaataactatcttgacttatacctccgaactaggaaagcgcaattctagttctcctgagtgaaaccatctaaaggtagatcaaattcatggaaaaaatatcaatatttatgacatgtaacaggtatattatgagagtattttttaattaagaa

SEQ ID NO: 128435 - DNA, 1438 bp, Zea Mays
atattttgccactccttcctatcataaaaacatgccgtttaggacaagatttgatcaaaccttaaaacttaaaagctacaaacatttataacttctaatttatttagtttatgattgctgtgtcttgctttgtcagctaccatttttttcatgccataaaatggtggaattgcctgtagagttacataaatgctttctactaacctaagttgagatgtgtgccaatgtatcactgtatcaggtcccaattccacttgttataccatcttttttcttcactggggattgtttttgaataatctgctgataataccgctccgttcttttgagcttttataatctgccagaggtaactagttgactataaaatctgggaggatgctaccatgtgaattatgtctttctttttacctagttgggtaaaatgcgctaatggtttgctatgcctaaatatgaattcgagttgactatgttcctcattgcaatgtttgtggcacacaggtatagcacttctaattactcctgtgagatggctaatatttccgtgttttttattgggttgatgtgttcatatgattttgttaagaacaacagtaaaatacaatgaatcctggaaagcaagttgtgctaagttatataattttagtaaaacgtattcatgtctttgatactgatgtaattctgaatttctgatgtgagattccaacttaagtacctaactgctttcccagttgcctgaacttgtagggtatttaccattcttatgtcacttctctgaacttgcatgatattcaccattcgtatgtcattataatagcatcttactgtcccttgcatttgtagttgcttggaattatgacgtctttagcacgatctgaagtagggagtatatgtaccacagaacgtctaggaattttgttgtagcagttcatctgagtatatccacttactcttaccatgtgcgattaaagtgcacttgagtttgtttacagcttgaaatgtccgcactggtagcagacatggcagattgttagggcacctatggagacgacgtcaaacacatttgaagttaggtgaacttgaatatcgacggagggcagctgataatttatgttggttctttatcttcagaatccagacatcaatcatcccttggtccggcgttctttggggtagggaatcttaaaagaatgtataaacagcctctcgaggtagtgcttgggacaggaaattgcgagttacctccatgacctcttcaatgcaccattgactgcattattgagaaggcagaagacatcattgatcggttggcacgtgcgaacttgcaatcgctttgacctaaaacaatatgccatcattattgagaattcgctatgcgccattcaaaaacaatatgtatatcattatatgccatcaaaatgtttgctgcggcttctat

SEQ ID NO: 128436 - DNA, 1872 bp, Zea Mays
gacgtgtctatctagttagttctcgatagcctctctctccctgcctccccgctgttgtggttgcggtgcttctgctgatctgctccgtcttctcctcccggcaatggcctgcttggaggcgcccccgcgcgtcgagctctgcccggtctcgtgccagccccgcggcctgcagcttccgccatggcggctcagcctgtcgaggtcctcctcttcatgcagatcttgcacccttgtgtctcgccagcttccaatttgcaatgcacagtcatatgctgatgatttatgggtggctgcgcctcatagccctgcatctgttcgctcaaggttgcttgcagcggaaagagaggaagcaaaggctgtcctgtccctgtttctgaggcagaaaggtctgcgaagcacgctggccgcacggatcgtcaacaaatcggatggcttcatcgagcacctggtctcgaagctccagattgcttacagatctcgatatgctgaaggaagggagctgagcacgcctgaaatcagagacgctctccttccctatctcgaagctctctccaaagaacatggcgacagtttggtcgaggtggtggagaatttccccgacccttttgctatggaaagggaagccttatcttcatcaatggcgtttacacccacgagctcaaacaagcagaaggcgattgctcgaataagcacggcagcctcaggcgccgccctccctgagctggtcccctacctactagaccttggcatggaccacgaggagataaaggacatcgtgcgcaagttcccagcgttcgcgtactacagcgtggatcgcaagatcaagcccctggtggagctcctgcttgagcttggggtgaaaaattccagcataccaggaatcatcaagaagcggccccagctgtgcgggatcagcatgtcagacaatctcaagccgatgatggcttatctggagagcatcggcgtcgacaaggctcagtggagcaaggtgatcacccgcttcccggcgctcctcacgtacagccggaacaaggtgcagacgaccgtgagcttcctcgccgagctaggtgtctccgagaagagcatcggcaagatcctgacgcggtgcccccacatcatgagctacagcgtggacgacaacctcaggccgaccgccgcctacttccggtcgatcggcgcggacgccgcgtcccttatccagaagagcccgcaggccttcggtctgaacgtcgaggccaagctgaggccgaccacggagttcttcctggcgagggggttcagcgtcgaggaggtcggcgtcatggcgaacaggttcgggatcgttcacacgctgagcctggaggagaacctgctccccaagtacgagttcttcctggcgatggagtacccgaggtgcgagctcgtcaagttcccgcagtactttgggtacagcttggaccggcggataaagccacggtacgcgaggatgactgggtgtggggtgaggttgattttgaaccagatgctttcggtctccgatgccaggtttgagaagattctagagaagaagacggctaggctttgataagacagcagtttcagattaggcacagtgttggagttcatttgagaagaactgtcaatgataaaaccatcagttttcagagcacgtagcttattatcgtggccttcatggacgtgcaacgtccagaggcgaactgtttgatgtgctaatctgtagttagcttctgcgaggtattgaaatgcatgcaactttggcaatcagaaatgccagttgcagtgggcgagattgcttggtgctcatttatgcagtactcggcgacaatctttgtttgaaaatgaaaatggaatcagatgacaccgattacaaac

SEQ ID NO: 128437 - DNA, 1657 bp, Zea Mays
gaaaaacccgtcatttgtttctcctccgtgcacagctctcttcctctgtcctcttctacgtcagtgacagtgaaatcacggctgagtggcgccaccgcccgtggggcccatcaccggtgcgcgcgctcaataacgagtgagcgcgccaccgtcgagcggcctttcggcggtgcgcacaaggccagcggtcgaggcgccatttccttagtcgactagggtctccgtctctccgactgctaggtaacactaataaccctttcaccttcctctgtgtgctcgggagtcgggagtcgggactaccagttagggttacgatttctaggatttgagaaaaactgggtaagggttgaatcttcccttcttatttatgctattctaatggacgggaacacgaattcgagtcttgtagggggttttgctcaaattcgtcgctaaaatgaaggttatgttagcatctagggttagggtcagagcttaaaaccatgtattcgctaccattgtaagtttctactaacgtagctcataaactgtagccactagatacgctagaacagagagctataccttcgagtttttgggacgaccggacgaggccattagggcgatgactgtacacgaattccttgattgtgaatgcaagcacatgtgatatgatggtataaatatagtgaaaatttagcttattaccactatatttttatttttgcatgagtgtgaccacagcatgtagttccacccctaacaagaacacaccttatgaggatgtatttatttagtgaccaaaaattgctgaggtgtggttatgttccctccatggcaattagtagccttgtgttcaaagctgcttgtggttgttatttttgtaatggacacgtgtgtgttaagtcggtcttaagcctacaccaactcgcttggtactaggggggcatgtggctaaagttgagccctgtgcaattccaggagacgaggacatacatcatacatgatataatattgcagaatgcatactctgtgccagcaattcccatctagcaaatccaagtgcattggcattaaaacgtctcttgattggtcttagctaatattatagtttctcttttgaacgctgacctcagttgtttgtctcgtatttggaagagataatgttgttcttgttccgcagggatcagtacctttcttcattggtttgtttcttcattggtttatttcttctgtttgtctgttggcctgctgctggtataatcatggaactatatggatcgtgtttatttttccttttccttttctttttgggcttgtctttcttgctgaaccccatttgggccccattggggcaaggggtgggtatgttgtatgctgttttggcctatctcctttcttaatgagttaatgcaatgatatgcagttttcctgcatattcgagaaatatatggatcttttctgctcttcaggtccttctctgtaagtccaacggatcatacctagtttgatagaagattggttttttagtctaattgttattgacttgtccttctattacatttttttgtagtggttataggcctcctatagtcctatccaggccttcctgtatcaaataccaatcataggttggattatgcagtaccgattcgaggtaagtttatagtttttaaaa

SEQ ID NO: 128438 - DNA, 694 bp, Zea Mays
acagctctcttcctctgtcctcttctacgtcagtgacagtgaaatcacggctgagtggcgccaccgcccgtggggcccatcaccggtgcgcgcgctcaataacgagtgagcgcgccaccgtcgagcggcctttcggcggtgcgcacaaggccagcggtcgaggcgccatttccttagtcgactagggtctccgtctctccgactgctagttttcctgcatattcgagaaatatatggatcttttctgctcttcaggtccttctcttggttataggcctcctatagtcctatccaggccttcctgtatcaaataccaatcataggttggattatgcagtaccgattcgagattcagaaaaggagaaatttcaaaattttcggtttctcatcattctggtgttgaacatctgaagcagcgaatcttgtgacgccatttcaggtgcctgtcatcgttgacaagtagcaaaagtgcaggcttgttcaatgcacctaatgaaatcactgccaactagtagaaattttatttttaatcacaaactaatgttttatgacagcatatcctcggctataagtttctatgaataagtcaagcgtcaaagatcacggcacaactcgctacgccatatgtattagtgtgactaggtgaatatgttttaaaatcacggtacatacataggcagacgctcatgcatgc

SEQ ID NO: 128439 - DNA, 1735 bp, Zea Mays
acagctctcttcctctgtcctcttctacgtcagtgacagtgaaatcacggctgagtggcgccaccgcccgtggggcccatcaccggtgcgcgcgctcaataacgagtgagcgcgccaccgtcgagcggcctttcggcggtgcgcacaaggccagcggtcgaggcgccatttccttagtcgactagggtctccgtctctccgactgctagttttcctgcatattcgagaaatatatggatcttttctgctcttcaggtccttctcttggttataggcctcctatagtcctatccaggccttcctgtatcaaataccaatcataggttggattatgcagtaccgattcgaggtaagtttatagtttttaaaactgcaacggacttttatgacagaatttcttatacctcaacgtcaattctctacgaaccttttttttggggggcggggggagccccacacgagccttacacgagccttaaattctataatagtcaatctagattataagggctagtttgaaaacttaaatcctcttggaatacctctcttttcctaggatgagcaatctttaggaatgtcatttcaataagatatttagggcctgtttaggagcaaggagattggaggggttgaaggagctaaagtccccttattattcaattagggctgatttggagaccagggatcacgaggggatccatgaggaggaatcctcttgcctcccccatggatcctctcgtgattcatgatcatcaaaccagcccttacaggttttagtcccttcagtccccttactctcaaacaagctgttatgaggttttttctccctgaggcctgggtttggctccccttagtgctaactgatgcatcagaactctgatcagtacagctgtttggtcagttgaggcgtaagcgcacctgaaaacttctgcaacagattgtgtaaaatagcggatttatgctgtagattacactgtttacagaatgaagtttgaaataaagaataatatataatagttgctgcagacagccttacagtggagcttggtaactcactgactaacatgcatacggtgaggtgccattggtatttgaatttcgttgcggatggtgacaatcggctgaagggtgatgccttttccctttgtgcctttgtgtttgtctcgttcagattaggataatagttgattaggataatgataagcagtggcaatcatttccaccgttgaacctagtttcgtgggcatgacatgctgcgccattaacgtctaggagtatttagggcggttttgatttgtcgatccttatccttatctacagtaatgatgcactactggcatgtccccgtcgtattttactaactgacattgatttgttgctggctggccagattcagaaaaggagaaatttcaaaattttcggtttctcatcattctggtgttgaacatctgaagcagcgaatcttgtgacgccatttcaggtgcctgtcatcgttgacaagtagcaaaagtgcaggcttgttcaatgcacctaatgaaatcactgccaactagtagaaattttatttttaatcacaaactaatgttttatgacagcatatcctcggctataagtttctatgaataagtcaagcgtcaaagatcacggcacaactcgctacgccatatgtattagtgtgactaggtgaatatgttttaaaatcacggtacatacataggcagacgctcatgcatgc

SEQ ID NO: 128440 - DNA, 1224 bp, Zea Mays
tctcaaattagctctcacttaaacagagaacaaaccacaaaactacaaaaactatgatgccagattaaataaaaaggaatgaaatggcagcgcaatgcaatgaccaccagttattcgaataaagactgcgtttggctgcccgcaataagactcttgaatattgttgaacccaaagatggctgctaacccaattttcagcatataacagaaaaagacatagctgctcagtatgctggtatactcctgaccaacactgagcacaaaaagacatgtcctgaatgtgactcaccgccacaacaaactggaatctattcgaagggcatgacggcagcaagcaagatccgctaggcgtccaccccctaattccaatcaaaaccataatttctggagcaaggaagaaggaacttatccccactacccaagatacctctagctataccccccaaaatacgcaagcatcatctaatcagaaccacaaaatattaagatgccattaacaataagaaaacataaagcgacgctagatatctaatttatggttactgtgtaagcatcgactgtataataaaagaatacgtggaccaagcaaacgccagggtacatgaagacaaagacgacggtatttcgatggtcaaatcacgcgcagagtaatatcaagcataacttggagacactagacataataaactcagaaggagcaggaacccagaacgcaaagaagaagcagcagtcagtcagtcactgctgcctagctcatgcccttaaccgcagtgagagctggatgcagaggtttatcgaccgattcccgcgttgtttgcgagctgctgcaacaataaaacgcttgaaccaccactcccggccggaccagcacaaggcaaggaagagatcgataaaccactgcgcccagacaccacccgtagatgggtctgacaaaaaaaaaaaaaccttgacatcaatgcaaaataaggatggaacaacacaagaaacacctgcgagagatcacatggtgaggctggctgcctggctatacaaacaagagggaggtgggagatctggatctgggatttatatgccacattgggtggaggatgtgacgggagaggggagaagagaaaggggtggtggcgctggcgccgcgcgcggcctctgcccagcagtgggctgcgtggggcactctcaagtggaggaggagtggaggactaggaatctttctggtgctgtggc

SEQ ID NO: 128441 - DNA, 189 bp, Zea Mays
atggtgacgcccggccacccacgctgtagcctcagccttgccggtgtcggccccgtcccgtgccccttcgggtttacgccatctccgaccaagtccggctcctcgctcgccgctctgcgcaagcaggtggacctcgacgcgacgctccagattctgaactcggcactctcacgggaggactccgtttga

SEQ ID NO: 128442 - DNA, 448 bp, Zea Mays
cgagctccggttaccgttgatgacgctcgtcaacagcttagggcctatttgataaccatggttttacaattgtcatgacaacagcttatattcccatatgttatagaatgcaatcacctgctggtgcttggttgtagccctggcgtgtttggaggattggacaccaagggtgcacataatttggagtgctggtactgtgaaccacttggatgtaaatattttctttgttttttagttctgatctagtttaaaactggacatgaatgttgttgagctaccttttgatgttatattatgtcagtttgctggaagatcatttgataacaattgtctaatccagtggattagtcatgtagattacaaacttgcttatatttcttcttagtcctatgtatatcatctttctacctgaacttggtttgggggtaaacacctttgttgttgttgt

SEQ ID NO: 128443 - DNA, 2587 bp, Zea Mays
atggcgaatcccccggggcggcgcgtgctcgagcgtgtgggccaggggggtgctcgagcgtgtgggccggggaattgcgctggattgcgtgatgcggagcagggtgcagccgcgagcgggacgagatgcaggagtgatgcgcgggcagtagaacactctgggccccaggcgctccacaggccggcgccgccctccgaccgcgaccgcccgggtaccagcggcctcactgccgaggagactgccgcgtggttcccggacaccctcgacgacccgctggagaaggacctggagagctacgccttgccgagcaacggccgtgcgatcagaggtgcgcacctgggcatgtcgcttgatgtcatgttgattgagattgatgagaggttcaacgccctgaagctgctcatgggctccgtgttccggtaggccaaggagatgcttggttcggtcaactcgtcggtgtctgatcagcagtcggagaatgagctgcagctggaagtgttcggtgccatcatcggagagtgcgccaatggcctgcaggaggagctagagaggaatctgtacgcgcaaatgagcatcacaaacaccatgagcaggaactggaaggaagccataactcagtttgccgccatgcgcgaagaccttggcgctctttgtaagctactactgcctttagcaccagaagctcatatttctaacggcaagaatgaaagtccaggcagcaagagtaacagatggaagtacaatttctttggaaagaaatccagagatgatcgttctccacgcgctgaggacaacaagagtttcaggaagcaaaaatcatttggtgcaaaggatgtcatctcagaaaagtctgactttcaccatctcaatggtatgactagagagcaagtgataacctactttaagtctgagatcagcaaaatgaaaaggatgcacaaatcagctttgcaagagaagaccgaagaactgttcaggctcaaacgagagaaggggtcacattctctcaagaatgacatcgaatttgaacctttgagaaagaaaattccagagcttgtattgagaatggaccaaatcatttccaagaatataaaggtacctgcaatctgcatgacccatgatgaactcgatgaaagatgcagattgatgagcagaatcgatgctttgttctatgaaaatcagcattttcgagggttgcttgcagacaggatgaaggacattaaggcattatcatcccggctatctgaagccagtatagaactgtcaatgcagatgctgtcggaagaagagctcctgagacaaattgataaagttagagaagactgtgaggacctcagaattgaatgtgatattagagaaggaatgtaccaaactgttacaaaacatttgcttgatgactataaggacaatatggatggtgctgctctaaatcttagtgcaaaattgtcttcacttgaatctgcaatatctgaaaaggatgaggcattatgcctatataacgaagaaaatcacaggttaaaggagaagttagctgagttagaaaaggaatgattgatccacagtgaccaggaagttccagaagccataaaacaagatagcacagaaattgttctgcgtgacattgaggttgagccttgcatgtcaccgagaagatcaaatgcggacgattcaaggtatgacgaacttgtgaaactagactcaagcttagagcaaacgtcatgtgtcctcaaagaaatgaacaacaaaaatatggatcgcagtagtagcctcagtaggaatgagcaagagaagcagctggagtgcattttagtatctatcatgaaactatcaaaaatatgtcagcggaaagaaccgagaacaggtcagaggaacttagcgatcactgcaaccacatggtcagacaagccatggtactaacaaagatagggctttggtataaacaaatgattgaagcgaggcgttctgagctccaaaaggctgaagccaaggttatggtattgggcgataagatcaccacatagttgagccttctccgaaagatatatttagctctcgatcattactctcctaccttgcagcagcatcctggtctgctagacgctttcatgaagacgtgcaagcttgttgcagatctgagaagtaaacagaacgaaggcgatgcaacatgaacgaggaggcggtatggtgggatctcccttggtatagctaatgtttctcatgtgcttatccgtgttccacgcctgcagctgcagaccaagtgaaggatcctattgaactgaggttttagaatttccagatcctgacctgcagtatatcttagtgccaagtgaaccaatagctgccttgctgatcttatgcgatgcaagtggtagctgtttttatctgcaatgatgactagaaatctgaaactatgtacatatggcattgtgctcacgttgtcacgtgcttgttggttagagaatagggttgttacttgcttagttagcagcctaggccatggaatagagaaaatgttaactacattgtaagcataaaatttatttatccccactctgtgttgatgagtatctttcctccatctagattgatc

SEQ ID NO: 128444 - DNA, 2207 bp, Zea Mays
aagcttagtgacttagtcccacctgtcagctgcagcagcaagcaaattgacagcaccccgcatctcttctcctggacgcgacgccgtccccaacctctccgtcccgcgccgccgccgcgcgtcactgtgctcgcgatctcgccggcggccccagaggacttgtcgcgtgctcggccatggcatcgccaccgccggccctcgagatcctagttcgcgagcccgacggagtcacggtgtggtccggacccccctacccgccgggcaccaccagcccgccgcagagactccccaagacggcgtgcagcgccacctctttctccaccgacggtgcccgcctgctcgcgacggtggcatcggcctcggccaccgtctacgactgccgcacactcgctgtagtcaagtgcttcgagctcccgggtctcctcgccgctgcgctatcgcccacgggggcgtatctgcagaccttccagaagtcatcctcgccgcaggagaagaatgtcacggtctggcacgtcgacacagctgccgctctttaccaacactatcagaagagcatgtctaaaaccacctggccaatggttcagttttctgcggatgaatcggtcgcttgccggatgatgcctaatgagatacaattctttgatccaaaagattttgcaaaaggaattttgtataggataagaatgcctggcatagctacgatgaagctagcaactgcaccaggatctcatgttgctggattcgtcccagaggctaagggtgttccagctagcgttcagatattttcttgcaacaaggatgcacaaaatcaagttgttgctcgcaggagcttttttcgctgttccaccgttcaattacagtggaacaaagggtccactggccttctaattcttgctcaagctgacgtggataaaaccaatcagagttactatggtgaaaccaagttgaactacttgacaactgacagggccttcgaaggaattgttccactcaaaaaggacgggccagtccacgatgtgcagtggtcttcctctggctctgaatttgctgtggtttatggtgttatgccgcccaaggcaacaatattcaacaagaagtgcaaccctcttgttgagtttggtgaaggaccctacaatacgataagatggaaccccaaaggacgatttgttgtattagcaggttttggcaatttgcctggtgatatggcattctgggattattcagaaaaaaaattggtagcgaaaacaaaggcagaatgttctgtcacaagtgaatggtcccctgatggtcgtcattttatgactgctacaacagctccgaggcttcaaatagacaattgtataaaaatatttgaccacaacggatctctgcagtttaagaagatgtttgaaaggctgtatcaggctgattggaaacctgaagcagctgaaagattcactgacattgctgacctgacaacatccttgagtaccttaaagattgaagaaacaaaaaaacaagtttcagcacaaggttccaagtcagcacaaacatcaagcaaggcccctgcaattacagcgccaaaacctacagcataccgcccacctcatgctaagggttctgcagaacttcaggacaagctctttggtggactagctcctgctgggggggagatgagcaaaaatgcattgcgaaacaagaagcgcagagagaaacagaaggaaaagaaagctgctgaagcgtcaggctctcctgctgatgaaagttgatctgtgccggattactttcagcattgccaaccaccgagtataacagcgacaaatgatttctttcaatctggggaaacggccatgcaccgattcacgtttacaatatgaaactttttggtagtttggtgcagacactcggttattttttcagaactatactgagtttgtataaccatagcgaagaaacataaaaagtgagctatttcatattttcatgaactctcttgttctgtcgatggattggtgtttactgtgctagcaatatcgctattgaaaggacaatagtttcatggcctcatgggcatgataggtcgtgcaaaaatttcctacaaaacataatactacattgttacatttgcacggctagtgtaactttgaagtcctaatatcctaacaacaaaaatgtatggcagggcaacttgctagctagctgagggctgaggcttgtggtggtggcaa

SEQ ID NO: 128445 - DNA, 2121 bp, Zea Mays
aagcttagtgacttagtcccacctgtcagctgcagcagcaagcaaattgacagcaccccgcatctcttctcctggacgcgacgccgtccccaacctctccgtcccgcgccgccgccgcgcgtcactgtgctcgcgatctcgccggcggccccagaggacttgtcgcgtgctcggccatggcatcgccaccgccggccctcgagatcctagttcgcgagcccgacggagtcacggtgtggtccggacccccctacccgccgggcaccaccagcccgccgcagagactccccaagacggcgtgcagcgccacctctttctccaccgacggtgcccgcctgctcgcgacggtggcatcggcctcggccaccgtctacgactgccgcacactcgctgtagtcaagtgcttcgagctcccgggtctcctcgccgctgcgctatcgcccacgggggcgtatctgcagaccttccagaagtcatcctcgccgcaggagaagaatgtcacggtctggcacgtcgacacagctgccgctctttaccaacactatcagaagagcatgtctaaaaccacctggccaatggttcagttttctgcggatgaatcggtcgcttgccggatgatgcctaatgagatacaattctttgatccaaaagattttgcaaaaggaattttgtataggataagaatgcctggcatagctacgatgaagctagcaactgcaccaggatctcatgttgctggattcgtcccagaggctaagggtgttccagctagcgttcagatattttcttgcaacaaggatgcacaaaatcaagttgttgctcgcaggagcttttttcgctgttccaccgttcaattacagtggaacaaagggtccactggccttctaattcttgctcaagctgacgtggataaaaccaatcagagttactatggtgaaaccaagttgaactacttgacaactgacagggccttcgaaggaattgttccactcaaaaaggacgggccagtccacgatgtgcagtggtcttcctctggctctgaatttgctgtggtttatggtgttatgccgcccaaggcaacaatattcaacaagaagtgcaaccctcttgttgagtttggcattctgggattattcagaaaaaaaattggtagcgaaaacaaaggcagaatgttctgtcacaagtgaatggtcccctgatggtcgtcattttatgactgctacaacagctccgaggcttcaaatagacaattgtataaaaatatttgaccacaacggatctctgcagtttaagaagatgtttgaaaggctgtatcaggctgattggaaacctgaagcagctgaaagattcactgacattgctgacctgacaacatccttgagtaccttaaagattgaagaaacaaaaaaacaagtttcagcacaaggttccaagtcagcacaaacatcaagcaaggcccctgcaattacagcgccaaaacctacagcataccgcccacctcatgctaagggttctgcagaacttcaggacaagctctttggtggactagctcctgctgggggggagatgagcaaaaatgcattgcgaaacaagaagcgcagagagaaacagaaggaaaagaaagctgctgaagcgtcaggctctcctgctgatgaaagttgatctgtgccggattactttcagcattgccaaccaccgagtataacagcgacaaatgatttctttcaatctggggaaacggccatgcaccgattcacgtttacaatatgaaactttttggtagtttggtgcagacactcggttattttttcagaactatactgagtttgtataaccatagcgaagaaacataaaaagtgagctatttcatattttcatgaactctcttgttctgtcgatggattggtgtttactgtgctagcaatatcgctattgaaaggacaatagtttcatggcctcatgggcatgataggtcgtgcaaaaatttcctacaaaacataatactacattgttacatttgcacggctagtgtaactttgaagtcctaatatcctaacaacaaaaatgtatggcagggcaacttgctagctagctgagggctgaggcttgtggtggtggcaa

SEQ ID NO: 128446 - DNA, 1275 bp, Zea Mays
attatgaatgctagtgctaaaataaaattatattaaagatatgttaaatacacatatattgatataacttttgcacactgagcatgtatataatttgactaattgttagttaaagtttaagaaatctgaccttttcagatcctaacactcagtataataagaaacagatggagtatacatcttacgaaacattttgctttaacaatatccttgaccacattttctcgaccagttgttgtattagcaggttttggcaatttgcctggtgatatggcattctgggattattcagaaaaaaaattggtagcgaaaacaaaggcagaatgttctgtcacaagtgaatggtcccctgatggtcgtcattttatgactgctacaacagctccgaggcttcaaatagacaattgtataaaaatatttgaccacaacggatctctgcagtttaagaagatgtttgaaaggctgtatcaggctgattggaaacctgaagcagctgaaagattcactgacattgctgacctgacaacatccttgagtaccttaaagattgaagaaacaaaaaaacaagtttcagcacaaggttccaagtcagcacaaacatcaagcaaggcccctgcaattacagcgccaaaacctacagcataccgcccacctcatgctaagggttctgcagaacttcaggacaagctctttggtggactagctcctgctgggggggagatgagcaaaaatgcattgcgaaacaagaagcgcagagagaaacagaaggaaaagaaagctgctgaagcgtcaggctctcctgctgatgaaagttgatctgtgccggattactttcagcattgccaaccaccgagtataacagcgacaaatgatttctttcaatctggggaaacggccatgcaccgattcacgtttacaatatgaaactttttggtagtttggtgcagacactcggttattttttcagaactatactgagtttgtataaccatagcgaagaaacataaaaagtgagctatttcatattttcatgaactctcttgttctgtcgatggattggtgtttactgtgctagcaatatcgctattgaaaggacaatagtttcatggcctcatgggcatgataggtcgtgcaaaaatttcctacaaaacataatactacattgttacatttgcacggctagtgtaactttgaagtcctaatatcctaacaacaaaaatgtatggcagggcaacttgctagctagctgagggctgaggcttgtggtggtggcaa

SEQ ID NO: 128447 - DNA, 105 bp, Zea Mays
caatgttacatcgtgttcatcagttctctcatatggtcgtccaaaacattgttttgcactgtagactacaccgttcgtagagtggagttaaatatgggtgtgaaa

SEQ ID NO: 128448 - DNA, 1154 bp, Zea Mays
ctactactctataaaagccaattaagccccagcccaccgtgaaactcactcgccatcgccgggcatcgcgggcatcgcacacaaacgcaacctgcagccatggcacagaagctcgcgccaccgacggcggcggtcgtcgtcgtcctgctggcgctcgccttgtcggccgccgcgcagaactgcgggtgcgcgtcgggcctgtgctgcagccggttcgggtactgcgggacgggcgaggactactgcggcgccgggtgccagtcgggcccctgcgacgtgccggagaccaacaacgcgtccgtggccagcatcgtgacgccggccttcttcgacgcgctcctcgcgcaggccgccgcctcgtgcgaggccaacggcttctacacccgcgacgccttcctcgccgccgccggctactacccggcgttcggccgcaccggcaccgtcgacgactccaagcgcgagatcgccgccttcttcggcaacgccaaccacgagaccataagtacgtgcgaacaaaccgaagctcgtccaagctctagctgctactaatcaagtttcgactgctcgcagagttctgctacatcaacgagatcgacgggccgagcaagaactactgcgaccggaacaacacgcagtggccgtgccaggcggggaaggggtactacggccgcggcccgctgcagatctcctggaacttcaactacgggcccgcggggcagagcatcggcttcgacgggctgggcgaccccgacgcggtggcgcgcagcgccgtgctcgcgttccgctccgcgctctggtactggatgaacaacgtgcacggggccatcgtctccggccagggcttcggcgccaccatccgggccatcaacggcgcgctcgagtgcgacggcaagaaccccaactccgtcaacaaccgcgtcgcctactacaagcagttctgccaggatttcggcgtcgacccgggcaacaacctcacctgctgaatgatctctctctcattgggttgttgtcctgtacttacacatgtgttggttgatggatagatggcgattgcgtggtgcggatgtttcggtttggcggtgtcaattctgatatgcgcgtcggtgctgttctgatactgactatatacggaaataaaaatctgatttgcatta

SEQ ID NO: 128449 - DNA, 1096 bp, Zea Mays
ctactactctataaaagccaattaagccccagcccaccgtgaaactcactcgccatcgccgggcatcgcgggcatcgcacacaaacgcaacctgcagccatggcacagaagctcgcgccaccgacggcggcggtcgtcgtcgtcctgctggcgctcgccttgtcggccgccgcgcagaactgcgggtgcgcgtcgggcctgtgctgcagccggttcgggtactgcgggacgggcgaggactactgcggcgccgggtgccagtcgggcccctgcgacgtgccggagaccaacaacgcgtccgtggccagcatcgtgacgccggccttcttcgacgcgctcctcgcgcaggccgccgcctcgtgcgaggccaacggcttctacacccgcgacgccttcctcgccgccgccggctactacccggcgttcggccgcaccggcaccgtcgacgactccaagcgcgagatcgccgccttcttcggcaacgccaaccacgagaccataaagttctgctacatcaacgagatcgacgggccgagcaagaactactgcgaccggaacaacacgcagtggccgtgccaggcggggaaggggtactacggccgcggcccgctgcagatctcctggaacttcaactacgggcccgcggggcagagcatcggcttcgacgggctgggcgaccccgacgcggtggcgcgcagcgccgtgctcgcgttccgctccgcgctctggtactggatgaacaacgtgcacggggccatcgtctccggccagggcttcggcgccaccatccgggccatcaacggcgcgctcgagtgcgacggcaagaaccccaactccgtcaacaaccgcgtcgcctactacaagcagttctgccaggatttcggcgtcgacccgggcaacaacctcacctgctgaatgatctctctctcattgggttgttgtcctgtacttacacatgtgttggttgatggatagatggcgattgcgtggtgcggatgtttcggtttggcggtgtcaattctgatatgcgcgtcggtgctgttctgatactgactatatacggaaataaaaatctgatttgcattagctttcgttt

SEQ ID NO: 128450 - DNA, 1466 bp, Zea Mays
cgccactacgccggccccaacggcccaagccaagcggtccaggccacgggctcgtcggtcgtcgcctcgcgggtctcaactgcgctgcctccggccctccgggtgatcacgtcgcgacgccgcaaccaagcttccgagtcccgacgacgacctgccttgtccagtgatttcattggacagagttatgagtgcagtggaggaagatggatgtagtttacggtgtgatctatgcgacactgagattgtacacagcatggcagaactcctgcttcgtggattggccacagcttcagtggacagcaccacgggcgatatattcaagagcgcatcttctgtagctgctgctgtgaagactgagctagaaaattatatgcttgtgagaactgaatcgcttatccgtgagtttgtcgatggagcccaggatcattcagatcaattgatgaaagcctccacaaggccaaccgagttcctatcagacttgattggcgacttcgtggcatccaaaaggaacttgctgagccatgtgtctgggtttttgtccagtgaaagccgcttgaacagaattaaagattttatgcagaagatggagatggagaatgtgtggacactggacgtaaggcaggctacctcagagactattcttgaaagcatagacatgaagtgcattttccactgccccgaaaaatttgttgagcaagacaagctggtagaccatagaagtcggtgcaaatttagagtcgtgggctgcgaaaatgatggatgctcagtttcactttctgccattcatagtgaggagcatgactccatctgtccatttaaggccctgccatgtgagcagctgtgcgagcaacatgttatgcgcagcgagatggataaacattgtgcaacagtttgtgctatgaagcttattaactgtcctttctaccatgttggatgtgaaacagcctttccacaaggtaatcttgagaaccactgttcgaagctacttcaaacgcatatgttgtatgttctccaagcaagtacaagacaaaatgctgctgttaatgatatgaatcaacgattacaacttcttgagaaggctcagtcacttaacgaaatctctggggctttagatgttaggtcgctcactctgataataaaggagcaagaagcaaagatcaaggatcttgagagcggtatcaaagcacaagaagcaaaggtgaagaaacttgagaacgagcttaggtcgaagaatgcacgataacttcctacacaaaccagagtggcatactttaggacctgtaaataatcagtagcactgacatatatttggaaattatgtttttttgttcatataaaaagtatagagaattgcagggtttagacttcagaatatgaacttctcttgggttatcttttaagttgatgtaattgatgttttgatatttttatatgatatattgattgcttggattattatggggatt

SEQ ID NO: 128451 - DNA, 1399 bp, Zea Mays
gtcggtcgtcgcctcgcgggtctcaactgcgctgcctccggccctccgggtgatcacgtcgcgacgccgcaaccaagcttccgagtcccgacgacgacctgccttgtccagtgagttatgagtgcagtggaggaagatggatgtagtttacggtgtgatctatgcgacactgagattgtacacagcatggcagaactcctgcttcgtggattggccacagcttcagtggacagcaccacgggcgatatattcaagagcgcatcttctgtagctgctgctgtgaagactgagctagaaaattatatgcttgtgagaactgaatcgcttatccgtgagtttgtcgatggagcccaggatcattcagatcaattgatgaaagcctccacaaggccaaccgagttcctatcagacttgattggcgacttcgtggcatccaaaaggaacttgctgagccatgtgtctgggtttttgtccagtgaaagccgcttgaacagaattaaagattttatgcagaagatggagatggagaatgtgtggacactggacgtaaggcaggctacctcagagactattcttgaaagcatagacatgaagtgcattttccactgccccgaaaaatttgttgagcaagacaagctggtagaccatagaagtcggtgcaaatttagagtcgtgggctgcgaaaatgatggatgctcagtttcactttctgccattcatagtgaggagcatgactccatctgtccatttaaggccctgccatgtgagcagctgtgcgagcaacatgttatgcgcagcgagatggataaacattgtgcaacagtttgtgctatgaagcttattaactgtcctttctaccatgttggatgtgaaacagcctttccacaaggtaatcttgagaaccactgttcgaagctacttcaaacgcatatgttgtatgttctccaagcaagtacaagacaaaatgctgctgttaatgatatgaatcaacgattacaacttcttgagaaggctcagtcacttaacgaaatctctggggctttagatgttaggtcgctcactctgataataaaggagcaagaagcaaagatcaaggatcttgagagcggtatcaaagcacaagaagcaaaggtgaagaaacttgagaacgagcttaggtcgaagaatgcacgataacttcctacacaaaccagagtggcatactttaggacctgtaaataatcagtagcactgacatatatttggaaattatgtttttttgttcatataaaaagtatagagaattgcagggtttagacttcagaatatgaacttctcttgggttatcttttaagttgatgtaattgatgttttgatatttttatatgatatattgattgcttggattattatggggatt

SEQ ID NO: 128452 - DNA, 1344 bp, Zea Mays
gttgacttgtttctaaatcatatattgtgttgtaccaattgaatcatactgttcagatttcattggacagagttatgagtgcagtggaggaagatggatgtagtttacggtgtgatctatgcgacactgagattgtacacagcatggcagaactcctgcttcgtggattggccacagcttcagtggacagcaccacgggcgatatattcaagagcgcatcttctgtagctgctgctgtgaagactgagctagaaaattatatgcttgtgagaactgaatcgcttatccgtgagtttgtcgatggagcccaggatcattcagatcaattgatgaaagcctccacaaggccaaccgagttcctatcagacttgattggcgacttcgtggcatccaaaaggaacttgctgagccatgtgtctgggtttttgtccagtgaaagccgcttgaacagaattaaagattttatgcagaagatggagatggagaatgtgtggacactggacgtaaggcaggctacctcagagactattcttgaaagcatagacatgaagtgcattttccactgccccgaaaaatttgttgagcaagacaagctggtagaccatagaagtcggtgcaaatttagagtcgtgggctgcgaaaatgatggatgctcagtttcactttctgccattcatagtgaggagcatgactccatctgtccatttaaggccctgccatgtgagcagctgtgcgagcaacatgttatgcgcagcgagatggataaacattgtgcaacagtttgtgctatgaagcttattaactgtcctttctaccatgttggatgtgaaacagcctttccacaaggtaatcttgagaaccactgttcgaagctacttcaaacgcatatgttgtatgttctccaagcaagtacaagacaaaatgctgctgttaatgatatgaatcaacgattacaacttcttgagaaggctcagtcacttaacgaaatctctggggctttagatgttaggtcgctcactctgataataaaggagcaagaagcaaagatcaaggatcttgagagcggtatcaaagcacaagaagcaaaggtgaagaaacttgagaacgagcttaggtcgaagaatgcacgataacttcctacacaaaccagagtggcatactttaggacctgtaaataatcagtagcactgacatatatttggaaattatgtttttttgttcatataaaaagtatagagaattgcagggtttagacttcagaatatgaacttctcttgggttatcttttaagttgatgtaattgatgttttgatatttttatatgatatattgattgcttggatt

SEQ ID NO: 128453 - DNA, 600 bp, Zea Mays
cggccatggagcaagaaacacctgtccagagcacaggagtaactttggtgaacaatctgcaaggataagagataaattagatgtatcgataaattataagttctgagggccaatgccttcaatcatcgcttgacgttgcttattcagtatcatctttctcggggactcagctccattgcattcttcaaaggagctggaaaacatgattgaattgggatgatgtttacattcagaaatgctggggttgtttttcccaaaacaaggttacctatcagaatctggaaatgctttagttgaacgaagacgcaggcagatctgcagccagatgtttttggattgtcaatacatgctgaaatccattgaattgtcaagatggacgcaagtggcataaaatattcaatcacaaatctcccataaaatgcatgttttacctgaccaaatttgctgtccagttcgtaccaactagcccccgattcgttctcagtgagaacaactatagttacagatccaataactttgcatttgcacacagtgtcccagtcatatattgttatggttacctatgcagaaagcaacaatgcatgtcacacgttttatcat

SEQ ID NO: 128454 - DNA, 3294 bp, Zea Mays
ccacgccgccgtcctccgcaccgtccacgccgccgtcctccgaccaccgcgactctgccgcagccgccctctgcaccgtcctcgccgcgcaccaccgcgactctgaccgtggcccgcagtcctgcctcgctgccagtactgagcccgcaggcggcgcccgcagccgagccggaggtcgccagcgccgccagaagacttgcttcgagggattccctacgggctcaaggtcaatcaggtgtggtcgcagttttccatttttagggttcagctaaactggccccccatgtcccatggtgtgcccgcccccatgttagaagagttggcgagggaggcaacactcgccgatgtgtctattcttgtagatgggaatgacgcagagctacatgtacatggcaatggcgcagaggtacatgataatggcacagagttacatggcaatggtgcagtgctgaaaagagttgaaatgccccaggatttgggagcgatttcagccaaggaggtgccgctgcatgagggcaaggaggtgatacttgtggatgataatgacagcgggcaggaagatgatgcagagggtaaggtggatgagaacacacctcgtgttgggctgagattcaaaacttatgatgacgctctcaagtactataaacaatatgctgaggattctgggttttcagcaatcattctgaagtcgtcgtatttaaagtcaggggtgtgccgaaggttggtgattggatgtagtcgagctgggagagggagagcaaatgcgtgctatctatcaagagagtcgaccaagataaattgtccagcaaggatatctttgaagttaaggcaagatagatggcttcatattgatgatgctaagctcgagcacaaccatccatacaaccagtccactacatcacttattaattgttataaaaaactaacagatgccaagaatggggtatctgcctcacgattgaagggtcgcaggaacattccagctgaaaaagagcaagggaacttcacggagataggaaggcttaaatttggggaaggagacgatgaatatatccagaagttttttgggaatatgcagaacaagaatccttacttcttctacttagtagatttggataatcagggacgtttgaggaacttattctggagtgatgctaggtcacgggcagcgaatgattactttggtcatgatgttgtttactttgacacctcatacttgacagagaaatatgatttgccacttgttttcttcactgggatgaataatcatggtcagcctgttctgtttggtactgctttactgtcagatctaagtgttgatagttatgcttggttacttagagcatttttatcatgtatgaagggtctctgcccaaaggcaatcatcactgaacattacaatgctattatggatgctgttcaagaagttctccctgaagttagacatcgcctttgcctgtatcgtattatgaaagatgtagcagagaacttgaaagaacatgcagagtttaaaacaataaataaagcactgaagaaagtaacatatggatctttgaagataccagagtttgaaatggagtggaagaagattatcgaagagcatggacttggaggaaatgagtgcctcagttccctttatgagcaccgccaactctgggcacctgcatatctgagagataaattctgggcagggatgtctatttcacagcgaggggagtctatttcctcgtactatgatgggtttgtgtacccaaaaacttctttgaagcaattttttagtaaatatgagatgatattagagaacaaatacaaaaaggagtggcaagcagatgaagaatcttcccataggtctccattgactgtaacaaaattttacatggaagagcagctggctaaagcctatacaataaacatgttcagaaaatttcaagatgagttgaaagcaacaatgtattgcgatggtatgccaattaaagttgatggccgacttgttacttttgaagtgaaagaatgctcatacatggaagatggaaaggacacagagagcaggacctatgaagtttacttttgtaaagaagaacccaaagttgaaattgagtgtgaatgtggtttcgttcagttcactggcatcctgtgtagacatgcattgtctgtgttgaagttgcaggagatatttgagatcccaaaagattatgttctcgatcgctggagaagggactataagaaattatattataatgcaaagaaacctaatgaaatgcctcttagtgacattgttgaacgctctgattatttgttcacacaatgtagtcagctgctcaatctagggtttgtatctgagagtaggtaccttgttgctctgaagttactgagagaaatggaaagatctcttctggatgatggactacctgctagagacaggcagccaatgcttctttcctttgaggctgatgcaccagaaaatggtcaaggcctttttagtcctcagttttcagagggcgtaaagaattctcagtcagcccatgcaaagcgccgtggccggccactgaagaaagtgacagaatctactgatgataccgtaacacagccaaataaagaacagcaggatttcctacgatcatcatttgtcacagaaaatacaaatatgatccaagggccatcttctgcctcccatcttgaaggtcctcacatgggagtgcaaggaggcattgatttaatggatggaataccaaatctctcatttggtaatcattttggaatggatattaatcaccaacatcaagtacccaaccaccaaaggatgcagcagaacaatttcatacaggtgcaggcagaaccacatgggtttgggaatcagtgggtttaccacccaatgttgcaggataatccagtgctaagaactcctgcacgaagagcagggtagtgtgtattcattgctctaattatttcagttaaactttaggcaccatgacttctcaggctcctgtaatgacttcctgagtcctgaactaacctaaggataccgaggctgtacgtggcactggcactccagaatccagatggcaagaacttggcagtgaatccaattgattctaacatttttgttatatgatactgttagctgctctcactaggatgaatgttcaaactgtacatagcactggctctataatatgatctttttatttcctgatttgcgccagaactgatattttgtggcagaggacgcgtattgtttagcatattggtttgtttcagacaaagatcagactagtatgctgtatgcctttaaaa

SEQ ID NO: 128455 - DNA, 3120 bp, Zea Mays
tatggtctgaatctgctggtcctcttcttcagggctcaaggtcaatcaggtgtggtcgcagttttccatttttagggttcagctaaactggccccccatgtcccatggtgtgcccgcccccatgttagaagagttggcgagggaggcaacactcgccgatgtgtctattcttgtagatgggaatgacgcagagctacatgtacatggcaatggcgcagaggtacatgataatggcacagagttacatggcaatggtgcagtgctgaaaagagttgaaatgccccaggttagagaggtgtatgatttgggagcgatttcagccaaggaggtgccgctgcatgagggcaaggaggtgatacttgtggatgataatgacagcgggcaggaagatgatgcagagggtaaggtggatgagaacacacctcgtgttgggctgagattcaaaacttatgatgacgctctcaagtactataaacaatatgctgaggattctgggttttcagcaatcattctgaagtcgtcgtatttaaagtcaggggtgtgccgaaggttggtgattggatgtagtcgagctgggagagggagagcaaatgcgtgctatctatcaagagagtcgaccaagataaattgtccagcaaggatatctttgaagttaaggcaagatagatggcttcatattgatgatgctaagctcgagcacaaccatccatacaaccagtccactacatcacttattaattgttataaaaaactaacagatgccaagaatggggtatctgcctcacgattgaagggtcgcaggaacattccagctgaaaaagagcaagggaacttcacggagataggaaggcttaaatttggggaaggagacgatgaatatatccagaagttttttgggaatatgcagaacaagaatccttacttcttctacttagtagatttggataatcagggacgtttgaggaacttattctggagtgatgctaggtcacgggcagcgaatgattactttggtcatgatgttgtttactttgacacctcatacttgacagagaaatatgatttgccacttgttttcttcactgggatgaataatcatggtcagcctgttctgtttggtactgctttactgtcagatctaagtgttgatagttatgcttggttacttagagcatttttatcatgtatgaagggtctctgcccaaaggcaatcatcactgaacattacaatgctattatggatgctgttcaagaagttctccctgaagttagacatcgcctttgcctgtatcgtattatgaaagatgtagcagagaacttgaaagaacatgcagagtttaaaacaataaataaagcactgaagaaagtaacatatggatctttgaagataccagagtttgaaatggagtggaagaagattatcgaagagcatggacttggaggaaatgagtgcctcagttccctttatgagcaccgccaactctgggcacctgcatatctgagagataaattctgggcagggatgtctatttcacagcgaggggagtctatttcctcgtactatgatgggtttgtgtacccaaaaacttctttgaagcaattttttagtaaatatgagatgatattagagaacaaatacaaaaaggagtggcaagcagatgaagaatcttcccataggtctccattgactgtaacaaaattttacatggaagagcagctggctaaagcctatacaataaacatgttcagaaaatttcaagatgagttgaaagcaacaatgtattgcgatggtatgccaattaaagttgatggccgacttgttacttttgaagtgaaagaatgctcatacatggaagatggaaaggacacagagagcaggacctatgaagtttacttttgtaaagaagaacccaaagttgaaattgagtgtgaatgtggtttcgttcagttcactggcatcctgtgtagacatgcattgtctgtgttgaagttgcaggagatatttgagatcccaaaagattatgttctcgatcgctggagaagggactataagaaattatattataatgcaaagaaacctaatgaaatgcctcttagtgacattgttgaacgctctgattatttgttcacacaatgtagtcagctgctcaatctagggtttgtatctgagagtaggtaccttgttgctctgaagttactgagagaaatggaaagatctcttctggatgatggactacctgctagagacaggcagccaatgcttctttcctttgaggctgatgcaccagaaaatggtcaaggcctttttagtcctcagttttcagagggcgtaaagaattctcagtcagcccatgcaaagcgccgtggccggccactgaagaaagtgacagaatctactgatgataccgtaacacagccaaataaagaacaggatttcctacgatcatcatttgtcacagaaaatacaaatatgatccaagggccatcttctgcctcccatcttgaaggtcctcacatgggagtgcaaggaggcattgatttaatggatggaataccaaatctctcatttggtaatcattttggaatggatattaatcaccaacatcaagtacccaaccaccaaaggatgcagcagaacaatttcatacaggtgcaggcagaaccacatgggtttgggaatcagtgggtttaccacccaatgttgcaggataatccagtgctaagaactcctgcacgaagagcagggtagtgtgtattcattgctctaattatttcagttaaactttaggcaccatgacttctcaggctcctgtaatgacttcctgagtcctgaactaacctaaggataccgaggctgtacgtggcactggcactccagaatccagatggcaagaacttggcagtgaatccaattgattctaacatttttgttatatgatactgttagctgctctcactaggatgaatgttcaaactgtacatagcactggctctataatatgatctttttatttcctgatttgcgccagaactgatattttgtggcagaggacgcgtattgtttagcatattggtttgtttcagacaaagatcagactagtatgctgtatgcctttaaaa

SEQ ID NO: 128456 - DNA, 611 bp, Zea Mays
atggatttaaaccgacttaataccacccgatccacatgaattaacggtgaaacgaacaagcccttaaactgatttcaaaagcaggaacacagtagttttctttcttagagaatgatttacaataatataaaacatatatacggtagcatcgatgttttaaatagctaatttctgaaattgccttttacagctgtgaaaactgtgatttgaaaccttgattagcatcagtaccagtatatcagccatccgtccttattaggtttccctgtgtaatttcaggcaccatgacttctcaggctcctgtaatgacttcctgagtcctgaactaacctaaggataccgaggctgtacgtggcactggcactccagaatccagatggcaagaacttggcagtgaatccaattgattctaacatttttgttatatgatactgttagctgctctcactaggatgaatgttcaaactgtacatagcactggctctataatatgatctttttatttcctgatttgcgccagaactgatattttgtggcagaggacgcgtattgtttagcatattggtttgtttcagacaaagatcagactagtatgctgtatgcctttaaaa

SEQ ID NO: 128457 - DNA, 468 bp, Zea Mays
tttgttgatactgctaaactgaatatgaacatcattgtgaagaagttgagaaggaaattttttctaccaagaaactgttagacgaacaatcttgcattattgccgagtctcaagctgaacagaaacaacaatacgaggttataacaaaattgcatgcaagaattgaggagctagagcatatggaacatgaacataagaagattcaaaggcagcttgatgcatacaaagagatgatgggcaacacattaagatatgctcactgcctaaaagatgaagcttcaaagcaggaaagcaccttgcagttgaaattgacgaaggcatgaagtgctcttgatgaagcaaactatgcccttactggcaagaagagtgagctgagccagttagaaatcaatctccatcatcaaaagcaagcaactgagcataaatctctataatcagtgtgcagaggttttgatgagctgtactgta

SEQ ID NO: 128458 - DNA, 2418 bp, Zea Mays
atggaggtggaggaaccgctcccaacgtccaagaacccccgccgtgctcggcgccgggacctcaacgcactggatcccacattggaggagtccgacggggaggatattggtgttccggaagttggtatggtgttcaataatcacacagaagtcaaccgattctaccgccggtatgcccgccgtgttggctttggtgtctcagtaaggaggtcttcgttctcacgagaagggacctgcttatatctggagcttatgtgctgcaaaggagggaggccacgttatgagccgaagtttcggaaaagggcttcatcgaccactaactgcccagccaaagtacgagtgaagttgtggggagataaattgttgcatatagagttggcgatccttgatcataatcacccagtgagccctgcaatggcaaggtttttgaactcttataagcagctctctggccctgcaaagaggcggttgcgtatgggtggccctgggactatgcctgttgaagagtcaagcaagatgcccatggataagctgggggagcttgagcagcttctgtttggtgagagcaagcacaacagctttgtggagaggggtcgtttgaagctccaacctggagattcggaggcccttcggcttttcttcactcggatgcaggccaaaaatgccaacttttttaatgtcattgacctggacgatgaaggctgtaccaggaatgttttctgggcagatgcacggtctagagccatgtgtgagtactatagtgatgtcatcacacttgatacatcatatgtggctagtaaatatgatatgcctcttgcaacatttattggggtgaatcatcatggacaatctgtcttgatggggtgtgccctgctttctgatgaaacagcagaaacctattcatggctacttaagtcttggatagcatgtatgtacggcaatcttccaaaggctattgtcactgactattgtaggggcatccaaagtgctgtagctgagattattccgggagtccgtcatagaatgtgtttgtttcagataatgaggaaggccgcagaacgtttaggtgggctgtcagagtacagagctatcaacaaggcgatgcataaggctgtatatgattctttaaccattgatgagtttgaagaagaatggaatactttaattacatatagtgggcttcagagcaatgactggttaagatcactttatgaatgtcgatcttcatgggttcctgtttttattaaagatacattttgggcaggaatgtctactacacaaagaaatgaaacaatcactcctttttttgatggatatgttgatttgaaaactaccttgaaacaatttcttgtcaagtatgagatggctttgcagagtaaatatgagaaggaggcccaagcagattttgagacgtttcataagcaacgcccaccggtatcaaaattctatatggaagagcagctctcaaaagtatacacacataatatgttcaagaagttccaagatgagattgaagccataatgtactgccatgtatctttaattagtgttgatgggcctgtctctacattcaatgtcaaggagtgcattttctttgaagatggtaaaaggactatgagtaaaatttttgcagtgacatacaaagtggacgaaaagaatattagctgtatatgtggaggtttccaattcagtggcatactatgtaggcatagtctctcaatgctcaagtttcaactggttcgtgaaatcccacaacattatattcttgataggtggaagaaggattttcgacagttgcatgtgatgagacgccctccaagcgatcttgttcctaacaatcgcatggatcgatatgactatttatcaataagatgtttgcaacttgttgactctgcagtcctatcagataagtatcgccttgctttgaggttggtaagggagacagagaaatttctgctaaatagcaacacacatgatgatacacaaccaaggatcaagtctcgtgttcctaaagtaaataaaccaaatattgtgactggccaaaccatggtgggtgcagctactggaaatggaaatgatggtctcaaaggaccagaggctacagcagtcacgcaagtaccacaatcccaaaagggaggagcagaaaaaggaatagttcctactggctacattggagtaccagctaatctccaacaatttgtaggcaatcaaacagcatttcggccaagcattgtgtacatggtaccgctagagctaggagattgggaggagcaaaggaggtcacaagggagcatgcttgttggtgatgtgaggaagacgagtggtggtgtgggctgtgtggcgataaggaggccgcgagtcaccctgggtgccaaatctgcactattccaggatattgatgcttttcttgcatattga

SEQ ID NO: 128459 - DNA, 379 bp, Zea Mays
ttatgatgccagtgatgtaccagcagatgttccaggtgcctccgaagccaaatgagaccgtgcaggatacttcagccaatggaaaaagtaagcgacctcgcggtcagaagctcacagagacatcccaacaggcaaatggaaccccagcatctgcatctggctagggtggactactaacattttgaacaggatttctgtacatacgttgacttcgttgacttcatgccgtgagaaattttacatatggacgctggcactaacaattacctcaatgttgtccaaggtatctggcccaggaccggaaattatctctcgcacactttctttttgtgtgtggctgatttctgcaagacaggttccacctaatgtacaagtcccc

SEQ ID NO: 128460 - DNA, 149 bp, Zea Mays
cttgtcctttttatgctatgtaaatgaatgttcttggaacagctctatcatggctcatgagtacggtgtcagttgccttcgaattcccattgtcgataccagatcgatggctaatgcatatagaaatataaaggggacaaattatgatt

SEQ ID NO: 128461 - DNA, 3255 bp, Zea Mays
atggccgtcgagggtgagggcgcagggggagatccggcggggtggagcaccgggcttgtgtgtggtgggagctcgctgtcggtctccacgaccggcgatgacaagagcaggcaacagcagccctgtcgtgctggttggcagccgccgcgaccgactgggagggaagagctgggcagcgccgagcgtccaagggtgggcagatctgtgcgcccggaccccgatagggctaccggaggaataggaggcgaggtcagcattaccactcaaagaaggatcaaggaggacacgacggggaggacggaggggcgccggcgtcgtcgccacggagggaggagaacaatgggacaaatctgcggggtcgttggtcggggcttcgaccactcgagtgggggcctacggcctcgagctcccggagcgagcagcaggacagcgggggctgcggcgcggggtgccaccattattttcttggttatcctgcgttttaggatgggtgcaaggagcggtatgacggtcacgctcccgctcccgccctctggccttccccctcccgacgcctcgtttccaccccccattggcccctcgccggctcctattccaagaccggcgaccacccctctcccttcgccggcgtcgaaggacccctcccctggtgttcagcgcggcggacgtccggaggagctgcgctacgcgccgtgtcctccttcctctggcctctcgccggctcttactccaagaccggcgaccactcaacttccctccccgacgtcggaggattatccccttggtgttgtgcacggcggaagatcgaaggagcagcgctggatggaggacggtggagcttgtgcctcctctgctgcgtcactagttcagggtgacgtggggaggaaatcctatagggaggctctgttttctcccaagcctgctgcgtccagggacgttggtggttgggtgacggtggttcgtcggcgttcgagcaccttgaagtccctccccagacctgtcccggtggatttgtgcggaagatgcttcaattgtttctcgactgagcaccgtgcggcggtgtgccgtaatcgcgtgcggtgttttttctgtcggttgccggggcaccgtgtgggcgtgtgcccgcgctggcggacggaccctcccatccctggacgcactttggtgtggcggcctatggctatgaaaccttcggagaagactgtctgcggtcgagatatggctgtggctggcgggtctggacctgctacaacgactggtgaaggcgcgaagaagagaactcgccgtggacagaggaagaggaagtcgggcgctggggggcagttgcctcctccgcctgccttcggcctggataagccggtgagctttgtcgggcgttgtggaagaattgatcgggctgaggaggaacttcgtcgtgcactgatcgtcagtgttgtaggcagggaggattctggctgcgccgtggaggtgcgtgacgcgatcgcctcgaggttttgccttgaagcagggtcgctccgcatacgtcgtgttgcgcctaattctttcctcgtcttcttcccctcggttgccgtggctgatcgggtggttggggaggggcaatctcttcatgtccctccgctcaggttgcatattcgaaggtggtctcgtcaggctttcgctattggaggtggacagccgcttgtgcccgttggcgttgaactacgtggaattcctgcgcatctctgggggattgaggctgctgaggctgttcttggtgctttctgtttgattcatggttttttgcctggcttggtcaaggaggaagacatgtctgttctcagactgaaagtatggtgccggtcacctgagctgctgccggcggtggtagatctccttgctgaagagccgatggtctgtggagaggatgggagctgggttcctagcacgttagtgttccctgtttctgtggtggttcttcattctgatggaagttcagcttccggtgtggatcctccagcgccacccccttcgggctttgtcgacgaagatagtgatcatgagcatcatgtggggtggccggggcgccctgcgtcttctgttcgggttccaattcatttgcgtctgggtcagcgcagtcgttctgggcaggtggatgacatgtctgttgaggctgttcatcaggatttggtggaggtgggatcagttgatgctccggctctcccgattgtttcggttgaggagcgggaggcgcctgagctggaggcgcctggtcaccctccagtgttagcgttggatctggcagaggatttgagggtcagttgtcaggaggactggtcttcgcatgttgttatctcgccggctgggccttgcttggacaatcctttggtgggggtccttatgaccgacttggcagaggttgtcactgttgggcagcatggttccgggttctcctatttgctggccgatggtgtttctgctaatgtggaggaggcagtcactgctgggcagcatggttctgggttctcccaattggtggctgttggttctcctgctgttgtctctgccagggttcgaaggtttgagtcttgtcagtcttcccgggatgatagatggagatcaaagccacccgtgtttaaagtttattccagaagaagattatctcaggctcaggtggtccaggaagaccttttactgcaatctgtggtggaaatggttccacctttggaggagttcaagtctgcggttactaagccttctgatggcttgttaccaccccctccccaccgaaggaccaaaagcaggaaaaaggccatgccaagtgattttcggccacggagaagtaggagggtggccaaattccctccagaacttggatccaatgcggctgcacaagtatgtaggcatctgggtttttgtgatgacatggagaatatttctctcaaagatgcctgcaattatgcaaagttatttgattccgggcttttgagtgcacatgtggctgctttggcagctttgtttggttgggaggtccctcagccactgcgtgagtcggtgtcggggctggtgttagatgaatacggggaggaggtgcatgctcctacgccctctgccgagaatggggtggcgcggaggtggaggcatgaggggagagagaaaagaagtagaatggtgaacgaggtgatggcaactgagttgaggaccatcattatcgtgtggaggtatagatggccaaatgggccatgtccggcgagccggttcgaggcacggcccatttaa

SEQ ID NO: 128462 - DNA, 114 bp, Zea Mays
ggctttccctcgaacctgcttcctttttggtgcttcctttttgggccagactggcttaatttttatcaagacgacgacgcactaacaagcatgtgccattttccttttattatc

SEQ ID NO: 128463 - DNA, 1821 bp, Zea Mays
aaccagccccgtccggagggacagacagcgagcgagcgagcgagcacgcccgcggcccgcactgccaagtgccactgcccccagcaacccccgccaccttagcgcccgacggcatgtctctcgcctcctcccaccacctgcggccgtcgccggcgggcccggcgcggcgcccgggctgccccgcgccgcgcgtggcgctctgccggccacccggtgcctcgcccccgtaccgcggccgctgctgcaccatcgtggcggcggcggcgcctgccgcgggcgccggcggagaggcagcctcggcccccgccgccgctgtgccggcggtcgcccccggtgccgccgccagggacaaggtgcggcgccacacgatttcggtgttcgtcggggacgagagcggcatgatcaaccggatcgccggggtgttcgccaggagaggctacaacatcgagtcgctcgccgtggggctcaacaaggacaaggccctcttcaccattgtcgtctccgggaccgacatggtgctcaaccaagtcattgagcagctcaataagctcgtcaacgttcatagtgttgaagatctatctaaagaacctcaggttgaaagagagctgatgcttataaagctaaacgttgaacctgatcagcgccctgaggtcatggttttagttgacattttcagagcaaaagttgttgatatatctgagaaaacacttaccatagaggtagctggagatcctggcaaaattgctgcagtgcagaggaatctaaggaaattcggcatcaaagaaatttgcaggacaggaaaaattgctttgagacgtgaaaagattggtgcaacagcccgtttctggcgattttctgctgcttcttatccagaccttatagaggcattaccaaaaaaaccgcttacatctgtaaataagacagtgaatggcagttttgttcgaccatccaatgctgggggtgatgtttatcctgtggaatcttacgagagctcagctaaccaagtacttgatgctcactggggtgttctggatgatgatgatgcaactggactttgctcgcataccctctccatccttgtgaatgattgtcctggtgttctcaacattgtaacaggagtctttgctcgcaggggctacaatatacagagccttgctgttggctcagctgagaaggaaggcatttcacgtattacaacagttgttcctggtactgttgaatccattgggaagttagttcagcagctttacaagcttattgatgtgcatgaagttcatgacattacccactcaccttttgctgaaagggagctgatgcttattaaggtttctgtaaacactgctgctcggagggaaattctagatattgctgaaatcttccgagcaaaacctattgacgtttctgaccatacagtaacccttcagcttactggagatcttgacaagatggttgcactacaaaggttattagagccatatggcatctgcgaggtcgccagaactggacgagtggcactggtccgtgaatcgaaggtcgactccaagtacctccgcggttactctcttccattgtagcctggcatttgtgattggtggtggacccgataaagagcttggtttgttgttatagatcagaccatctcgcgctgggatgtgttgtgcaattacaggacttgtttctttcatgttgtgaactccctggcctgcgagttcaataatgcccctttttaatgcgcgttgaggttgcatatgtatcccatcgactgtccgaataagatgcatagcataactgtttacttcagcgaagagagattcgaaatca

SEQ ID NO: 128464 - DNA, 952 bp, Zea Mays
aatgcagcccaggagtggagaaggagggcgtggcactggtacccgattccggttccgggtaggggaggaaggtaagcgaagaagcatccggactctctcgctcgagggtagggcagggcagggcagggcaggcggcgatccgaatccaatcgccggagggaggaagccaccggtggccgcagtgagggcggcggaggtagaggcaaagggatgacgcgcgggaagcagaagatcgacgcgcagcggcgtaacgcggagcgaaaccagaaatccaaggggtctcagctcgaggcccgcgccgtcggcctcaagatcgtctgctccatctgcaaggtaagccggggcccttcgatcgatctccagccatcgtgtggacctgctgggttgcctgggtagtagatccggccagcccgccagatccgtgctttgccctgcccctattcaggcgaaggaatagtgactaccgcatcacatcgtacggcacggagtatatctatctagcgcctcactttatctgcacaaaaaaaatcgtgccaacagattgaaatgttcctgctgcatatataccataagaataagattgccctaaccttctttaatcaggcagtttgtacgtattggtgccttggtagtagtgttacctaggcactgtgactcgaagtggaatctactagccagtgtaaccttctcctagcatgatttgatcccagagctaatacttcagaaacagttcctgccgtggaacgttttgtgggttcgtctctaaacatggttcagctgtactcttttatttgtcatccagtaatttctctatatgatggcgcaaaggttactgtggcatacttactgtcttctatagttctatattttctgcattcgtttctgctcacaagtaaagttgtgggttcattatgtatgtggatgccttactttttagctggctagttgcatt

SEQ ID NO: 128465 - DNA, 1097 bp, Zea Mays
aatgcagcccaggagtggagaaggagggcgtggcactggtacccgattccggttccgggtaggggaggaaggtaagcgaagaagcatccggactctctcgctcgagggtagggcagggcagggcagggcaggcggcgatccgaatccaatcgccggagggaggaagccaccggtggccgcagtgagggcggcggaggtagaggcaaagggatgacgcgcgggaagcagaagatcgacgcgcagcggcgtaacgcggagcgaaaccagaaatccaaggggtctcagctcgaggcccgcgccgtcggcctcaagatcgtctgctccatctgcaaggtacaattggcaaatgaaaaacagctgaccgatcactatggatcaaagcatccaaaggagaaacctccgagcacatcgagcaccgaataaccatggctggtcgtgacgcagaaatatagatcctgcttggctggtttgaggatctttaagtccgtctgatccatgccttggacctcaacgtcagttatatactctctagtgtgttcatttcctcttgtttcaggtattgtgttgtcgtgctgccaatgtgtctccaaactgtatgtggtcaccatggcattgggatgatgcgaaaaaattatgagcgtatccaatgtttgtgtggcttacaagatggtttgtgcccgtgcgttcgctccctaaacggcttcgcccgtgccgcttgaatggtgccgtgcttccgaatgaatgaaatgaaatgacgccccgtttggatcactagaattgaattctattctaataatagtaatttaggcatatatcaaattaagctaattcacttttatacaaacgccccgtgaaggaaattggccggtcgatcccaaacaaggaaggctcctgctcctctgactcggatgttatgccattagccggatgtaattttcttcttaatcctcgaaaatcctagaggtaatttaaattttcaaactagcctccttatataaatgtctcttagttttgtactccttgcgctctaaattaactgcacgtctcgcataacatactagcccttatataatattaatgtttaccaaataaacatt

SEQ ID NO: 128466 - DNA, 811 bp, Zea Mays
gttggatcgtaactaacgctagagaagcactccgaagacctgctctccttcgttctgtttgttgtttttcttctcccgtccgcagtccgcttggcgtgcgcgacggctagggcgaccgccgccgccctacgccctacgtccagctgcccatgtcttcttcgggccccttgccggcgggaactcaccagaccaggaatcgtgctggcaaccggcgcaagtctggaggctggactgctgcaatcaacatgtacaatgaccaaacaattgacccctcagagaaaccggtaatgtattctggatctagcagctcatcatggggtcacctgaagcttcctcatcagatgaacttcctcgaggagttgcgccgtgcagtggacgctcatacagaatttgcgtcgcctgtcgtcacctggaactaatcgaagtcagcatctgcatcattatgcgttatgactaattttcgaagtcagcatctgcatcattatgcgttatgactaatttatggaaggcaggctgttcgccaggtctatgtatgatgtatcccatacacggatgatgtgccaaaaggctttcgtctgacctgcagctgcttctggaatctgcatctgtacaattgtaccattgttacccctggccttgtagctgcaaagcagtttgttgtaacaattaaatgaggcgccggatcctcacgccatcgaaagtttgaaacagcttggttgttgtatggtagttccaagacttggtgattataatgtgcgcattttctcgacctggagttttagaatatgtagaaggtaatgcttattgaaaa

SEQ ID NO: 128467 - DNA, 938 bp, Zea Mays
gttggatcgtaactaacgctagagaagcactccgaagacctgctctccttcgttctgtttgttgtttttcttctcccgtccgcagtccgcttggcgtgcgcgacggctagggcgaccgccgccgccctacgccctacgtccagctgcccatgtcttcttcgggccccttgccggcgggaactcaccagaccaggaatcgtgctggcaaccggcgcaagtctggagatagggctgataaagctaattactcctacaataatgatggagagaagagcaatgttccttcattaaagaaccttcctccaattgttcatcatgaaacattcttcagcaatgttcagaatgactacaatcaaacaggattagtgcctttggagggatgttctgccagtgaggcttcacagcttctcagtgatcgctggactgctgcaatcaacatgtacaatgaccaaacaattgacccctcagagaaaccggtaatgtattctggatctagcagctcatcatggggtcacctgaagcttcctcatcagatgaacttcctcgaggagttgcgccgtgcagtggacgctcatacagaatttgcgtcgcctgtcgtcacctggaactaatcgaagctgttcgccaggtctatgtatgatgtatcccatacacggatgatgtgccaaaaggctttcgtctgacctgcagctgcttctggaatctgcatctgtacaattgtaccattgttacccctggccttgtagctgcaaagcagtttgttgtaacaattaaatgaggcgccggatcctcacgccatcgaaagtttgaaacagcttggttgttgtatggtagttccaagacttggtgattataatgtgcgcattttctcgacctggagttttagaatatgtagaaggtaatgcttattgaaaacctcagcttttaacttcaacggt

SEQ ID NO: 128468 - DNA, 746 bp, Zea Mays
gttggatcgtaactaacgctagagaagcactccgaagacctgctctccttcgttctgtttgttgtttttcttctcccgtccgcagtccgcttggcgtgcgcgacggctagggcgaccgccgccgccctacgccctacgtccagctgcccatgtcttcttcgggccccttgccggcgggaactcaccagaccaggaatcgtgctggcaaccggcgcaagtctggaggctggactgctgcaatcaacatgtacaatgaccaaacaattgacccctcagagaaaccggtaatgtattctggatctagcagctcatcatggggtcacctgaagcttcctcatcagatgaacttcctcgaggagttgcgccgtgcagtggacgctcatacagaatttgcgtcgcctgtcgtcacctggaactaatcgaagctgttcgccaggtctatgtatgatgtatcccatacacggatgatgtgccaaaaggctttcgtctgacctgcagctgcttctggaatctgcatctgtacaattgtaccattgttacccctggccttgtagctgcaaagcagtttgttgtaacaattaaatgaggcgccggatcctcacgccatcgaaagtttgaaacagcttggttgttgtatggtagttccaagacttggtgattataatgtgcgcattttctcgacctggagttttagaatatgtagaaggtaatgcttattgaaaacctcagcttttaacttcaacggt

SEQ ID NO: 128469 - DNA, 918 bp, Zea Mays
gaagacctgctctccttcgttctgtttgttgtttttcttctcccgtccgcagtccgcttggcgtgcgcgacggctagggcgaccgccgccgccctacgccctacgtccagctgcccatgtcttcttcgggccccttgccggcgggaactcaccagaccaggaatcgtgctggcaaccggcgcaagtctggagatagggctgataaagctaattactcctacaataatgatggagagaagagcaatgttccttcattaaagaaccttcctccaattgttcatcatgaaacattcttcagcaatgttcagaatgactacaatcaaacaggattagtgcctttggagggatgttctgccagtgaggcttcacagcttctcagtgatcgctggactgctgcaatcaacatgtacaatgaccaaacaattgacccctcagagaaaccggtaatgtattctggatctagcagctcatcatggggtcacctgaagcttcctcatcagatgaacttcctcgaggagttgcgccgtgcagtggacgctcatacagaatttgcgtcgcctgtcgtcacctggaactaatcgaagtcagcatctgcatcattatgcgttatgactaattttcgaagtcagcatctgcatcattatgcgttatgactaatttatggaaggcaggctgttcgccaggtctatgtatgatgtatcccatacacggatgatgtgccaaaaggctttcgtctgacctgcagctgcttctggaatctgcatctgtacaattgtaccattgttacccctggccttgtagctgcaaagcagtttgttgtaacaattaaatgaggcgccggatcctcacgccatcgaaagtttgaaacagcttggttgttgtatggtagttccaagacttggtgattataatgtgcgc

SEQ ID NO: 128470 - DNA, 887 bp, Zea Mays
gaagacctgctctccttcgttctgtttgttgtttttcttctcccgtccgcagtccgcttggcgtgcgcgacggctagggcgaccgccgccgccctacgccctacgtccagctgcccatgtcttcttcgggccccttgccggcgggaactcaccagaccaggaatcgtgctggcaaccggcgcaagtctggagatagggctgataaagctaattactcctacaataatgatggagagaagagcaatgttccttcattaaagaaccttcctccaattgttcatcatgaaacattcttcagcaatgttcagaatgactacaatcaaacaggattagtgcctttggagggatgttctgccagtgaggcttcacagcttctcagtgatcgctggactgctgcaatcaacatgtacaatgaccaaacaattgacccctcagctcatcatggggtcacctgaagcttcctcatcagatgaacttcctcgaggagttgcgccgtgcagtggacgctcatacagaatttgcgtcgcctgtcgtcacctggaactaatcgaagtcagcatctgcatcattatgcgttatgactaattttcgaagtcagcatctgcatcattatgcgttatgactaatttatggaaggcaggctgttcgccaggtctatgtatgatgtatcccatacacggatgatgtgccaaaaggctttcgtctgacctgcagctgcttctggaatctgcatctgtacaattgtaccattgttacccctggccttgtagctgcaaagcagtttgttgtaacaattaaatgaggcgccggatcctcacgccatcgaaagtttgaaacagcttggttgttgtatggtagttccaagacttggtgattataatgtgcgc

SEQ ID NO: 128471 - DNA, 1478 bp, Zea Mays
gaagacctgctctccttcgttctgtttgttgtttttcttctcccgtccgcagtccgcttggcgtgcgcgacggctagggcgaccgccgccgccctacgccctacgtccagctgcccatgtcttcttcgggccccttgccggcgggaactcaccagaccaggaatcgtgctggcaaccggcgcaagtctggagatagggctgataaagctaattactcctacaataatgatggagagaagagcaatgttccttcattaaagaaccttcctccaattgttcatcatgaaacattcttcagcaatgttcagaatgactacaatcaaacaggattagtgcctttggagggatgttctgccagtgaggcttcacagcttctcagtgatcgctggactgctgcaatcaacatgtacaatgaccaaacaattgacccctcaggtgaatcaacagtactctaaactctacatttctccatggttatcggctggctcttcaatgttaaatctggcagtgaggaaaaaatttggaccttagtacttactagtgactttcatgtatattattacatgcaatgacgacttcaaagttgacattatattcttgtactttgctcgacctattgtagcagctgttaagaattgagaatttcatactgggtagaggtttttgtgcatatactctgctgcaactcataaaactaatatgttcatattgggcagagagctagtgatgctgtagtgttagtataatatatcatgctttgcactgcaacattaaacaacagtagtcaatcaaagtttggaatacagtttttagggcgtgctacctggaaaggtgtttcgatcaaattgggatttcaataacatgctataaattatattctggtgaactttgtatatcaacctgacacctcagataggtatccgtgcgagtggtgccagtgtgaaacatgttaatgctgttaacttcgctatcttgatgtttgcctagagaaaccggtaatgtattctggatctagcagctcatcatggggtcacctgaagcttcctcatcagatgaacttcctcgaggagttgcgccgtgcagtggacgctcatacagaatttgcgtcgcctgtcgtcacctggaactaatcgaagtcagcatctgcatcattatgcgttatgactaattttcgaagtcagcatctgcatcattatgcgttatgactaatttatggaaggcaggctgttcgccaggtctatgtatgatgtatcccatacacggatgatgtgccaaaaggctttcgtctgacctgcagctgcttctggaatctgcatctgtacaattgtaccattgttacccctggccttgtagctgcaaagcagtttgttgtaacaattaaatgaggcgccggatcctcacgccatcgaaagtttgaaacagcttggttgttgtatggtagttccaagacttggtgattataatgtgcgcattttctc

SEQ ID NO: 128472 - DNA, 1046 bp, Zea Mays
gaagacctgctctccttcgttctgtttgttgtttttcttctcccgtccgcagtccgcttggcgtgcgcgacggctagggcgaccgccgccgccctacgccctacgtccagctgcccatgtcttcttcgggccccttgccggcgggaactcaccagaccaggaatcgtgctggcaaccggcgcaagtctggagggttttattatgcatttcctcagatgcaaccaaatgaatttcgttatgattttaggcacatgctattttgctgtgtggtttgctgggtcgatgcataagcggccctactgttcaccagatagggctgataaagctaattactcctacaataatgatggagagaagagcaatgttccttcattaaagaaccttcctccaattgttcatcatgaaacattcttcagcaatgttcagaatgactacaatcaaacaggattagtgcctttggagggatgttctgccagtgaggcttcacagcttctcagtgatcgctggactgctgcaatcaacatgtacaatgaccaaacaattgacccctcagagaaaccggtaatgtattctggatctagcagctcatcatggggtcacctgaagcttcctcatcagatgaacttcctcgaggagttgcgccgtgcagtggacgctcatacagaatttgcgtcgcctgtcgtcacctggaactaatcgaagtcagcatctgcatcattatgcgttatgactaattttcgaagtcagcatctgcatcattatgcgttatgactaatttatggaaggcaggctgttcgccaggtctatgtatgatgtatcccatacacggatgatgtgccaaaaggctttcgtctgacctgcagctgcttctggaatctgcatctgtacaattgtaccattgttacccctggccttgtagctgcaaagcagtttgttgtaacaattaaatgaggcgccggatcctcacgccatcgaaagtttgaaacagcttggttgttgtatggtagttccaagacttggtgattataatgtgcgcattttctcga

SEQ ID NO: 128473 - DNA, 1457 bp, Zea Mays
gaagacctgctctccttcgttctgtttgttgtttttcttctcccgtccgcagtccgcttggcgtgcgcgacggctagggcgaccgccgccgccctacgccctacgtccagctgcccatgtcttcttcgggccccttgccggcgggaactcaccagaccaggaatcgtgctggcaaccggcgcaagtctggagatagggctgataaagctaattactcctacaataatgatggagagaagagcaatgttccttcattaaagaaccttcctccaattgttcatcatgaaacattcttcagcaatgttcagaatgactacaatcaaacaggattagtgcctttggagggatgttctgccagtgaggcttcacagcttctcagtgatcgctggactgctgcaatcaacatgtacaatgaccaaacaattgacccctcaggtgaatcaacagtactctaaactctacatttctccatggttatcggctggctcttcaatgttaaatctggcagtgaggaaaaaatttggaccttagtacttactagtgactttcatgtatattattacatgcaatgacgacttcaaagttgacattatattcttgtactttgctcgacctattgtagcagctgttaagaattgagaatttcatactgggtagaggtttttgtgcatatactctgctgcaactcataaaactaatatgttcatattgggcagagagctagtgatgctgtagtgttagtataatatatcatgctttgcactgcaacattaaacaacagtagtcaatcaaagtttggaatacagtttttagggcgtgctacctggaaaggtgtttcgatcaaattgggatttcaataacatgctataaattatattctggtgaactttgtatatcaacctgacacctcagataggtatccgtgcgagtggtgccagtgtgaaacatgttaatgctgttaacttcgctatcttgatgtttgcctagagaaaccggtaatgtattctggatctagcagctcatcatggggtcacctgaagcttcctcatcagatgaacttcctcgaggagttgcgccgtgcagtggacgctcatacagaatttgcgtcgcctgtcgtcacctggaactaatcgaagctgttcgccaggtctatgtatgatgtatcccatacacggatgatgtgccaaaaggctttcgtctgacctgcagctgcttctggaatctgcatctgtacaattgtaccattgttacccctggccttgtagctgcaaagcagtttgttgtaacaattaaatgaggcgccggatcctcacgccatcgaaagtttgaaacagcttggttgttgtatggtagttccaagacttggtgattataatgtgcgcattttctcgacctggagttttagaatatgtagaaggtaatgcttattgaaaacctcagcttttaacttcaacggt

SEQ ID NO: 128474 - DNA, 1502 bp, Zea Mays
aaacgccctgagagcagccatttctaacgcttacgcaacccagtccgcccgtgtctctggtgacaccgacacccgtggcatctctctcgtgactcccggagcagaggcatggacaccgcggcggagctggagctggggctggagttggagcagaagccggcggcggggtactggagcgtggtgggcgcgcgcccttgcgacgcgtgcgccgcggagccggcgcggctgcactgccgcgcggacggcgcgttcctgtgccccggctgcgacgcccgggcgcacggcgccgggtcgcgccacgcgcgcgtctggctgtgcgaggtctgcgagcatgcccccgccgccgtcacctgccgcgccgacgccgccgcgctgtgcgccgcctgcgacgccgacatccactcggccaacccgctcgcgcgccgccacgagcgcctccccgtcgcccctctcttcggcgcgctcgcggacgcgccgcagcccttcccgtccccggccttcgctgccgccgcgggggccgaggccccagctcagggggaagcggtggcggaagactacgggagcagcgaggccgaggcggcgtcgtggctgctccccgagcccgacaacagccacgaggacagcgccgccgacacgttcttcgcggagtcggacgcgtacctcggcgccgacctcgacttcgcccggtgcatggacggcgtcaaggccatcggcgtgccggtcgcgccgcccgagctggacatcggtgccggcagcttttgctaccccgaacactccatgaaccacattgtaagccgtacttttaatagtatatccgggatcctcctcacggacagatcacagaggttggatgatggtgataacgtagacgcctttcaatccctccttattgcagttgtcgtcatcctcggaggtggcggtggtaccggacgcgcaggcggccggcctgccggtggtggtggtggtgagcagaggggaggagcgggaggcgcggctgatgcggtaccgtgagaagcgcaagaaccgccggttcgacaagaccatccgctacgcgtcccgcaaggcgtacgccgagacgcggccgcgcatcaagggccgcttcgccaagcgccgctccgcggagggcgaggacgaggcgctggagcacgaggaaggggcgtgcttctcgcccacggggtcggcgcccgccgcgtcggacggcgtcgtcccgtccttctgttgaggggagaagacgacgacgaccccggcagacggctccttaactttgccagctctgtcgaccctgaaccctttttttccctcccctcttctctcttttgatcgaggggttgccagctctggatctgaaattctgaacgcatgggacgcgagctgtgtgtagcatgaataactgcgtagtttgttggatggacgaactcaatcgcgctcgcatggaatggaactcttgtaatccaccctttgtacattaccatctagagttgctccttttttccatgagccat

SEQ ID NO: 128475 - DNA, 1438 bp, Zea Mays
aaacgccctgagagcagccatttctaacgcttacgcaacccagtccgcccgtgtctctggtgacaccgacacccgtggcatctctctcgtgactcccggagcagaggcatggacaccgcggcggagctggagctggggctggagttggagcagaagccggcggcggggtactggagcgtggtgggcgcgcgcccttgcgacgcgtgcgccgcggagccggcgcggctgcactgccgcgcggacggcgcgttcctgtgccccggctgcgacgcccgggcgcacggcgccgggtcgcgccacgcgcgcgtctggctgtgcgaggtctgcgagcatgcccccgccgccgtcacctgccgcgccgacgccgccgcgctgtgcgccgcctgcgacgccgacatccactcggccaacccgctcgcgcgccgccacgagcgcctccccgtcgcccctctcttcggcgcgctcgcggacgcgccgcagcccttcccgtccccggccttcgctgccgccgcgggggccgaggccccagctcagggggaagcggtggcggaagactacgggagcagcgaggccgaggcggcgtcgtggctgctccccgagcccgacaacagccacgaggacagcgccgccgacacgttcttcgcggagtcggacgcgtacctcggcgccgacctcgacttcgcccggtgcatggacggcgtcaaggccatcggcgtgccggtcgcgccgcccgagctggacatcggtgccggcagcttttgctaccccgaacactccatgaaccacattttgtcgtcatcctcggaggtggcggtggtaccggacgcgcaggcggccggcctgccggtggtggtggtggtgagcagaggggaggagcgggaggcgcggctgatgcggtaccgtgagaagcgcaagaaccgccggttcgacaagaccatccgctacgcgtcccgcaaggcgtacgccgagacgcggccgcgcatcaagggccgcttcgccaagcgccgctccgcggagggcgaggacgaggcgctggagcacgaggaaggggcgtgcttctcgcccacggggtcggcgcccgccgcgtcggacggcgtcgtcccgtccttctgttgaggggagaagacgacgacgaccccggcagacggctccttaactttgccagctctgtcgaccctgaaccctttttttccctcccctcttctctcttttgatcgaggggttgccagctctggatctgaaattctgaacgcatgggacgcgagctgtgtgtagcatgaataactgcgtagtttgttggatggacgaactcaatcgcgctcgcatggaatggaactcttgtaatccaccctttgtacattaccatctagagttgctccttttttccatgagccataaatgagtgcacctgctgcctattagttgttgcccttttgct

SEQ ID NO: 128476 - DNA, 1511 bp, Zea Mays
ggtatcacacatcacactgcttgcctgcttggggcgtgtggaggtggagcggtgaactggtttatgctaccgccatctctctagcgttagcttctgcgtgtggccgtgggtgcccgcgcgcggcatgacgaccgccaccgccatcgtcgccgggcatggcctcgcgctgcgtcggagcctcccccttcccaacccgccagggcgagccaccacgtcggtctccctctccgcgcgccccgtcactccagcccgccgcatgattgtcccggctagcccgtcgccgcggtcgccgcgccggtgccggtccatctcctccgagagctccaccgaggcatccgctgcggctgacatcgccgacgaagaagtggaggccgagaacaaggtggacccgcaggcggaggtgtgctacctggaccctgacgtggaccctgagtcgatccgggagtgggagctggacttctgctcgcggcccatcctggacgcgcggggcaagaaggtgtgggagctcgtggtgtgcgacgccacgctgtcgctccagttcacgcgctacttccccaacaacgccatcaacagcgtgacgctccgcgacgctctggcctccgtgtccgaggcgctgggcgtgcccatgcccgaccgcgtccgcttcttccggtcccagatgcagaccatcatcacccgcgcctgcggcgatctgggcgtgaaggccgtgccgagccggcggtgcgtgtcgctgctgctgtggcttgaggagcggtacgaggtggtgtacagccgccacccggggttccaggccggcacccggccgctgctcgcgctcgacaacccgttccccaccacgctccccgagaacctcttcggcgacaagtgggcgttcgtgcagctcccgttctccgctgtgagagaggaggtggagtcactggagaggaggtacgcattcggtgcggggctggatttggaactgctggggttcgagcttgatgacaccacgctagtccctggtgtcgccgtggaatcatctcgcgccaagcctctggccgcgtggatgaacggtctggagatctgcgcgatggaggcggacacgggcagggcgagcctgatcctgtcggcgggggtgtcgacgcggtacgtctactctgggtaccagaaaaccgccgcgtcgacgcaggaggcggaggcctgggaggcggcgaagaaggcctgcggcgggctccacttcctggccatccaggagaacctcaactccgacggctgcgtcggcttctggctcctgctggacctgcccccgccgcctgtatgatggatggtctattctaccgggacgctacttcttctctgtcgtgcatttcgtcttgatagccactgtagcatcatcgacgtctagtgctagtaaattatttttgggaatcagtatacagggattcgtcagagagggaagtgtaaaagaatgtttggagtttggacaaccttgcagttgcaggtttgcaatgctttgtttttgtcttgttgatcga

SEQ ID NO: 128477 - DNA, 1474 bp, Zea Mays
ctctagcgttagcttctgcgtgtggccgtgggtgcccgcgcgcggcatgacgaccgccaccgccatcgtcgccgggcatggcctcgcgctgcgtcggagcctcccccttcccaacccgccagggcgagccaccacgtcggtctccctctccgcgcgccccgtcactccagcccgccgcatgattgtcccggctagcccgtcgccgcggtcgccgcgccggtgccggtccatctcctccgagagctccaccgaggcatccgctgcggctgacatcgccgacgaagaagtggaggccgagaacaaggtggacccgcaggcggaggtgtgctacctggaccctgacgtggaccctgagtcgatccgggagtgggagctggacttctgctcgcggcccatcctggacgcgcggggcaagaaggtgtgggagctcgtggtgtgcgacgccacgctgtcgctccagttcacgcgctacttccccaacaacgccatcaacagcgtgacgctccgcgacgctctggcctccgtgtccgaggcgctgggcgtgcccatgcccgaccgcgtccgcttcttccggtcccagatgcagaccatcatcacccgcgcctgcggcgatctgggcgtgaaggccgtgccgagccggcggtgcgtgtcgctgctgctgtggcttgaggagcggtacgaggtggtgtacagccgccacccggggttccaggccggcacccggccgctgctcgcgctcgacaacccgttccccaccacgctccccgagaacctcttcggcgacaagtgggcgttcgtgcagctcccgttctccgctgtgagagaggaggtggagtcactggagaggaggtacgcattcggtgcggggctggatttggaactgctggggttcgagcttgatgacaccacgctagtccctggtgtcgccgtggaatcatctcgcgccaagcctctggccgaaacggtaccatctttgtgtttcctgtcacctccatttcagcgtggatgaacggtctggagatctgcgcgatggaggcggacacgggcagggcgagcctgatcctgtcggcgggggtgtcgacgcggtacgtctactctgggtaccagaaaaccgccgcgtcgacgcaggaggcggaggcctgggaggcggcgaagaaggcctgcggcgggctccacttcctggccatccaggagaacctcaactccgacggctgcgtcggcttctggctcctgctggacctgcccccgccgcctgtatgatggatggtctattctaccgggacgctacttcttctctgtcgtgcatttcgtcttgatagccactgtagcatcatcgacgtctagtgctagtaaattatttttgggaatcagtatacagggattcgtcagagagggaagtgtaaaagaatgtttggagtttggacaaccttgcagttgcaggtttgcaatgctttgtttttgtcttgttgatcga

SEQ ID NO: 128478 - DNA, 1063 bp, Zea Mays
ctccgatccctcgcccataactcctcctccggcaccgcgctcttgcttcctccctctccccgtctcacgcgcgcgctatatataaagggagagccccagcagcccttcttctccaccgttcttgccgttgcgaaccctctcctcctctcaggccaggccaccaagcaacaagatgccaagcgacgaccaccatcgccgccggacgttcttgctcccggtctactgcccaagcttctcggccaccggggcccccgcgtcaccgccggctgccgcagcctcgacggggcgcctctgctgctggatgaccaggaagaagaggaagcggctcaagcaccgccgtgcgagcaccagcggctgctgggagcgcttccgtgctcatgctgttctgtgatacggcgctatcctcgccgagcttattcctcgacttccaacctattcaccaccgctgtcagaacccttcttgtgacaaaaagttaagcgagcgtcttcttgaccttgcaagactttttgtccggagataatctcctacgaattaccctcttgcatcttgcgactacctctcctcgtctcgcgcctgtcgatccttccatccctctcgtccccgtctatccctcttgagcttggaacactctcgcagctagtagtagctatatattattgttttcctttcacctactttcgcatgaactactctgctatttgctgtaataaagctaagttttccggtgcattgttcttttgcagtagttgcctttcagctagctagtactttggcttcaactttgtccatgcaataatgaaagtgaagtttctttctggtgtatttcagtgtgcaaagcgttaattatcgggtttctgtattgactctccccctgctggccaattaattcttgatccaactggggaataagaatgatattattgagcagtttgttgttgttgacagtgacacagcgcaagtcataacataccgtacactagctagttcgcttgtgctgttcgctcttcattttgcgatatcgatcgtcgaataacatgcaaaactgagaagagaaaaaaaaaa

SEQ ID NO: 128479 - DNA, 653 bp, Zea Mays
ccagccaggcgagccaacaagcaagcaaaagtaaacggggcgaggagctgcggctgagcaggaggagggagccggagatggtgggtctcgtcggcggcagcacggcgcgggcggagcacgtcgtcgccaacgccggaggggaggcagagtacgtgcgccgcatgcaccgccacgcgccgaccgagcaccagtgcacctccaccctcgtcaagcacatcaaggcgcccgtccacctcgtgtgggagctggtgcggaggttcgaccagccgcagcggtacaagccattcgtcaggaactgcgtcgtgcgcggggaccagctcgaggtgggcagcctgcgcgacgtcaacgtcaatcccggccttgatatgcccgcgactgtagcttgtgaaatcaaggcacagcttgtccgcacagccgaggcggctaggcagctcgcgccaatgctcgaagtcgggaggccaagctaccaaggccgcagctcagtctaccaatcttcctcaaagatgatgtcggctatctccgtggctcatttggggtgcaaagacatggacgtcgtggacgtcggagtggtagggatggtggactcgcagagcctatcctcggcacttgagaaactctatttctgggagaggaagctgtatgctgaggtcaag

SEQ ID NO: 128480 - DNA, 694 bp, Zea Mays
agttgatggtttgtccgaagcattggaaatctgagaattacttctgtgaaaattatacggaacaagcagactgggcactcagaaggctatggttttattgagttttcctctcgagctactgcagaacatactctgataaacttcaatcggcagatgatgtcgaatgttgagatgacttttaagctgaactgggcttctgctagcactggtgataagcgtggagatagtggttctgatcacacaatatttgttggtgatttggctcatggtgttactgactccatgttggaagatgtgttcagagctaagtacccttcagttagaggagctaatgttgttgttgatacttgataggatgactggatggcccaaaggatatggtttcgtgcgttttggagatctgaataatgcattgtgaagatgtacatttgtgcttgtttgatctgaaaaggggacaacttttagatatagcataataggatatgaagatgaaagatctgtacttagaaatttgttcatgaatgctttgtttgacatttaacttcgtatgctggcatctcagtgtattaagtgttaatgttacaattattcttggatcaacaccattcgagtatttgactattgtttgtcacgtgcacttattattcttgcatcgctattttgaaccaatttttaagttaccgtagcaacgcaa

SEQ ID NO: 128481 - DNA, 765 bp, Zea Mays
accgtcgttcttgccacacacctgaccgaccttgcctcctctccctcctatgccaccaaaatgcctagccccaatcaccactactgccgcttcctcccggtctgctgcctaagcctctcgtctgccagcgatccgtcgtcgtccccgccggctgccgcagactccacggggtgcctctactggacgacctgctggaagaagaggaagcggttaaagcctcgtcccggctgcgagcgctgctgccgtgcggctgctatgtgacggcgctatccttaccgagctttcatgcatgtaccacgccctctttcctcttcgcagtctttgtttcatcactcagcagaattcacgatgtatgtcttcttgaccttgcaagacttttcgctagaggatgaatcccaacttcttgtgcctttccatctcgcacctatcaatcctcccatcttcttcgtctccgtctatccctcttgagcttgtaccgctttgcagttatagctagctagctagctacgcctacttccgcgtggactccgctctctggaagtaagtgtctcctcgtcgcgtgctgccgtgcattgtgttgccggccggcagctacttccgcacgaactctactagtacgctattattctgtgtaatggaaggtttgtgatgtactccctgtttatttgctagttgtccatcgcctttcagcggaggcagcaatagcttgagctttgctactcgtgtaattatacgtctcggaaatgcagttattagttgttcccg

SEQ ID NO: 128482 - DNA, 2522 bp, Zea Mays
gcggcgcgtctcctcgttgccgtagggtttttctcatcgcttctcttaccagagccacctcctcagcaggccgcagctactccacggtgacggccgccatgagagccctcctctccctctcccgtctcgcccgacggcttccagcttctctcagccctgtgagggcgccgacaacattactcctccggcacatccatgcggacgcccctccgccaccgccatctcatgactcgacgcccttcgtctcccgcatcctcgaatcggagccgtgcctgaccccgaacgacgagtcggagccggcatccgatccgaccctcgacgagttcctcgcgcgcttcgtggctgccttccgcccgcgactggcggctgccttccccaaccatgaccgtgacgtgctcgacgagatgctccgcctcgtcgcggacgccgtgctgtgccgcctcaccgggaccgaccgggggggcgatgctattgagctcaatgacgacctctgggcggccgtatgggaggtcagcgcctccgtgcgcgaggctatgcgccgggatcaggtccgcgccgaccttcgccaataccttcactgcgacgaggtgaaggagatgacgcggttcgctgtcgatgtcggcatccgcggttccatgctccgggagctccgcttcaagtgggccggcgagaagctcgacgaggtcgagttctatcgcggccttgatgacaagcacgccgatgccgaggccggcgccgaccgggcgccagtgccgaggctgactgctttgccgaagaggaagggagaggtgaagttcacgatgtacgggctggacatgtctgacccaaagtgggctgaggtggcggagcgagtggccgaggctgaggcgcattttgtgcctgaggaggccaaggctgtagaagggagggcgaagaaggctgaggagcggctgctgtccgttgacccgaggagtggagatccggtgcctgccattgaggagtggaaggaagatctcaggccaaaccgtgtcgattggatatctctgcttgagcggattaaggcacggaatgtcgagttatacctcaaggttgctgaaattctgctagatcaagaatcttttgaggcaaacatccgagattactcaaaattaattgatcttcatgctaaagcaaataatgtggaaagtgcagagagagtacttggtaaaatgaaagagaagggtattgcacctgatgtcatcatatccatcgtattagtccacatgtatagcagggcaggcaagctagagcaggccaaggaggcttttgattttattcgtagggaggattttaaaccagatcggaaactcttcagttcaatgattaaatgctatatcaaccatggagaaccagaacaagcagaaaatctgataaaagttatgagggatacacgtgtcaaacccactagagaaatctacataggtctcttacgatcatatgttcagcgaggcttgatggcatatgcagagagggttcttaagacaatgtcatttgatagagtcgagcctacacaggaactctatacaatatgtatagaagcatatggacgtgttggtgatccaaaagaggcctgtgccatgtttgatcaaatgaggaggaagtttggacacgaagcagatgacagttcaattgctggtgtggtggccgcatacatgaagaataaccaactagaccatgctttgcagtggctgctgagtttagagaaggaaggacttcaacttggtgtcaagacaaatctcatgttactggattggttgtctatgttgcagctagttccggaggctgaacagtttgtgcagaagataaagaatcttggagaagagcccatagaagtccatgtgttccttgccgatatgtatgcgaagtcgtcccaggaagataaagcccgcaggtccctcaagatcttggaagagaagaagaaactattgaagtctgatcagtttgagagggttataagaggccttgtcgatggtgggttttcggaggaggcaaataaattctacaaaatgatgaaatcctgtggctttgaaccatcaaaaacaatcgaggtcgctgttaaggctctcaggattaggggcggttctcatcgcactggtaggtagagcctgtacgccggcagagtggcagtgatctactgggcacgcagtcaggcaaagagggattctggtgtgagaaccttgtggcactgacacggtacaatcaaattgacaaaactcagtgctgaaagatggtttggccaattttttttttctggttgtcaattgtctcgaggcgcgacgttgcttccatagactatgtagttaataggtcctggctaaatgactttgttgtttccagtgatcaggattttcacttgtattagatgaggtttgaagtgattgtaacactgatccatctttcaggttgtgccaaggaaaacatatatccgcgattagtggttattactctgttcagacatgcaatgatgtaagttaataaatattccttctggcttccggtcacaa

SEQ ID NO: 128483 - DNA, 117 bp, Zea Mays
ggagaacacctggaaaatgcttagaaacttttgtgtagaacccttagttgctttgtcacttgtgttatggagtaaataggaatagtgaaataaataacaaaactgctgattctttta

SEQ ID NO: 128484 - DNA, 871 bp, Zea Mays
acataaagtgcatatcagaagataaaataaaattcatgcatggagtactggtaccaaacatgcatgactttacctgcaggtactgctccctggtcaacgacatggttcgggcttgaggtttggtcaccttctccccaaggacggagccgtggtaggtgatgatggcctggatgcgggccttatagtgcatgtccacgacgagcttcttacaggacgtggtggccaccacatccgccctagcctcgtatccagcatcgcatctgaagaaatcctgcatacaaaaacgatgtatccatacattatttcaagaatttgcaacgaatgcgacatattttatattatactaagacttacccacagctcttgcttcacccgctccgccttgttattgaattccctgccgtcccggtctactgcatcgggggcgacggcgtagtggtcgaaggtgaaggctgggcccatcactccggcgtactccacaagtccagggaagtgttccctgcacagcaggccgaggatgttgttgggggggcgacgatgacccccagcataatccaaaaccgtccaagacctgtccaagtgataaataaaaagtattagtttatattatgattttgaacacataatatgaacaagaatgaagaacataaagttacatacctctccccttccggccgaatcaacggtcgtctgtcccgaagtatgggacgcggcgggagactcgcggggcctcgcaggtagatgctcctcgaactagagccgcctgaacctgaggcgtcctgctgctggtcgtcgtcgtcctgctgctggtcgtcgtcgtcctgaggcgccgcctgctgctgcgctgcctgctctgcctcgtgctgctgcg

SEQ ID NO: 128485 - DNA, 1392 bp, Zea Mays
atggccgccggtttagcccgtctccgatccgctgtcgagcggctcgggtcctcccgcgcccgcgcccgtgcccgccccttctccgcagccgttgctgaggccgcggccgcggtgaccgccagctcggggctggggatctggctgctgtcgtcgaacccgcactcgctggcggattccggccaggcggaggatgccgccaccgcaggcggcggaggcaacattgccttccccgctgctgtcggcggtgtcggagccaccggggagcgggagggcaggttcctgttcggagattcatatcgccgaagggtgttcttcaagtacgagaaaaggattaggacgcgcagccctccagagaagatctttgagtacttcgcatccgtccacagcccggaaggtgagatgcacatgttacctacggacctgatgagggcagtcgttcccattttccccccatcagagtccaaaattgtcagggaagggagattgaggggggagcgccaccctggcgagctacaatgtgccccgtctgactttttcatgttattcgatacaaatgctgatggagtcatctcctttgccgagtatatcttctttgtaacattacttagcatccctgaatcaagtttcaatgtggctttcaagatgtttgaccttgaccacaatggggaaattgacaaagatgagtttaggaaggtgatgacactgatgcgatcctataatagacaaggagctgcccacagggatggtttacgctttgggcgtaaggttggtcagccagtggaaaatggtggactcgtcgagtacttctttggcaaggatgggaatgaacatctacactatgataagttctctagttttttgaaacaattgcatgatgagattgtccgcttggagttcagtcactacgatttgaaatcatcgaacacaatatctgcaaaggactttgcgttatctatggttgcttctgctgatatgaatcacatagacaagttattggatagagttgatgatttggatgacaatcttgacctcaaggatctgcgcattacctttgaggagttcaaggcatttgctgatcttcgaagaaggttggaaccatttgcaatggctatcttcagctatggcaaagtaaatggtttgttgacgaagcaggatctaaaacgtgctgcatcacatgtttgtggagtggacttgactgacaaagtagtggacataattttccatgtatttgatgctaactgcgatggtaacctgagctcagaggagttcttgaggtcattacaaagaagagaaaatgacattcgccagccagcaacttctggttttctaggggtgatcgcctgctggctgaactgtacaaagtgttctcttcaacaaatgctgccccagtag

SEQ ID NO: 128486 - DNA, 1301 bp, Zea Mays
cgccgcgggcgcaccggtccagcaagcaacaataaagggcggtgtcgaagaggagcttggagcttggaccgacccgagccccatcgagcgagagaggaaataatgggtgaagaggccagctgcaacgctgccagcgcgatggaggccgccaccaacgccaggccggccaaggagaacggacgcgcgccggctgtggcggaggtagtggcccaggaggcggccgctgacccccggctgcagggcatctccgacgccatccgcgtcgtgccgcacttccccaagcacggcatcatgttcaacgacatcaccacgctgctgctgcgccccagggtgttcaaggacgccgtcgacctgttcgtcgagcgctaccgcgggatgcgcatcgacgccgtcgccgggattgaggccaggggcttcatatttggcccggcagtcgcattggctattggcgccaagttcatacctttgcgcaagcctaggaagctccccggcgaggtgatctccgagaaatacgttctcgagtacgggaccgattgcttagagatgcatgtcggagccatcgaacgacctggtgagcgcgtgctgatcaccgacgacttggtcgcgacgggagggacgctctgtgctgcaatcaggcttcttgaacgtgctgaagctgatgtggtcgagtgcgcatgcctcattggcctcccaaaattcaaggatttctacaagttgaatggaaagcccgtctacgtgctggttgagtcccgggaatcagataaataagaacttatgggtcagaggaaagctggcggttcattccttgctgttgtgattgagcagtggagggacatcgacaagccaaccatgggggtgctttagcgttactaaggctagctactaagatcgacttggtgagaggagaggttagaagtgctgggggggggggggggggggtgggggcgttagtcttgtaggctgagtagattttcagagtactgaagagcttgtagttctgccaggaacatgcttattagttgaagcaagtgtgttgatggtccattgcttgttggattttgtggttttgatttgaagggcgcaaaaacatggctggatcagcttgacggaagaacttggacatcaatacgcttagcatcaagtactagcgaagtaggaacttgctacttgtagcgtgttattcctatctttgaactcgttagcttattagtgacaaaattcacaaaaaattggcacgcgaaacggacacaagtcgtagcagaaaaaaacgtgaatatactatctaaaaataaaaataaaaa

SEQ ID NO: 128487 - DNA, 2025 bp, Zea Mays
cgctggccaagcctggcaggcgcaggcgtgaccgggcagaagcttccgcatccgcagtcctagtcccgcacccggggtcgctgaccggcgacctcatcgccgaggcgaggacgagacagacgacaccgcacccgttaccagcgcggcgcacgaaccggccagttttattcggctgccgtcgcgtgctgcggaatcaggccagggaagtgtgtggggaccggggacagaaatatcctcctgctgctcttcgtcctcgccctcggcgtgctcgcgggcgggcggagcgaggaggcggatcggggagcagagatcccggccggagggatggcgaagggtggcggggagaggggcacgctgctgccggtctcggcggacgacgggaagggcaacgacggagggggaggcggcgacgacgccgtgctgttcaaggggtccgccatgacccgccgaggcggcgccgcggcgctctcctacatggcatgctccgtgctgctagtgatgtttaacaaagcagctctttcttcatacaaattcccttgcgcaaatgtcatcacgctccttcagatggtgtgctccacgtgccttctttatgttctgagacggttaaagatcatctccttcacaaatagtgatccatcagtgccttctgattcactattctttgtgccgtttaggttattgttgcgcaccacacctctttccttggcttatttactctacatgctagcttcgatggaatcggtccgtggagttaacgttcctatgtatacaactctacgacgcacaacagtcgtgtttacaatgacaatggagtatttcctggcaaagcagaagcacaccccacctataataggcagtgtggctttgattgtattcggagcatttgttgctggagctcgagacttgtcatttgatgctcgtgggtatgctattgtctttgtggccaacattacaacagctgtttatcttgctaccataaaccgtataggaaaatctagtggccttaatagctttggcctgatgtggtgcaatggtcttgtctgtggaccttcagtactgttcttgacttacattcagggtgacctaaagaggaccatggaatttccataccttcattctcttgggtttcaggttgtgcttctattttcatgcatcttagcatttctactgaactacaccatcttctggaacacaatcctgaattctgcactcacacaatctatgtgtggcaacttgaaggatttcttcaccgttggaattggttgggtgctatttggtggtcttccttttgatcttcttaatgttatcggacagggactaggctttctgggatctggattgtatgcctactgcaagatcagagggaagtagacggaaactccattcaggggccagtgtgcttaacaaagtagcgttgtttatgctatttgctccttggagagaaattttgtaggtgtcctatatgtattgaacttcagccctcatgaacactacaaaactgacaaggaaatagagtataccgaaattttgctgttgctttatgatcgtttctcttttaaactcgtttctcttttaaactcgaatagacgtttacaatgaataacgtatgtataaggcgagagacttgcagaatacaatgaacttatgtaaaaggcacgtgatgcaaaacgatctgactgaaatccgattactctacatccagtcttcaggctcaaatgtgaaactccttggaagatgatctggcggcccctaaatacaagtttttcatttggctagttattaataacaagtgctggactgcagagggcttgactctcggagtgttgcgtgctttgtgagcaagaagaggaaacgtgtgacatatcatctccagctatgtgtttgcaaggaaattttggcactctattctctccccattggtttttgggctgtagtccctaagagaagtgatatttgttttgttgaccggtggagggaagccctgtcctaaattcctaaaggcaataaaaatggattcaacagcgt

SEQ ID NO: 128488 - DNA, 2534 bp, Zea Mays
tctcaggtggccaggatattttttctggccccttcctgccctcttcacactgacccatgtgttgttctatccctggaaagctatacctccttacccctatcagcttctcctcacatctcctctcgtcgccacccatgctatcaccgctctgatcacaagcaaggcaaaccctcactgttctatcaacgcccctcccttagctagatggcttcagcgaacaactggctgggcttctcgctctcgggccaggataacccgcagcctaaccaggacagctcgcctgccgccggtatcgacatctccggcgccagcgacttctatggcctgcccacgcagcagggctccgacgggcatctcggcgtgccgggcctgcgggacgatcacgcttcttatggtatcatggaggcctacaacagggttcctcaagaaacccaagattggaacatgaggggcttggactacaacggcggtggctcggagctctcgatgcttgtggggtccagcggcggcggcgggggcaacggcaagagggccgtggaagacagcgagcccaagctcgaagatttcctcggcggcaactcgttcgtctccgatcaagatcagtccggcggttacctgttctctggagtcccgatagccagcagcgccaatagcaacagcgggagcaacaccatggagctctccatgatcaagacctggctacggaacaaccaggtggcccagccccagccgccagctccacatcagccgcagcctgaggaaatgagcaccgacgccagcggcagcagctttggatgctcggattcgatgggaaggaacagcatggtggcggctggtgggagctcgcagagcctggcgctctcgatgagcacgggctcgcacctgcccatggttgtgcccagcggcgccgccagcggagcggcctcggagagcacatcgtcggagaacaagcgagcgagcggtgccatggattcgcccggcagcgcggtagaagccgtaccgaggaagtccatcgacacgttcgggcaaaggacctctatatatcgaggtgtaacaaggcatagatggacagggcggtatgaggctcatctatgggataatagttgtagaagggaagggcagagtcgcaagggtaggcaagtacacttaggtggctatgacaaggaggacaaggcagcaagggcttacgatttggcagctctcaagtattggggcactacgacaacaacaaatttccctataagcaactacgaaaaagagctagaagaaatgaaacatatgactagacaggagtacattgcatacctaagaagaaatagcagtggattttctcgtggggcatcaaagtatcgtggagtaactagacatcatcagcatgggagatggcaagcaaggatagggagagttgcaggaaacaaggatctttacttgggcacattcagcaccgaggaggaggcggcggaggcctacgacatcgccgcgatcaagttccgcggtctcaacgccgtcaccaacttcgacatgagccgctacgacgtgaagagcatcctcgagagcagcacactgcctgtcggcggtgcggccaggcgcctcaaggacgccgtggaccacgtggaggccggcgccaccatctggcgcgccgacatggacggcgccgtgatctcccagctggccgaagccgggatgggcggctacgcctcgtacggccaccacggctggccgaccatcgcgttccagcagccgtcgccgctctccgtccactacccgtacggccagccgtcccgcgggtggtgcaaacccgagcaggacgcggccgccgccgcggcgcacagcctgcaggacctccagcagctgcacctcggcagcgcggcccacaacttcttccaggcgtcgtcgagctccacagtctacaacggcggcgccggcgccagtggtgggtaccagggcctcggtggtggcagctctttcctcatgccgtcgagcactgtcgtggcggcggccgaccaggggcacagcagcacggccaaccaggggagcacgtgcagctacggggacgaccaccaggaggggaagctcatcggttacgacgccgccatggtggcgaccgcagctggtggagacccgtacgctgcggcgaggaacgggtaccagttctcgcagggctcgggatccacggtgagcatcgcgagggcgaacgggtacgctaacaactggagctctcctttcaacaacggcatggggtgacgacgacggtacggtccaacgaacggagagggcagaagctagtggctagtgatagggggttagctagctagaagatcccaagtctaggttagagttatttggtcatcgttgtcgtgtttcgacgtgctcaggttctggttcgattctgcacaattaacccgtgcatgcacgcgtgtgcctttctggaagctggtaatggcaggtcagggtaagtaaagttagtgttgtaagttatcctgatgtgctgttaattttgggtagtttcagaaggtctagccaatctcttcgga

SEQ ID NO: 128489 - DNA, 2536 bp, Zea Mays
tctcaggtggccaggatattttttctggccccttcctgccctcttcacactgacccatgtgttgttctatccctggaaagctatacctccttacccctatcagcttctcctcacatctcctctcgtcgccacccatgctatcaccgctctgatcacaagcaaggcaaaccctcactgttctatcaacgcccctcccttagctagatggcttcagcgaacaactggctgggcttctcgctctcgggccaggataacccgcagcctaaccaggacagctcgcctgccgccggtatcgacatctccggcgccagcgacttctatggcctgcccacgcagcagggctccgacgggcatctcggcgtgccgggcctgcgggacgatcacgcttcttatggtatcatggaggcctacaacagggttcctcaagaaacccaagattggaacatgaggggcttggactacaacggcggtggctcggagctctcgatgcttgtggggtccagcggcggcggcgggggcaacggcaagagggccgtggaagacagcgagcccaagctcgaagatttcctcggcggcaactcgttcgtctccgatcaagatcagtccggcggttacctgttctctggagtcccgatagccagcagcgccaatagcaacagcgggagcaacaccatggagctctccatgatcaagacctggctacggaacaaccaggtggcccagccccagccgccagctccacatcagccgcagcctgaggaaatgagcaccgacgccagcggcagcagctttggatgctcggattcgatgggaaggaacagcatggtggcggctggtgggagctcgcagagcctggcgctctcgatgagcacgggctcgcacctgcccatggttgtgcccagcggcgccgccagcggagcggcctcggagagcacatcgtcggagaacaagcgagcgagcggtgccatggattcgcccggcagcgcggtagaagccgtaccgaggaagtccatcgacacgttcgggcaaaggacctctatatatcgaggtgtaacaaggcatagatggacagggcggtatgaggctcatctatgggataatagttgtagaagggaagggcagagtcgcaagggtaggcaagtatacacttaggtggctatgacaaggaggacaaggcagcaagggcttacgatttggcagctctcaagtattggggcactacgacaacaacaaatttccctataagcaactacgaaaaagagctagaagaaatgaaacatatgactagacaggagtacattgcatacctaagaagaaatagcagtggattttctcgtggggcatcaaagtatcgtggagtaactagacatcatcagcatgggagatggcaagcaaggatagggagagttgcaggaaacaaggatctttacttgggcacattcagcaccgaggaggaggcggcggaggcctacgacatcgccgcgatcaagttccgcggtctcaacgccgtcaccaacttcgacatgagccgctacgacgtgaagagcatcctcgagagcagcacactgcctgtcggcggtgcggccaggcgcctcaaggacgccgtggaccacgtggaggccggcgccaccatctggcgcgccgacatggacggcgccgtgatctcccagctggccgaagccgggatgggcggctacgcctcgtacggccaccacggctggccgaccatcgcgttccagcagccgtcgccgctctccgtccactacccgtacggccagccgtcccgcgggtggtgcaaacccgagcaggacgcggccgccgccgcggcgcacagcctgcaggacctccagcagctgcacctcggcagcgcggcccacaacttcttccaggcgtcgtcgagctccacagtctacaacggcggcgccggcgccagtggtgggtaccagggcctcggtggtggcagctctttcctcatgccgtcgagcactgtcgtggcggcggccgaccaggggcacagcagcacggccaaccaggggagcacgtgcagctacggggacgaccaccaggaggggaagctcatcggttacgacgccgccatggtggcgaccgcagctggtggagacccgtacgctgcggcgaggaacgggtaccagttctcgcagggctcgggatccacggtgagcatcgcgagggcgaacgggtacgctaacaactggagctctcctttcaacaacggcatggggtgacgacgacggtacggtccaacgaacggagagggcagaagctagtggctagtgatagggggttagctagctagaagatcccaagtctaggttagagttatttggtcatcgttgtcgtgtttcgacgtgctcaggttctggttcgattctgcacaattaacccgtgcatgcacgcgtgtgcctttctggaagctggtaatggcaggtcagggtaagtaaagttagtgttgtaagttatcctgatgtgctgttaattttgggtagtttcagaaggtctagccaatctcttcgga

SEQ ID NO: 128490 - DNA, 1472 bp, Zea Mays
gacgctcgtcccgcttcctgatcctcacccctgcctgcgcggctcggctcctcggctttccgcgttcgctacggtcggtttgtgccagcagccgtgccggatcgttggccttgcgcggttacaccgtgctccaggcaatggcgagccaacagcaagcaaaaggcacaatcctgtgggccaatcaacactcactaggactctagaagccagggcattgattcagagaactctgagaccatttttgttgcatctttgacaggattacatgatgagtgctcttgtttttcctctggttgtatatgttatccagtgaacacatgtttaattttataatcatttcagtttttatcatgtttaaatctattattttctagctttcgcagtttctaaaaagtgtggtccagtgtctgtacttttatgctgtttaggttttcgcggccactgcctcctcccatcgtggtactcattccttccggactgtcagagagcggggatctatctacgctagtattcagttcttccattactggtctaccacacgatggttccctgtcatggagcggctactgcgaatcctcagcagtttggtgttattgccgcaaaccgctatggttctcctgtgaagccatctttatgccctagtgttgcgtttctgagactgcagggttccgcatttcttcttgggaataaatccttggctttgagagctggtgtggattctcaccgttatgctacatcttcagcatttgcaaagtataatcctgtcaagaacatcaagccactactgtcatccccaaagttgaaaccaagaactaaagttggttgccaagcatccttgtcgtcattcagctaccctgagttatctttcaaaccgaaatggtggtggaggaccctagcatgtgtaccttatcttctgccactgcacaacatgtgggggcatgcagatgctatctatcagcttcatccatacttgcaaagatttagcctgccttacgctttcatcgatacaatggctctgctccctgggtggcttttcctggcgatcttcatgactatatacttctttgttgtgaggcggaagtggtcgccacacttcttgcgcttccacatcatattggctatcctgcttgacacgggctcacaagctctggccactgcctgcaactggaacccaagcattgcttttcagggcaaacaaatggcacatttctggatggcaatggccttcattcaaatcttcacggttgccgagtgtgtaaggtgtgcactttcaggggtgtatgcaaatgttccatttatatctcatgcagcactcatccattcagatcttaacctgtttaggtagttgatcattgcaaagtgcatttttggaattaagaggtactgaattggttaaactgtcgagtagaggactaatcagactatcagagaggaaattaatgtaaccattgctcttcactgcattgttgcca

SEQ ID NO: 128491 - DNA, 2542 bp, Zea Mays
tctggggaagcaagcgtcaaggtaacaatgactgaaatgggagaagctctgagaacctgcatggagcggctggtggttgccagagaagagcgggagcagatcatcgtcgaggcggccaacgagatatcctccaagaagaagaaagtgcgcgagctccagctgaagctggaggacgcgaacaagaagatcgcgaagctcgccgccgagaacagcaacctctgcaaggccgctgacgtcaaggacgcgctgatcggggagctgagggagtccgcagcggccactggggacaagctcgccgacgcgacggcgaggctagagtcggcgcagaaacaagccgggtcgttggagtacgaggtgcgcatgctccagaaggagctggaggtccggggccaggagcgggagtacgacctcaagtccgtcgacgccgcgcgccggcagcaggcggagcaccagaagcggatcgcgcagctggaggctgagtgccagcggctgcgcgccatggtccgcaagaggcttcccgggccggcagcgatcgccaagatgagggacgaggtcgatcagcagcaggcccagacccccacagccagcccgaggcgaccccgtcccgcgacgccctcctcgccgcggtcggccgtcgcgccgttctcgccgcggaccccgtcgccgcggcgatccgtctcgggcggcgccgacggctacgcgttcaggctccgcgccgtggaggacgagaacacggcgctgaagcaggcgctggccaagagggagagcgagctgcagttcatgcagatgaagtacgccgacgaggcctgcaagctgacggcggctcagatgcaggtcaaggagctgacggaggagaacaggcagctgagtgacgccaacactcagtctgaatcctgggcttctgctctggtttctgaactggacaagttcaggtcaggcaacgagaacggtggtgcctgtgcgtccatcatggcatcatctgagatgaacctgctccatgatttctctgaggttgagaagctggagacggcgtcaggtgatcaaaagcgcaacgtgcagcgtgcatctccgcacaaggcggatacaggactggcaacggaagaacagaatggtaatgctcctgtcctggatggtagcgtctccaacggccatcctgagaaggttaggcatatctgggaattagttgtgcagaagcatgaagcgagcggggaaagctttgaagctattattgaacagataagccaggcattggagcagacagctactcgtgccaagagagatggttcggacgtgccaagtgaccagtctgaaatagagaaggcggtgagagatatggttgagcagaccacttccatgatccaggcggcatatgcagaagaagacgacgtcgcaagatcaagagcgctgtcgcaccacaagtctgagatgtttcgccgcttcaagcgcctggttcaggtccgtcatgagctactggaagggaaatgcgaccttggaaagtttgtagacgaggtctgcctcatcctaaagtacgtagtgagccaatgcttctcggatcaagatcagatcgacactgtgagccgtgatacagaggattttgatggagctaagccatcaggtgcggttacagcagacggtacgcatgacactgaaagcgctaaaccaacagcgacttcagcttttcggacagaagcagatggagaaccagttcagtcagttgaaagccagactacggcggccaatcgtctgcagaaacctgatatagaactcatacatgccctacaacacgaggatggtagtagtatcctttcagagagaaaatcggcggcataccgtgagatgcaaagccctgcttctgaggcaagtgtggaacgtcgggcagtgcaagaggaaaatcatttagcaacaaactcagagattctcgcagcggctgataagctcgccgagtgccaggagacgatcacgatgctgagcaagcagctgcaggctctaaagacgccggcaactccaggtcctctagacgcctcctccgcctgcatccccaggacgagctcggcgaagtccgactacaagccgcagtcgctcgcgagcatcctcgccgaggcctccacgtctcccagtcccactcccaccacgcccacgccacaggtgctgtccaaggaagacgaaggcgaggttcgtgctactgctacgccgacgacgaggagcgcagcacggcaggaggagaacgacgccggcggcaataattcgatgcagattgtcgtcgtccatgccgagccgcggccggacgacggtggttccgctgacccgacgaagaggaggaagaagcgcggcacgagcctgctgggcaggatcgtgttcaggaagagagccgaaggcggctcctagaccgactgcggtgacctgcatcgatgcggtggatgcgttctgctgcctacaggtttggcatggatccggccaagtgtgctgtcacgttgtgaccagtggtttttttccccttcttcagcgtgttctgtttatgctgctcccagtgagcgagcgatct

SEQ ID NO: 128492 - DNA, 113 bp, Zea Mays
tttttttcctgaagttcttgtggaaccgggtgaccagatggcaagttgtggaacggtatggattctttgcttccgttgcgtctgccgcgccgtttgatggcatatggttctta

SEQ ID NO: 128493 - DNA, 78 bp, Zea Mays
tttgaaaggtaaacaattgggggattggattagagtgactaaaatctcctcttatataatattgaataaaaagaaaaa

SEQ ID NO: 128494 - DNA, 1375 bp, Zea Mays
atcggctctaccgcgcttaccacgccattcaaagcttcaagagcacgatcacttcggatcccaagaacatcaccggcacgtgggccggcaacgacatctgcggcgagaagagctacgtcggcttctactgtgcaacaccgaccagccgagctaaggagctcacagtgacggcagtagttctcaatggcttcggtctgcgtgcaccgaagctgcaaggcttcgtcgaccagctccccgacgtcgcactcttccatgccgcctccaacaacttcggcaacggcggcattccccgactcacaggccttgaatactcgtacgatcttagcgtcgacgacaatactgacctccaagttcaggactattctgaagttactgggagagctagagccaacattcactgtgttgctgcaatgatcgagtttagatttcgtttgggaactggccctgataagggaggaggcatcattcctggagtcgcggatggcaaggctctactgttgaactacaacgacctgtccgggcaacttcctgcagatcttggcttctccaaactgagcttcctcgccctggccaacaacaggctaacaggcccaatcccgccatcagtagcgcacctgaaagactcccttctcgaggttctcctcctgaacaaccagctctccggctgtctcgcccccgagctcggcatgctcgccaaggcggcggtcattgacgccggcatgaaccagctcaccggcccgatcccgtcgtccttctcctgcctcatcagcgtcgagcagctgaacctggccggaaaccgcctctacggccacgtacccgacgcgctctgcaggctcgccgggcctaccggccgactcgccaacctcacgctgtccggcaactacttcacctccgtcgggccggcgtgcgcggcgctgataaaagatggcgttctgaacgtaaagagcaactgcattcctgggctcgccaaccagaggcgcccggaggagtgcgctgcattcatccagagtcggccaaagacttgcccggccgcggcaaccactgagacgacgtgccccgccccagctgccaatgatgcggtggcgcagggggtgaggaaggtcagggactacttcagctatgtgacgtacgctacactgcatgagtagctgtgtcggcatgagtactagaacaattagccaaaatacaatcacatgcggtgcctcgatagtattttggctaattgttctagtactgtattcatgatgtgcacactgctctgtactactggtgtgcatgtgattgttgtacatttgctcttcacgtgtgttgctgtcacatctagatcatctgatcatttgtactgctacgtccatttaatgaaaaactattcttc

SEQ ID NO: 128495 - DNA, 264 bp, Zea Mays
atggacagtgatttccagacatcgccacgcgctccatacagtaacctttctctgtttttttctttctttctgtcattaaagcgcaccaccggcagcgtctttaaaatgccaccgtgcaagttgttcttggctctcacaagagcctttcgctgcatcaacacctgccgactgctgcaggcaagtaaaggtactcctctcctcccctctgctgcagtcctctgcccgctgcagatcatggaggaggaagcatggcaggagtcactc

SEQ ID NO: 128496 - DNA, 677 bp, Zea Mays
tgtctgtttgtaaagtttatttttacctcttctaatatattggaatggcaaatcttttgcctttctctttcaaaaaagaagcatggcaggagtgtctgcatgggtcctgagagtcgcgtgagcagcgaagcagttcacggatggttggatggagggcaatgaccagctgctgagctgctgctgctcctcctggtcgaccatcagtttgtatttgtccatgcctcgtgtagccggccgtcttcttgccctggcttgtccagttccggaaggcgggcaggcccggtgaggcgtggacagagaccggcaagtcagagatcggcaatagtgagctccagcaggagcctacttgtactccttatttacccgttttaaggttcccttcttcgtgctgttcctcgtcttccttcgtttcttcttgtctgttccctcctgccccagagctgtaccggtgagagcagaagatttcagtagaaagtcctgctttctggagacagtttcagtgtttggttttggaatacgctactgtgatttgctcgtggttatctcccctcgtacagataacagatagcttgtggctttttatttgtgctgtcggatctgcaatcatgtttgatctacttttgaaaggacgcgatgactgttgtcctattttaagcgaaaactccacgagctgaaaa

SEQ ID NO: 128497 - DNA, 1298 bp, Zea Mays
tatcctccaaacctaaccctagcaacacatttcgctccccacagcggcggcggccacagccacacgttctcgcgcgggatctaattccaaacagcactgcccttgcttctaccgttccccaagtgcgctccctctctcgccatccatctcgtgcacgactgggcaaccgttgccgctgtcgaggtgcccaggtcttcatcggtccctcgtcagttcttctccggcccttcgccgccgacaagctcccccagtacttatgttaccaaagcaaggctagtaaatcataccggaaagaatggtgatggcgtcttggtcttgggtctgctagatgcatgcctactgccttatcgcaaagctagcttacctggtcatacgaatttgtagtcggttctgatctaattgcaagtgcatctagtaacttggattttttcgcaaaaaaatatcgggtgttcacgcctggcccctgcgcttgcagctactaaagagacaggagcaaagagttaacaggagatgaatgcccctgaccgttatgagcgtttcgtcgtgccagagggcaccaagaaagtgtcctatgagagggatacaaagattgtgaatgctgcatcattcactgtcgaacgcgaggatcacactgtaggcaatatcctccgcatgcagttgcacagagacccaaatgttctctttgccgggtataagctccctcacccactccagtacaagatcattgttaggatccacacaacgagccagtcctccccgacgcaggcctacacccaggctatcaatgatctagacaaagagcttgagtaccttaagcaagcttttgagacaccaacagaccatcattgaaccttttctactttatgatacaaagatgtgaactatggactacttgatgaactactagatgttcaacacaggaatgcctttggcaaaatttgcatattcactctcccgtcaaactgatacccttaagttcatttgaatctctttttatttcctagaagtatctcgctactttagtcctactaggaaaagttctttgggatctctctttgtaaatgttagtttcgactcttgtttttttccaggttgcatggcatttctttgtgcaattttgtatcgctaaacaacgaaaagttttagttagcattaaccagtggtacatagcaaggcagactgtgtggttctatgggtgtaatgtatttaagaatgttttgtataaagtattgtttctgtaggaaaaagtgcttgatttgacatgaatgtggcagtaattttgatagatttgttgggag

SEQ ID NO: 128498 - DNA, 969 bp, Zea Mays
tatcctccaaacctaaccctagcaacacatttcgctccccacagcggcggcggccacagccacacgttctcgcgcgggatctaattccaaacagcactgcccttgcttctaccgttccccaagtgcgctccctctctcgccatccatctcgtgcacgactgggcaaccgttgccgctgtcgaggtgcccaggtcttcatcggtccctcgtcagttcttctccggcccttcgccgccgacaagctcccccagctactaaagagacaggagcaaagagttaacaggagatgaatgcccctgaccgttatgagcgtttcgtcgtgccagagggcaccaagaaagtgtcctatgagagggatacaaagattgtgaatgctgcatcattcactgtcgaacgcgaggatcacactgtaggcaatatcctccgcatgtaagtacaatttaatttcttttctttaacgcttcccatcttatggtttgtttggttgacatgatacaggcagttgcacagagacccaaatgttctctttgccgggtataagctccctcacccactccagtacaagatcattgttaggatccacacaacgagccagtcctccccgacgcaggcctacacccaggctatcaatgatctagacaaagagcttgagtaccttaagcaagcttttgaggatgagaagaacaggtacgaggacaggatgaagcaggggttctagatgaatggaatggtgtgggagataaacttcccgtgttagttttatcctaggcgagtcaacaatgaaacgaacgcccaaggattgtgaatgtctgatccctgaactaaggttgcttgctgtcgttttactgtcatgcttgtgtcaatattcgtattattgcaaacacaccaatggagttttacattaacatcctcagattgttcgcaactagataattacatgcatgcctgtcttcaacataaaatatataa

SEQ ID NO: 128499 - DNA, 1693 bp, Zea Mays
tatcctccaaacctaaccctagcaacacatttcgctccccacagcggcggcggccacagccacacgttctcgcgcgggatctaattccaaacagcactgcccttgcttctaccgttccccaagtgcgctccctctctcgccatccatctcgtgcacgactgggcaaccgttgccgctgtcgaggtgcccaggtcttcatcggtccctcgtcagttcttctccggcccttcgccgccgacaagctcccccaggtacgcccaccattctcttccgtccatgctttgcgatggtgagcacccactacccaaaccctaactggatctgtcaagtgtttacatgtattttgcctactaacttcgttttttttaattatcggtgtacgtctatgccgtttactgcattcaactctgctcgtttgtttgattcagttgagcagtgacatcgtgagcttatatgctagtgtagcttattggtgtttcaagcaatgtatgtcaaatatctagattagcaatttataaaccacgtaaaaccgtgacagtatcataatggcataagaggttcttttattttgtttgaacattctagtcagagtaagttatgtatctgttttctacatgctgaaggttatactcaaaccacttgtgaaatggctctcaccctatatctttctttagtgaatcaatgttggtattttagtagtagacttcagtcgtcagccatacttagcttttttctgctagtactgtactaatgttttgttcctccaagagaccgggaagtaaaatttaattggttcatatctttggtttatcattgtgtttttttggctattgcagtacttatgttaccaaagcaaggctagtaaatcataccggaaagaatggtgatggcgtcttggtcttgggtctgctagatgcatgcctactgccttatcgcaaagctagcttacctggtcatacgaatttgtagtcggttctgatctaattgcaagtgcatctagtaacttggattttttcgcaaaaaaatatcgggtgttcacgcctggcccctgcgcttgcagctactaaagagacaggagcaaagagttaacaggagatgaatgcccctgaccgttatgagcgtttcgtcgtgccagagggcaccaagaaagtgtcctatgagagggatacaaagattgtgaatgctgcatcattcactgtcgaacgcgaggatcacactgtaggcagttgcacagagacccaaatgttctctttgccgggtataagctccctcacccactccagtacaagatcattgttaggatccacacaacgagccagtcctccccgacgcaggcctacacccaggctatcaatgatctagacaaagagcttgagtaccttaagcaagcttttgaggatgagaagaacaggtacgaggacaggatgaagcaggggttctagatgaatggaatggtgtgggagataaacttcccgtgttagttttatcctaggcgagtcaacaatgaaacgaacgcccaaggattgtgaatgtctgatccctgaactaaggttgcttgctgtcgttttactgtcatgcttgtgtcaatattcgtattattgcaaacacaccaatggagttttacattaacatcctcagattgttcgcaactagataattacatgcatgcctgtcttcaacataaaatatataa

SEQ ID NO: 128500 - DNA, 884 bp, Zea Mays
tatcctccaaacctaaccctagcaacacatttcgctccccacagcggcggcggccacagccacacgttctcgcgcgggatctaattccaaacagcactgcccttgcttctaccgttccccaagtgcgctccctctctcgccatccatctcgtgcacgactgggcaaccgttgccgctgtcgaggtgcccaggtcttcatcggtccctcgtcagttcttctccggcccttcgccgccgacaagctcccccagctactaaagagacaggagcaaagagttaacaggagatgaatgcccctgaccgttatgagcgtttcgtcgtgccagagggcaccaagaaagtgtcctatgagagggatacaaagattgtgaatgctgcatcattcactgtcgaacgcgaggatcacactgtaggcagttgcacagagacccaaatgttctctttgccgggtataagctccctcacccactccagtacaagatcattgttaggatccacacaacgagccagtcctccccgacgcaggcctacacccaggctatcaatgatctagacaaagagcttgagtaccttaagcaagcttttgaggatgagaagaacaggtacgaggacaggatgaagcaggggttctagatgaatggaatggtgtgggagataaacttcccgtgttagttttatcctaggcgagtcaacaatgaaacgaacgcccaaggattgtgaatgtctgatccctgaactaaggttgcttgctgtcgttttactgtcatgcttgtgtcaatattcgtattattgcaaacacaccaatggagttttacattaacatcctcagattgttcgcaactagataattacatgcatgcctgtcttcaacataaaatatataa

SEQ ID NO: 128501 - DNA, 915 bp, Zea Mays
tatcctccaaacctaaccctagcaacacatttcgctccccacagcggcggcggccacagccacacgttctcgcgcgggatctaattccaaacagcactgcccttgcttctaccgttccccaagtgcgctccctctctcgccatccatctcgtgcacgactgggcaaccgttgccgctgtcgaggtgcccaggtcttcatcggtccctcgtcagttcttctccggcccttcgccgccgacaagctcccccagctactaaagagacaggagcaaagagttaacaggagatgaatgcccctgaccgttatgagcgtttcgtcgtgccagagggcaccaagaaagtgtcctatgagagggatacaaagattgtgaatgctgcatcattcactgtcgaacgcgaggatcacactgtaggcaatatcctccgcatgcagttgcacagagacccaaatgttctctttgccgggtataagctccctcacccactccagtacaagatcattgttaggatccacacaacgagccagtcctccccgacgcaggcctacacccaggctatcaatgatctagacaaagagcttgagtaccttaagcaagcttttgaggatgagaagaacaggtacgaggacaggatgaagcaggggttctagatgaatggaatggtgtgggagataaacttcccgtgttagttttatcctaggcgagtcaacaatgaaacgaacgcccaaggattgtgaatgtctgatccctgaactaaggttgcttgctgtcgttttactgtcatgcttgtgtcaatattcgtattattgcaaacacaccaatggagttttacattaacatcctcagattgttcgcaactagataattacatgcatgcctgtcttcaacataaaatatataacggtccatttcgacc

SEQ ID NO: 128502 - DNA, 1133 bp, Zea Mays
tatcctccaaacctaaccctagcaacacatttcgctccccacagcggcggcggccacagccacacgttctcgcgcgggatctaattccaaacagcactgcccttgcttctaccgttccccaagtgcgctccctctctcgccatccatctcgtgcacgactgggcaaccgttgccgctgtcgaggtgcccaggtcttcatcggtccctcgtcagttcttctccggcccttcgccgccgacaagctcccccagtacttatgttaccaaagcaaggctagtaaatcataccggaaagaatggtgatggcgtcttggtcttgggtctgctagatgcatgcctactgccttatcgcaaagctagcttacctggtcatacgaatttgtactactaaagagacaggagcaaagagttaacaggagatgaatgcccctgaccgttatgagcgtttcgtcgtgccagagggcaccaagaaagtgtcctatgagagggatacaaagattgtgaatgctgcatcattcactgtcgaacgcgaggatcacactgtaggcaatatcctccgcatgcagttgcacagagacccaaatgttctctttgccgggtataagctccctcacccactccagtacaagatcattgttaggatccacacaacgagccagtcctccccgacgcaggcctacacccaggctatcaatgatctagacaaagagcttgagtaccttaagcaagcttttgaggatgagaagaacaggtacgaggacaggatgaagcaggggttctagatgaatggaatggtgtgggagataaacttcccgtgttagttttatcctaggcgagtcaacaatgaaacgaacgcccaaggattgtgaatgtctgatccctgaactaaggttgcttgctgtcgttttactgtcatgcttgtgtcaatattcgtattattgcaaacacaccaatggagttttacattaacatcctcagattgttcgcaactagataattacatgcatgcctgtcttcaacataaaatatataacggtccatttcgacccttttgtctgggctgaaataggttctactccgtgaacttagcaatttagctatgggtcgtatggatctatttattttgaaggaatt

SEQ ID NO: 128503 - DNA, 970 bp, Zea Mays
tatcctccaaacctaaccctagcaacacatttcgctccccacagcggcggcggccacagccacacgttctcgcgcgggatctaattccaaacagcactgcccttgcttctaccgttccccaagtgcgctccctctctcgccatccatctcgtgcacgactgggcaaccgttgccgctgtcgaggtgcccaggtcttcatcggtccctcgtcagttcttctccggcccttcgccgccgacaagctcccccagctactaaagagacaggagcaaagagttaacaggagatgaatgcccctgaccgttatgagcgtttcgtcgtgccagagggcaccaagaaagtgtcctatgagagggatacaaagattgtgaatgctgcatcattcactgtcgaacgcgaggatcacactgtaggcaatatcctccgcatgcagttgcacagagacccaaatgttctctttgccgggtataagctccctcacccactccagtacaagatcattgttaggatccacacaacgagccagtcctccccgacgcaggcctacacccaggctatcaatgatctagacaaagagcttgagtaccttaagcaagcttttgaggatgagaagaacaggtacgaggacaggatgaagcaggggttctagatgaatggaatggtgtgggagataaacttcccgcgttcgtttcattgttgactcgcctaggataaaactaacacgggaagtttatctcccacaccattccattcatctagaacccctgcttcatcctgtcctcgtacctgttcttctcatcctgaaaacaaaatgctcagaatgtcactcataagtaccatgcatgccgtacatgtcatcaagagatggatgttcagggtcgaaaatgaatatgaattggaggatggtccaatacagtaatttctagggagaagaacacctgacccaaagtaaacaactaaaggcaaacaa

SEQ ID NO: 128504 - DNA, 1681 bp, Zea Mays
atttcgctccccacagcggcggcggccacagccacacgttctcgcgcgggatctaattccaaacagcactgcccttgcttctaccgttccccaagtgcgctccctctctcgccatccatctcgtgcacgactgggcaaccgttgccgctgtcgaggtgcccaggtcttcatcggtccctcgtcagttcttctccggcccttcgccgccgacaagctcccccaggtacgcccaccattctcttccgtccatgctttgcgatggtgagcacccactacccaaaccctaactggatctgtcaagtgtttacatgtattttgcctactaacttcgttttttttaattatcggtgtacgtctatgccgtttactgcattcaactctgctcgtttgtttgattcagttgagcagtgacatcgtgagcttatatgctagtgtagcttattggtgtttcaagcaatgtatgtcaaatatctagattagcaatttataaaccacgtaaaaccgtgacagtatcataatggcataagaggttcttttattttgtttgaacattctagtcagagtaagttatgtatctgttttctacatgctgaaggttatactcaaaccacttgtgaaatggctctcaccctatatctttctttagtgaatcaatgttggtattttagtagtagacttcagtcgtcagccatacttagcttttttctgctagtactgtactaatgttttgttcctccaagagaccgggaagtaaaatttaattggttcatatctttggtttatcattgtgtttttttggctattgcagtacttatgttaccaaagcaaggctagtaaatcataccggaaagaatggtgatggcgtcttggtcttgggtctgctagatgcatgcctactgccttatcgcaaagctagcttacctggtcatacgaatttgtagtcggttctgatctaattgcaagtgcatctagtaacttggattttttcgcaaaaaaatatcgggtgttcacgcctggcccctgcgcttgcagctactaaagagacaggagcaaagagttaacaggagatgaatgcccctgaccgttatgagcgtttcgtcgtgccagagggcaccaagaaagtgtcctatgagagggatacaaagattgtgaatgctgcatcattcactgtcgaacgcgaggatcacactgtaggcaatatcctccgcatgcagttgcacagagacccaaatgttctctttgccgggtataagctccctcacccactccagtacaagatcattgttaggatccacacaacgagccagtcctccccgacgcaggcctacacccaggctatcaatgatctagacaaagagcttgagtaccttaagcaagcttttgaggatgagaagaacaggtacgaggacaggatgaagcaggggttctagatgaatggaatggtgtgggagataaacttcccgtgttagttttatcctaggcgagtcaacaatgaaacgaacgcccaaggattgtgaatgtctgatccctgaactaaggttgcttgctgtcgttttactgtcatgcttgtgtcaatattcgtattattgcaaacacaccaatggagttttacattaacatcctcagattgttcgcaactagataattacatgcatgcctgtcttcaacataaaatatataa

SEQ ID NO: 128505 - DNA, 1096 bp, Zea Mays
atttcgctccccacagcggcggcggccacagccacacgttctcgcgcgggatctaattccaaacagcactgcccttgcttctaccgttccccaagtgcgctccctctctcgccatccatctcgtgcacgactgggcaaccgttgccgctgtcgaggtgcccaggtcttcatcggtccctcgtcagttcttctccggcccttcgccgccgacaagctcccccagtacttatgttaccaaagcaaggctagtaaatcataccggaaagaatggtgatggcgtcttggtcttgggtctgctagatgcatgcctactgccttatcgcaaagctagcttacctggtcatacgaatttgtagtcggttctgatctaattgcaagtgcatctagtaacttggattttttcgcaaaaaaatatcgggtgttcacgcctggcccctgcgcttgcagctactaaagagacaggagcaaagagttaacaggagatgaatgcccctgaccgttatgagcgtttcgtcgtgccagagggcaccaagaaagtgtcctatgagagggatacaaagattgtgaatgctgcatcattcactgtcgaacgcgaggatcacactgtaggcaatatcctccgcatgcagttgcacagagacccaaatgttctctttgccgggtataagctccctcacccactccagtacaagatcattgttaggatccacacaacgagccagtcctccccgacgcaggcctacacccaggctatcaatgatctagacaaagagcttgagtaccttaagcaagcttttgaggatgagaagaacaggtacgaggacaggatgaagcaggggttctagatgaatggaatggtgtgggagataaacttcccgtgttagttttatcctaggcgagtcaacaatgaaacgaacgcccaaggattgtgaatgtctgatccctgaactaaggttgcttgctgtcgttttactgtcatgcttgtgtcaatattcgtattattgcaaacacaccaatggagttttacattaacatcctcagattgttcgcaactagataattacatgcatgcctgtcttcaacataaaatatataa

SEQ ID NO: 128506 - DNA, 693 bp, Zea Mays
ttttgtgattagttgtaggttatggttgtgctcctgatgaactgatgataattatcaatgcagagtgtcctatgagagggatacaaagattgtgaatgctgcatcattcactgtcgaacgcgaggatcacactgtaggcaatatcctccgcatgtaagtacaatttaatttcttttctttaacgcttcccatcttatggtttgtttggttgacatgatacaggcagttgcacagagacccaaatgttctctttgccgggtataagctccctcacccactccagtacaagatcattgttaggatccacacaacgagccagtcctccccgacgcaggcctacacccaggctatcaatgatctagacaaagagcttgagtaccttaagcaagcttttgaggatgagaagaacaggtacgaggacaggatgaagcaggggttctagatgaatggaatggtgtgggagataaacttcccgtgttagttttatcctaggcgagtcaacaatgaaacgaacgcccaaggattgtgaatgtctgatccctgaactaaggttgcttgctgtcgttttactgtcatgcttgtgtcaatattcgtattattgcaaacacaccaatggagttttacattaacatcctcagattgttcgcaactagataattacatgcatgcctgtcttcaacataaaatatataa

SEQ ID NO: 128507 - DNA, 2745 bp, Zea Mays
atggaggaatcgggcccttctcatgcctcttccccatcctccctgcccaggagggcggtgtggagacgcatcaaccctgcacaggattcgggtttgtcccctgatgatgacacctcggttcgcgctccttcacgcctccgatgtcaaagaaatagaaagcgctccaggcggggaaaaggttcgtctgaacccggtttggtctcccagctgccttccctgggttctggggaggccttgttatcttcacctcagtttttgccgggcacaccccctccctcacttcaatcctgtgtcctggatttctctgatgttttggcgagggaggagtatgctcttcgtcgtgccctgtttgtttcagtgactggtacaagacctgatgtgaccgaggtggatgtgcttgaggaagtggcgcggaattttgatgtgaaccttggtgacatgtcaatccaatgcactaggccagaggattttctgctgtttttgcctgatgaagatactgcaaccagagtccttaatgggggtaggctgttcagaggccctcggttctctcttctgttcaaaagatggtcgcggtttgtgcacgcttcgtcagcttcgttgtccaagctggtggatattgagattaaaggcattcctgaacatgcttggactttctctacggcggagcacatcttaagtggctcttgctggatttctgatatccaccaggattcggcacacaagaaaaacctttcatctttcctggtgagagcatggtgttttgatcctagatttctgccctcagaaatggatcttcatattattgaaccaggccctgccgttcttgagaagagatgtctatcttataaaatctcgatcagagtttgcccggtggatcttcagtctgtgagcctggatacaccgtcttcttctccaccgtcgtctgggaataatcacgatttaggaggtgatcgtggcggtcaagttcgtcctgctcgtcgtcatggatcttctgcggttcctcggcgacctgtccaacttcgcttgggcccgcggacctcatcgggcttcggtcatgtcgggcatggatcaggaagtgtgaaaacgtcgcagcctcttggctctggattcaaggggtcgcactggtttcagcggccgccacagttatgtttgattggagctgatgaggctgtgaatgcaggagttatggtggaaacattacagccgcgtgtctctggaatcgaggaaacttctcggactctgcagactgggcattcaagccttatggatacagttatgattggggcggctggggttaatgtgtcgcgcggttccaaggagtgggaccattctttggcggccgctgtgcatgggaccgagtttttggaattggccgaggagactgtgaatgcaggagttactgtggagatgttacaaccgcgtgtctcggaaatcgaggagtcttctcggattttgcaaacaccgcatttaagccttttggattccgttcagtgtgtggctgctggagttattggatcgcgcggatccaagtgtggggaccttcatttggcggcagctgtgcatgggaccgggattttgccaaggacgcaaccccgtttctctggtttcaaggggacatcttgggttctgcaaccactgatgttacgcttgaaggacgccaatctgtctgtggatgtgggcgatattcagctgcacgtttccagggattgggaccacctgctggcaactcatttgtctgatcctatgcagcatttcgatgggttgatgggcttatctgtaacactttcgccccagtcatcgggtggtgatgggccgctggaagtgatgagctcgcctcttcaattaattatccaacatttttctgaggagctgctgggcctaaacaaaacactttcgccccagctaaacttatacactgggacgctggatgtgttgaggttggaatcgcctcatcatagtgaaccatttctaagaatagggttgctgaactcacccttgccgccttcaccccaacagtcccttaatgctgggatgttgattttggcaggattgagcccacccctccaagacacacctgggatggatgagtcgtggggcttgaacagggatacttcgccccagcaacctgggacgctggagttgtcttgtccaagctcgcccctccagccttacctgggaaatagctttaccccacagttgctgaaggtttatcacagaaggcaattgaaaagacagtgccaacaaggcctttctcagccacagatggatgatcgctgcggtgatattacggagatcgatgctgaaaggatgctggatcatgctccactgatgaatgccccgaaccccaccgtccagatctcccctccggaattaggctcagaccgggaatctaaaatggatgccttctttaacagcatctgtaggaagccttctggtatcttgccagccccaaaactcataaggaaatctcgtttgtcttcccccacaccaccagttgtatctgcacctagaagaagtcgtcgggtggcaggcatcggggtcgagttcaacatgcaagagctgggaggcaggtccatcaagaaggttatgaaatccttgaagatcatctctaattctgacaattttagcaatgaggcttttgaagattatgtcaatctgttcaagcacccccttcctcagtgccatgtggaggccctctcagccttgtttggctggagccccccgcctgaggttaggacaaattag

SEQ ID NO: 128508 - DNA, 435 bp, Zea Mays
atgaaggggagctgggaggagggcagcgctagcggctgcatctcgaagaagaatagggcggcgacggcgcatggaggaagaaggtgtggcggcgccaccgactgcagcgtggcccagcgtgtgacagtgcccgtgggagacgacggcgtgcggttctcgttggcgaagggcgtcgccgcttgctgccgtcgacgaggcgacggtttggggagtgcgaccgcgtggaggagttggagaggcgcggggtcgaggcctcgagaggttgagaggcacgaagagctgacttcccctgcgcgtcggcacggacgggacgcagtcgacggcgaggtgagcggtgggtgcgtcgacagtggagagatcggagaagggggcgtggtgtggccgtcaagggcaaacgctagaaagttcgtgtcggcgtccgtgatagacgactga

SEQ ID NO: 128509 - DNA, 209 bp, Zea Mays
ctgccaacaaatctgtcaaaattactgccacattcatgtcaaatcaagcactttttcctacagaaacaatactttatacaaaacattcttaaatacattacacccatagaaccacacagcctgccttgctatgtaccaccggttaatgctaactaaaacttttcgttgtttagcgatacaaaattgcacaaagaaatgccatgcaacct

SEQ ID NO: 128510 - DNA, 1825 bp, Zea Mays
atttcgctccccacagcggcggcggccacagccacacgttctcgcgcgggatctaattccaaacagcactgcccttgcttctaccgttccccaagtgcgctccctctctcgccatccatctcgtgcacgactgggcaaccgttgccgctgtcgaggtgcccaggtcttcatcggtccctcgtcagttcttctccggcccttcgccgccgacaagctccgccaggtacgcccaccattctcttccgtccatgctttgcgatggtgagcacccactacccaaaccctaactggatctgtcaagtgtttacatgtattttgcctactaacttcggtttttttaattatcggtgtacgtctatgccgtttactgcattcacctctgctcgtttgtttgattcagttgagcagtgacatcgtgagcttatatgctagtgtagcttattggtgtttcaagcaatgtatgtcaaatatctagattagcaatttataaaccacgtaaaaccgtgacagtatcataatggcataagaggttcttttattttgtttgaacattctagtcagagtaagttatgtgtctgttttctgcatgctgaaggttatactcaaaccacttgtgaaatggctctcaccctatatctttctttagagcatctccaacagagtgccctaaaataatgccctaaaaattaaatttctatctcatttaaaaagtatagggcacaaaaaatagttcacactccaacaataagccctaaagtaaggcaaataaccgtgaatcggtttttttccgtccatttgccgcgaacttttcccgcctgtgagcctttggcgcctattttcccacccgcgttcatcttcccggcgacggcgcgaccccaggttctatcacatcgccatcaatacctctaccacaaatcaacctctctgttttgatagacgtttgcccacacaggtactacatctacagcgccacaggtactacatcttccctgtgttttctattcaagtattcagccatgcgcccatgcctttgtcgtcgttatttagccatgcctgtgtacatctgccgcattgttttattctcccacgcaactgagcagattatttaaacaaatcagtcaaacgcacatgatcagttacataaatccattcacttaagcatgtacatgtactggttattaaactctgataggcttgttattggtgaagccccagaagtttcctatacaattaatggacacaactacgacatgggctattacttagcagacgggatctatccttcttggtcgacttttgtgaaaactaagaagcctgcggctaatttgaaagataaaaattttgctaaagcacaagagtcacaaagaaaagatgtcgaacgtgcatttggagtattacaggctcgctttgccattgttcgaggacctgcgcggctttgggatgaagctacacttcgcgacattatgacagcctgtgtaatcatgcataacatgataattgaagatgaaccggttgacgacaaactaaacgacattgatctgacaaatgtggtttcacgagcaggaactgggaagttttcttcttttgttcagatgcgcgaagaaatcgagaatggtcatagtcatcgtcaactccaggaagacctgattgaacacctatgggagcggcgcggacacatgaaccatcaacaataattcattttatgtttcagcaatagtcatcgtcagtagctttatgtttcagcagtagctttatgtttgagcatcttgtgtagctttctggacacatgaagcagcaacaataaatcattttatagtctatgagc

SEQ ID NO: 128511 - DNA, 1914 bp, Zea Mays
atggccgcagggagcaggaagatgcggggcagcaagatctgtgcagatgccgcaggagctagtgcaggcaggggcggctgcttggggcgcaagaaggttggtggcgttgcttccaggggcgcagcagggggatcggttgagggaacgaagaagatgggggcgccgacgatgggaacgaagaagatgggatcgcagcaggggaaacgccggcctaggggggatcagagcaggggggatcgggagggcacaaggaaggagatgaaggccggcagaaggaaggagatggctatatgcaaaggaatcaaagcaaagatgatgttggaagttttgagaaaaggcccaaggactactgcagaattggaggcacctgtagatgatacatctcttgtgtctgctgatgcacctcgtgtgcttgctgatactgtactggatatatctggtggggagcgtgcttttattgaggcagatgaagcaaaggaactgcttagtccacttaccaaaccagggaattcatataaaagaatttgctttagcaacaggagctttggtattggtgctgctaatgttgctggtccaattcttgagtcagttaagaatcagctcacagaggttgacatctcagattttgtggcaggaaggcctgaggatgaagcccttgatgtgatgcgcatattctccaaagcattagagggttctgtcctgagatatctgaacatctctgacaatgctttgggtgagaagggtgtcagggcattcagtgagctcctgaaatcacaggaatccctcgaagaactatatgtgatgaatgatggcatatcagaggaagctgcgaaagctctatctgagcttattcctgcaactgagaagcttaaggttctccacttccacaacaacatgacgggagatgaaggtgctatgtatattgctgagatggttaagcgttctccgaatgtagagagtttcaggtgctcagcaacaaggataggatctgatggtggagtcgcattgtctgaggcattagggacatgcactcgcctgaagaaacttgatctcagggacaacttgtttggtgttgatgcagggttagctctcagcaaaacccttccaaagcttcctgatcttgttgagctttatctcagtgatctcaatctagaaaacaagggtactatagcaattgccaaagccctcgaacagtcagcaccacagttggaggtccttgaaattgctggaaatgaaataaatgccaaagcagccccagatttggccaagtgcctagcggcaatgcagtcactcaagaagctgactttggctgaaaatgaactgaaggatgatggtgccgtgataatcgcaaaatcattggaagatggccacatagatctcaaggagcttgatgttagcgtgaacatgctgcagagggttggagctcggtgctttgcgcgggcagtcgctaataaaccggcttttgagctgctgaacatcaatggaaatttcatctctggtgaagggatcgatgaggtggaggaaatcttgaaggctggtaagaaacccctgaaagtgctgggcccactagatgagaatgagcctgatggagagcctgatgatgacgatgaagaggttgaggataatgaggacgagctgaattcgaagctgcagagtgtgaaggttgagcaggatgattgaccgagttggtatcgagatataagcctgtcgcagggtcttgataactgagttatctacaatgctgttgatctttggttttgtagtcggtttttgttatgaaaaaccagaaccagctatcttgtgacttgtgcaatctgattatagattagaactgctcttatttattcgtttatattaatgacatcgttccattacaaatggcctgatatatagatgctacctattttcccaaca

SEQ ID NO: 128512 - DNA, 504 bp, Zea Mays
agcaaagccgccgccgccccgccgtcatcgttccttttgttttctgttatcatccccttctcgccagattggatttcttattgctgcgctgctcgtttctttcgattttgatctgatagtttggcgtcgatgttgttgtccactcttgcggttggcttcgtcatctggtcgctgggattttcggtctctgaccgtttggttcccagtggactcgttcccttgaagcaaaatcacctgttgtaacctgagttcgctttcaacctgtgccctcggagtttgctggcgccgcagggcacgccgcgatccttacatacattatcaccatcaaacgagaaccgcttcgaatcctcgattacgtgcctccattcttcggcactctagactatgattttgttttgtgtaggctagaatgcaagttttgtgggtcgtgctggcaacggtgatgagtcctacagacctgtaatgactcctgcggagatgatcgcatggtctaagaacatctaa

SEQ ID NO: 128513 - DNA, 858 bp, Zea Mays
aaagtcgtggatctagaatggtctatgcagttgcgacggaacggatggaggaaaaaatgaaccacgatttctcttcagttctttccttgcgtgcacggctgctcgtcaattcggctgccgaaattatcccgttgccttctggttcccacgacaaaagcggcattaccccggtcgctttataaattggactttcttactttcggcacggccaccggacagctccccacaaaaccgtcagttctcttttcccctgtaaatcgcaaattcgtcttccctgcccatctatcgcttggacacctctgcaagggagcacatggctctcgagaaggccaaggagatcatcgcgtcctccccggtcgacctagctctccgaaaggccaaggagaccgtcgcctcccaccccgtcgtcgtcttcaggttctgctcgtcaaatctatttgtttccaagtaccgcacttgcaaaagcaggtcaagcttcgaattgggccatctgctacatagtagacgatgatacatgagctatccggtagcaggttccttttctcccttccaaattcgcagctggctggacagaaggaactttgttttgggcggataaggaaatcggttgcctcaactttgtgccggagactgaatatagtacttttgcagtaattatatatttggtactgccccttataattacatgtttcctcgtttggactgttcttgaagggaatcctatagttgctggaaacgtattctctcgccgagcctccttacggatgcaccggatttagggactatctagatgtatatctaaggaccaaaaattgacacatattttatgccacacttttagcagccattgacaagtat

SEQ ID NO: 128514 - DNA, 857 bp, Zea Mays
aaagtcgtggatctagaatggtctatgcagttgcgacggaacggatggaggaaaaaatgaaccacgatttctcttcagttctttccttgcgtgcacggctgctcgtcaattcggctgccgaaattatcccgttgccttctggttcccacgacaaaagcggcattaccccggtcgctttataaattggactttcttactttcggcacggccaccggacagctccccacaaaaccgtcagttctcttttcccctgtaaatcgcaaattcgtcttccctgcccatctatcgcttggacacctctgcaagggagcacatggctctcgagaaggccaaggagatcatcgcgtcctccccggtcgacctagctctccgaaaggccaaggagaccgtcgcctcccaccccgtcgtcgtcttcagcaaaacttactgtcctttctgcacccgagtgaaacaattgctagcaaagttgggggcaagttacaaggctattgagttggatgtggaaagtgagttttctctccttgattttaccgtacttctttatttctggttcacttatttacttcacaagtagttaactcccaaatctcaatggacataaaataggccaacaaatgaaaggtaagtaaggtttatgatatcaaatggtgatggttgtagaagccactggtagattcatcagctcatctatcagttgaaactgttctgttcaaacaatttatgatattactgaagtaagttctgttcaaactgcaatgccgaaagtgtccatgaaccggatgatcattactagcattcaatcaaattggagatttgttcagtgcttctgcaaaccctatttggagttttctctttaa

SEQ ID NO: 128515 - DNA, 860 bp, Zea Mays
aaagtcgtggatctagaatggtctatgcagttgcgacggaacggatggaggaaaaaatgaaccacgatttctcttcagttctttccttgcgtgcacggctgctcgtcaattcggctgccgaaattatcccgttgccttctggttcccacgacaaaagcggcattaccccggtcgctttataaattggactttcttactttcggcacggccaccggacagctccccacaaaaccgtcagttctcttttcccctgtaaatcgcaaattcgtcttccctgcccatctatcgcttggacacctctgcaagggagcacatggctctcgagaaggccaaggagatcatcgcgtcctccccggtcgacctagctctccgaaaggccaaggagaccgtcgcctcccaccccgtcgtcgtcttcagtaatctcatgaacacagcaaaacttactgtcctttctgcacccgagtgaaacaattgctagcaaagttgggggcaagttacaaggctattgagttggatgtggaaagtgatggcgctgagctgcagtcagctctcgctgaatggactggccagagaactgttcccaatgtcttcgtgaaaggggagcggattggtggctgtgacgcaaccatggcgatgcacgacggtgggaagctggtgcctctgctcaccgaggctggagcaattgtcactgccagggctactgcaactactaccactccgtctttgtagacatgttttacagcgctgttccgctcgcttcgtggctatatgcaagtgttgtacggagtactaaactcatacgtggtaaaagatgaataaagacttaaacatttctttcgttggcttggctgtattatatg

SEQ ID NO: 128516 - DNA, 904 bp, Zea Mays
aaagtcgtggatctagaatggtctatgcagttgcgacggaacggatggaggaaaaaatgaaccacgatttctcttcagttctttccttgcgtgcacggctgctcgtcaattcggctgccgaaattatcccgttgccttctggttcccacgacaaaagcggcattaccccggtcgctttataaattggactttcttactttcggcacggccaccggacagctccccacaaaaccgtcagttctcttttcccctgtaaatcgcaaattcgtcttccctgcccatctatcgcttggacacctctgcaagggagcacatggctctcgagaaggccaaggagatcatcgcgtcctccccggtcgacctagctctccgaaaggccaaggagaccgtcgcctcccaccccgtcgtcgtcttcagcaaaacttactgtcctttctgcacccgagtgaaacaattgctagcaaagttgggggcaagttacaaggctattgagttggatgtggaaagtgatggcgctgagctgcagtcagctctcgctgaatggactggccagagaactgttcccaatgtcttcgtgaaaggggagcggattggtggctgtgacgcaaccatggcgatgcacgacggtgggaagctggtgcctctgctcaccgaggctggagcaattgtcactgccagggctactgcaactactaccactccgtctttgtagacatgttttacagcgctgttccgctcgcttcgtggctatatgcaagtgttgtacggagtactaaactcatacgtggtaaaagatgaataaagacttaaacatttctttcgttggcttggctgtattatatgctattggtttttgttgataatctccgcaactcttcacacactacctcgtcgtctggactgc

SEQ ID NO: 128517 - DNA, 1369 bp, Zea Mays
gctgatgtgccttgtcctgttttgcagcgtgttcatgttcatcctccaacatatggagtggttgaaccatggttagattttgtacaggtgagcacgcctgttcgtaccttttctggaatgttcattgagacttagtgttagagccaatatgctggcgtaccagctctcgtgatatcatttgaaccacatagttgtgccaaagtctacttgttattagtacaacctcgtgaattttgatctcgaggggataggtgcaaccccgacccctagatctggtgaggtggacttaccggtcgtggttttgtactgcgactcctcagtcagaggtcggacgagatggagaccaagggtcaggcggttgggcgtccttctcttggtcccttggggccttgggtcatccaaggcggaaacacgagatgggatgacatgttattctaggtccatgataacttgaccctaacaacagtagactcaaaatttgtagactgagaatagccttgatgaattattaatgtattatcactgcagattcattatgatgaattgaagtgctagagatgctcatgagtgtgaaatcaatgtacaatttttgtcgtatgattacattaatagaaatgataattaccgttcattgtttgtataaggattcccttatgttctaatcttatataatcttacactgtacagaatgaatcgtcctttattcttgggaaatttggatccataccattaaaagatcaccactttggatccataccattactatctcacttacatgtgggtccacatgagtcaatgacatgtggggtccatggtatatatctaaagtttggatcttttaatggtatagatccaattgttcctttattcttttattctttgtatataaaataccttatgttgtagtaatctcatgaacacagcaaaacttactgtcctttctgcacccgagtgaaacaattgctagcaaagttgggggcaagttacaaggctattgagttggatgtggaaagtgatggcgctgagctgcagtcagctctcgctgaatggactggccagagaactgttcccaatgtcttcgtgaaaggggagcggattggtggctgtgacgcaaccatggcgatgcacgacggtgggaagctggtgcctctgctcaccgaggctggagcaattgtcactgccagggctactgcaactactaccactccgtctttgtagacatgttttacagcgctgttccgctcgcttcgtggctatatgcaagtgttgtacggagtactaaactcatacgtggtaaaagatgaataaagacttaaacatttctttcgttggcttggctgtattatatgctattggtttttgttgataa

SEQ ID NO: 128518 - DNA, 1485 bp, Zea Mays
acctgcatgaattattctttaaatcgagtgctggtgttggcagcttggtttgcccgagaaaaacttcttcaatgacaacttcgagttggtgctctcagaacctagtgatgcaaataccaatagcgccaccctcctctcagatgagacagacgacaggcctaaagaaaacacaaatcaagaaacgggcacctcaaatcagcttgaatacgagtctaatccttccgttgctgagcgcgaccagagagacaagatcggtgctccaggctctgccctagatgccagtcaatcatcgactccgggaagaatgttttcacgtcctataaaaactaacctgaaggttgctgagtcgtctgcatttctagcatatgttaagtcaagcaccccagccaccagctcatttgatagcggactacaaagaggtgacagccggttagattctttggataaccatggtaattgctctagtgcaacagatagaagtgacaccggtgctgatgtaaatattcggaataaagaagcttttgagatgcctgtgcagtatcctatggtatgcttttcttcctctagcatgcatatggagcgaagcaatgaaggccataatgacacttcaggaactccacctgcataccatttcccattttattatccagggatggtagaacacaacatggcactttcatcagtgcaaaattttcaagcaaacataaacagtgctcaagcacatacaccaccagcgatgcttcatcagtacaatgttttctcccaatgccatagtttacccatgatatcaccatttcagtttaatacttctggcatgagtatgcactcaagtcatttaccgacgcaaaatgtgtggtcatcggcatcgagcacaccaacgcctgacgaaacatgcaatcgctccgagagaagggctgcagcacttgctaaattcaggcagaaaaggaaagagcgctgttttgacaagaaggtgaggtatgtgaacaggaagaaacttgctgagacgaggctaagggtgcgaggtcaatttgttaggcatgcaagcaatatggatatcataagcaccggagatgatatatctgaagacgaagatgacgatccaacctccagggaggtagatatgatttcttctccagagtagtggagaggtcctcttgtgtgaaaaattagagtgcagatggttactgctcactttgttacaactcagtaggactagacaatacattattctactggcaacaaggcaatacaccctttttgctcacacagtataaacttttgtccccaaatatctggctgttactccggttgctttaatcgagaaatcatctttttgataaggctgttactccggttactttgatcgagaaataatctttttgataagtgtagttatagttttgctaagtttttgatgcaaagaccagtcaaatcagtttgatcttattgcagggtaatatttgcaattttgaggttaacagtgtt

SEQ ID NO: 128519 - DNA, 167 bp, Zea Mays
aaatcgaacattcggcagctactctcatactgtatttcatatttccaccaaaccgtttcacgaaaatacaaataggtgctcccccagccggtcaacccaaatacgagtacatcctaacgttagagaggtacttttagtagcagtttataatccagaggcaaaattag

SEQ ID NO: 128520 - DNA, 1143 bp, Zea Mays
atgagcaccgccagggcgccgcgaaatcgtttcctctgtaaccacaaccgtccgtcgttcagtccacccacgcgggcgaacagtgaaaggcatcgtctccgtctcgtgactcgtgctcgctggactgccgccgcccgccgccctcagcttagctcaatgattgggagcaccaagccgctcgcggcgccgctgcacccgctgtgcccctccggtcgccgcctcgccccctcgtcctgcgcccctgattcctccccagctctcacccgcgccgtcgagaggccaggtcagtctcagtctgacggcgccccgccgccaccacgcccggatgtggtcgcctcgtccctcgcgctgcgcgctagcccgcaactcaatcggtggtcccgctcgcgggcgctgcggtcaaaccgccggcctaggctggaaagcgcgctctcctcgtcctcggcggcgtcggtgaccaagacgtcgcggcccgaggacgctgcggtggcggtggaggatggcgaggacgacgacatcacgggcgccaaggtcgttgaccccgactccgaggctgtcgctgccgccgccaggcttgccagcagcgtgcgcgtgtcgtccagcgacgagttgtcggcgcagctggtcgcctccaccgtgaacgccatcgtcaccaccatgaaggaccacagagccgtcaccgccgtgaacggtgttagtttattctgcattgcagactggagagaccacagaaccatcaccgccgtgaaggaccaggggcagtgcggcagctgctgggccttctcggcagtgggtgcgccgatgcccatgcctgctggtagtgggggtgtttctcttgctttatttgtttcaaaggagttaatagttcctaagaacaaaaggaaagttgagaagattgaaaatgtctatgccaaatgcaagttcgttgcccaatgttttatatatgattccttccaaggctctgtgcagctatttagccatttctcccttcgattcagcatgaacaaggccgaggcattgtacaggttgttcaagaagatcgacaacaccttcattgacaatgggctgattaacaaggaggctcccaaaggaaagtctggccatctggggctctgggcctctcctgaggctgttgaccgatga

SEQ ID NO: 128521 - DNA, 102 bp, Zea Mays
cagatttgcctattcacccccctctaggcgactttcactcaatttttgcactatcagtggcgagaccttccacactaattatatgcctcaaataagcaatag

SEQ ID NO: 128522 - DNA, 1834 bp, Zea Mays
gaacgacattcttcgcctacggcaagtatgccttttatttctggccctccctaaaacgcgccatgctcgtcgatgagccgcttgtccatctccatggccattgccattgtttttcaagcgaacgccatgcacgtgccagaagcccacaattaaggttcatgttctcgaacgatcagtctgagatgcatgcacgacgatcgatctacagctagcgttgcatgacgatatggacctacactcgcgggcaaagcccatggacaccgccgtcgccgtcgcggtggctgtcgtcgccgccgccctcctcgtgcgggttggcgacgccgacatcacgaccacgcccatcgtgtccgacgcgaggccgatcatcctcttcgaggagttcggcttcacgagcggcggcaaggccgcggtctccataagccgcgcgacgtggcaactccggccggggtcacgcctctccagcgttgactccagcctcatgggattcgtgctcatcgccagtgcccagttcccagggatcaacaaccagacacagtactacgccgccgatccgggaggcggcggccggttctgcgtgctgacgagcgactacgcgctcccgatgctccggctcagcgacgtcccgccgggcggggtcaccaccaccgtaaccatcgactaccccgacgagtacgccgtcgttttcagcaactgccaggacggcgtggaggtcaccatggacgtgcgcaccgagatgtacaacgtgcgccgcgacgcctccggcgggaccagggactacctccccgtcgggctgcagcctctgccggccatctacgcgggcgtggcggtggtgtacctagcgttcctggcggggtgggtgtgggcgtgcgtccggcagcacgccacgacggagcggatccacgccgtgatgggcgctctgctgctgttcaaggcgctcaagttggcgtgcgcggccgagagcatgtggttcatcgagcgcacgggcacgtcgcacggctgggacgtcgcgttctacgtgttcggcttcttcaagggcatcctgctcttcatcgtcatcgtcctcatcggcaccggctggtccttcctgaaaccgtacctccaggagcgcgtaaagagcctgctgatggtcgtgataccgctgcaagtgatcgagaacctgctgctggtggtgatcggcgagacgggcccgacgcggcggggttgggtcgtgtggacccgggccttcctgctcgtcgacgtcatctgctgctccgccgtcatcttccccgtcatctggtccatccggggcctgcgcgaggcctccaagaccgacggcaaggcggcgcgcgacctcaagaagctcactctcttcaagcgcttctacctggtcgtcgtcggctacctctacttcacccggatcatcgtgtcagcgttcctcgccgtgctcaactacaagtaccggtggggagtcgatgttgcagtcgaggccgcgagctttgccttctacctgttcgtcttctacaacttcaagccggtagagaagaacccgtacttgtacattggcgacgacgagaaggaggccgcccgtggccgtgggcacctcgagacggacgatggggctttgattctgagctctgattcatggggatgcagaaccatctcctgatcctgcctattttttttttttggtagatatgatgtactcggtacttgttatctcgcagcaccatttcgtacagctctacgttattgtgaagtggtagtttttttactctagctctataaacagtttcaagtgtaaagacagagttgttttcataaaatgtctaatacagttatcattctttaccccttt

SEQ ID NO: 128523 - DNA, 2404 bp, Zea Mays
gttttgatcttcattttttggaagaagattgctaagaaaggttggtttatgttgctaatgtcaatttttattcatttttgctcaattttagccacattttggatctagggtttcaccattggagagagagtgtatcctctctcaattttagccacatttttgctctattcgctcaaataaagttgtttaatatggttagattttgtctatcctctctcctttttcatgtttagttctcaaatcagtttatccatgacatattaagttgtttaatgaatggttcatgtgttgtgtggagagagaagaagataggtttggtaattaagattgtttttattagttgctatgaaagttgggtttaattatgttttaattgccaattattgttcatctttgctcaattttggaactaggccttcaccatgtgttaaagagaagagtatggctaggaaagtttagttttatgttcctcttgccaatttttgttcattttccttaaatttagccacattttggatatagggtttcaccccttcatccttcccgacaggtggtgatggagaggacatcctggatgtataacttatcaaggctagatccatcatacatatccgaggtccataggtttattgatgtcgctacgaaccatgcttggagaacaaagacaaaacacatatattgtccatgcatggactgcaaaaatgctgctgtatttaatgacacagaacaaatcatatctcatctggtatgccgaggatttatgaaggattacacaatttggacaaagcatggagagggtagctcttcgccttatacgactggaaaccctgagaacatcgacgacagatttcagttcgttcacgagacacaccaacctcttccacagagcgaacatgtagtgcaaaatgttactgatcatggttacgctcgaggaaatgaacatgatagacctcatgttctgccaagtgttatggatgaggaagatgcagagttgctagaggcaatgttgcgtcgtcatacagatcaatcgatgttcttaatgaaaggtatggagtccctgaagaaggcagcagaagagcctttgtacgacgagtctaagggttgtaccaaagagttcacgacgctccggtctatgctaaagctgttgatgttaaaagctaaatatggtgtgtctgatgctggcttcgatgcgttcttgagtattatcgcagacatgcttccaaaggagaacaatgtgcctgctaacacgtactatgcaaagaaactaatcagtccgctcactatgggtgtggagaagatccacgcgtgtagaaatcactgtatcctttatcgaggtgatgattataaagacttggagagctgcccaaagtgcggtgcaagtaggtacaagacgaataaagactatcgagaggacgaagagtgtgttgcatccgtgtctaaagggaagaagcgaaagaaatcccaaaaaaagacttcaaaatccacgagcaaagaaaaagaagtagactattatgcgctcaaaaagattcctgctttggtgatgtggtacctccccgtcgtcgatcgattgaggtgtttgttcgctaatcctgaggatgccagacttatgagctggcatgcttctgatgagcacaaaaacgatgggactgcttacgtatcccttgctgcatctaggaagatagtttacatgaggcacagacactttttattggaaggacacaggtaccgcatgcgaaagatggataagtacttcgacaataatggtgaactacattctactgctccatcgggtaacaatagaggtcatagagtttttgaaatagtcaggaatatcaagtttgttttcgggaagaagacaaaagacggaaaaacaaggaaggatgtcaaaccagcttcgggggctatattcaagaagaagtctattttcttcgagtacttgccttactggaaagagttagatgtgcggcatgcgatcgatggtatgcacgttcagaagaacgtgtttgaaagcataatgggcaccttgctagacataaagggcaaaacaaaagaagggctcaattcaggcatggacttggtagatttaggcataaaaaaggaactacatcccgttcttcaagaaaatgggaagtaccatctcccagcagcaagctacaatctcaatgtagatgagaaacatgcgatgtgtgtttggcttaagaatttgaaagtcccatccggattctgctctagcatacggagtattgtgtcaatgaaagacctgacaatcacaaactacaactcacatgattgccatgtcatgctgactacattcctacatattgccatcagggctataaatcctttgtttttaaagatggcaatcacacggttgtgctactttttcaacaggatttcacaaaag

SEQ ID NO: 128524 - DNA, 895 bp, Zea Mays
gccgagaacagaaagggttcttgctctccggctccggttttaatacagtgccaagcctccctctcactgccaggacatgagtccatccagtcctcacttcactcttaacgcctaccaaacttacacagcctctccataactgctgctgctcctccgtctgcttccgagctaccattctctagcgcgctaccacggtaccaccacgcccgcccatggcctcggggtcgaacccggacagcatggacaccgagcctcccggcgtcctctccatcgccgtcgagcgcaacccaccggagtcgcgcctgcagcagctcggcgtcaagtcctggcccaagtgagcgccgatcactgtccgttactttctcggtttcacggtgttgatcgtcgtgacgtatgtaatggctgccgtgcccgagcgcgtgcaggtggggttgcccgccggggaagttcccggtgaagttcgacgcgcggcagacgtgctacctgctcaagggcaaggtgcgggcgcacatcaaggggtcgtcggagtgcgtggagttcggcgccggcgacctcgtcgtcttccccaaggggctcagctgcacctgggacgtcgtcgccgccgtcgacaagtactacaagttcgactcgtcctgactcggatcgctcgcgcgcggcgccgctgaactgatcccgattgttgattcagtgctagcttgattgtgctggttagcctaatttctctagctaatttgcttacgtagcatgtgtctatctctaatcgccttctctgtcgtgtaaaagaacgtagaggtgcagggcatctcgccccggagagcgtaggccagtactagttagttattggtccgggaacggaaataataaaacccggtcaaagcgggggctgttcaaagta

SEQ ID NO: 128525 - DNA, 849 bp, Zea Mays
gccgagaacagaaagggttcttgctctccggctccggttttaatacagtgccaagcctccctctcactgccaggacatgagtccatccagtcctcacttcactcttaacgcctaccaaacttacacagcctctccataactgctgctgctcctccgtctgcttccgagctaccattctctagcgcgctaccacggtaccaccacgcccgcccatggcctcggggtcgaacccggacagcatggacaccgagcctcccggcgtcctctccatcgccgtcgagcgcaacccaccggagtcgcgcctgcagcagctcggcgtcaagtcctggcccaagtggggttgcccgccggggaagttcccggtgaagttcgacgcgcggcagacgtgctacctgctcaagggcaaggtgcgggcgcacatcaaggggtcgtcggagtgcgtggagttcggcgccggcgacctcgtcgtcttccccaaggggctcagctgcacctgggacgtcgtcgccgccgtcgacaagtactacaagttcgactcgtcctgactcggatcgctcgcgcgcggcgccgctgaactgatcccgattgttgattcagtgctagcttgattgtgctggttagcctaatttctctagctaatttgcttacgtagcatgtgtctatctctaatcgccttctctgtcgtgtaaaagaacgtagaggtgcagggcatctcgccccggagagcgtaggccagtactagttagttattggtccgggaacggaaataataaaacccggtcaaagcgggggctgttcaaagtatccttgtttattcctcccagtgcaatccattttgaatgcttcttt

SEQ ID NO: 128526 - DNA, 261 bp, Zea Mays
atggaggcgttcgtcgccgctatggtcttctgcgaggtgcccatggacgccgctggcttcggcgccggcagttgggctcccgcggccacgaatggcgccgggcgcagccgcaacgggaagcgcgaggaggaggagggcgtggtcagggtcagggtcaggtcggcgccgccggtgacggaggccgagaagcctgtcgacgcgtctacgacgtggttcgatggcttggagtgcctccagaccgtcgtgttccgcatcgactga

SEQ ID NO: 128527 - DNA, 1974 bp, Zea Mays
ccagtctcagcagaagattctctgccagatgtgcccctgcaaactaaagaacgagtgaacgacaacgacaagcattacgcccctcctgaatcctgatgctcccatggctccgtcctataaatccaacgccaccgttggccattccctctcgcgccgcagccgcacgccttcattctccattgctcctcgtgcagcctgcacagggacagggtgaagaaaggaggaggaaacaagcttgccgagatggcgacgtgcgctacgaccctcgcacctcttctgggcccggcggcaaacgcgacggagtacctttgcaaccaattcgcggacaccacgtcggcggtggactcgacgtacctgctcttctcggcctacctcgtcttcgccatgcagctcgggttcgccatgctctgcgcgggctccgtccgcgccaagaacaccatgaacatcatgctcaccaacgtgctcgacgccgccgccggcgcgctcttctactacctattcggcttcgccttcgcgtacgggaccccgtccaacggcttcatcggcaagcacttcttcggcctcaagcggcttccccaggtcgggttcgactacgacttcttcctcttccagtgggctttcgccatcgccgccgccgggatcacgtccggctccatcgccgagcgcacgcagttcgtggcgtacctcatctactccgccttcctcaccggcttcgtgtacccggtggtgtcccactgggtctggtccgccgacggctgggcctcgccgtcacggacgtcggggaagctcctcttcggctccggcatcatcgacttcgccgggtccagcgttgtccacatggtgggcggaatcgccggcctctggggcgccctcatcgagggcccccgcattggccggttcgaccacgccggccgctcggtggcgctgcgcggccacagcgcgtcgctcgtcgtgctcggcactttcctgctgtggttcggctggttcgggttcaaccccgggtcgttcctcaccatcctcaagagctacggcccggccggcagcatccacgggcagtggtcggccgtgggccgcacggccgtgaccaccaccctcgccggcagcacggcggcgctcacgacgctcttcgggaagaggctccagacggggcactggaacgtggtcgacgtctgcaacggcctcctcggcggcttcgcggcgatcaccgcgggctgctccgtggtcgacccctgggcggccatcatatgcgggttcgtgtcggcgtgggtgctcatcgggctcaacgcgctggccgcgaggctccggttcgacgacccgctggaggccgcgcagttgcacggtgggtgcggcgcgtggggggtcctcttcacgggcctgttcgcgcgcagggagtacgtggagcagatctacggcacgccggggcggccgtacggcctgttcatgggcggcggcgggaggctgctggccgcgaacgtggtgatgatcctggtgatcgccgcgtgggttagcgtcaccatggctccgctgttcctggcgctcaacaagatggggctgctccgagtctcggccgaggacgagatggccggcatggaccagacgcggcacggcgggttcgcgtacgcgtaccacgacgacgacttgagcttgagcagcaggcccaaggggatgcagagcacgcagatcgcggacgcggccagcggcgagttctagtgtgttggatcacaaatctcagtatgctagtcctacatcatgattgtacaataacaaccatgagatatactcccttcgttctaaggattactttgacgaagtatctagttaatttaaagataaagaaaatttaaacgttttataatttagaacgaagagagcgccacttttatccgagattacttttttctcctttcagcttcaaacaaaaaaaaaggatattgagagttgagacaatataaatcagcgtatgctaattttctt

SEQ ID NO: 128528 - DNA, 110 bp, Zea Mays
gaggttactatggatcaaaaccagcagaaaacaattacaaaatccatagaccttatcctttatcatcttctagatgacctgtgtcatctcatcccctgaaaacaaaacaa

SEQ ID NO: 128529 - DNA, 1699 bp, Zea Mays
agctcgtcgtccccgtcggaggagaacctgtttatattcttgtgaggaagaaacgttcccatccccgtcattgaggaattcggaatcggggatcgagtacatctccacttcttcccaggcggccaggccctggcccgcggccgcaccgcaccgtagtttgttccttccgcaaggaagcgagagaaaatcgagtgaaaaggaaggggaaataaggctgaatcacagtttctggatcggaggagcatccccgcctaggtctctgcagccatggttcgcggatcgctcggcaagcttgcatcgcgcgccctctccgtcgcccgggagatggcagcaccagcagctccgccgcctcaacatccacgagtaccagggcgcggagttgatgggtaaatacgggatcaacgtgcccaggggcgcggcggctgggtccgtacacgaggtcaaggacgccttgaagaacatgttccccagcgagaaagagatagttgttaaaagtcaaatccttgctggtggccgagggctgggaactttcaaaagcggactgcaaggtggtgtccatattgttaaggctgaggaagctgaattgattgcaagtaaaatgttaggccagattctgataacgaaacaaactggtccagagggaaagattgtgagcaaggtctacttgtgtgagaaactatctcttactaatgagatgtacttcgccatcacccttgataggaaaactgctggtccgctcattattgcttgcagcaagggaggaaccagtattgaagatcttgcggagaagtatcctgatatgattattaaggttcctattgatgtatttaaaggaatcacagatgaggatgcagctaaagttgttgatggtcttgatggagagattggttgcatggtgaatggagcaggattggccatggcgaccatggatattataaagttgcatggtggtacgcccgccaattttcttgatgtcggtggaagtgcatcagaggggcaggttgtggaagcttttaagatactgacttcagatgatagagtgaaggcaattctagtgaacatttttggtggcattatgaaatgtgatgtgatagcaagtggaattgttaatgctgccaaacaggttgacctgaaagttcctgttgttgttcggttggaaggcaccaatgtagaccaaggaaagaggattcttaagacctattttgacggtttccaaatttgtgtacaatatttgcaactaaatctctcttcagttgagtcctgcagtggtggtcttccaaacaggaccgatgccaccgatgcctggcctgtccgaggaagtcctgccgctgctgtttggcctatccactgcagccgcgccgccaccgtcgtgcttgtccgcgacgccgcgctgcccgccttctggcttgtccgcgacgccgcattgctcgccgtctggcctgtccgcgacgccacgttgcccgctgtttggcctgtccgcgacgccgtactgcccgtcctctggcctgcacacaaccccgtacctgcttgtccagctccagcttgggaagaatccccacctgcagtcgcccctgcttactgctgccacaaggagtcgctgcgcctgcgtcgcatcgaagacgaagatggctggaggcaacacaccatccccatcggactccatctgttagattggggaaaaaattcaagattgaactga

SEQ ID NO: 128530 - DNA, 1952 bp, Zea Mays
agctcgtcgtccccgtcggaggagaacctgtttatattcttgtgaggaagaaacgttcccatccccgtcattgaggaattcggaatcggggatcgagtacatctccacttcttcccaggcggccaggccctggcccgcggccgcaccgcaccgtagtttgttccttccgcaaggaagcgagagaaaatcgagtgaaaaggaaggggaaataaggctgaatcacagtttctggatcggaggagcatccccgcctaggtctctgcagccatggttcgcggatcgctcggcaagcttgcatcgcgcgccctctccgtcgcccgggagatggcagcaccagcagctccgccgcctcaacatccacgagtaccagggcgcggagttgatgggtaaatacgggatcaacgtgcccaggggcgcggcggctgggtccgtacacgaggtcaaggacgccttgaagaacatgttccccagcgagaaagagatagttgttaaaagtcaaatccttgctggtggccgagggctgggaactttcaaaagcggactgcaaggtggtgtccatattgttaaggctgaggaagctgaattgattgcaagtaaaatgttaggccagattctgataacgaaacaaactggtccagagggaaagattgtgagcaaggtctacttgtgtgagaaactatctcttactaatgagatgtacttcgccatcacccttgataggaaaactgctggtccgctcattattgcttgcagcaagggaggaaccagtattgaagatcttgcggagaagtatcctgatatgattattaaggttcctattgatgtatttaaaggaatcacagatgaggatgcagctaaagttgttgatggtctagctctaaaggcagcggataggcagtcttctatagaacagattaagaagctgtatgaacttttctgcaagtgtgattgcacattgctggagataaatcctctggcggagacagctgacaacaagcttgttgctgctgatgcaaaattgaactttgatgataatgctgcatttagacagaaagaaatatttgcactgcgtgatacaactcaggaagaccccagggaggtcgctgctgccaaagcagatttgaactatattggtcttgatggagagattggttgcatggtgaatggagcaggattggccatggcgaccatggatattataaagttgcatggtggtacgcccgccaattttcttgatgtcggtggaagtgcatcagaggggcaggttgtggaagcttttaagatactgacttcagatgatagagtgaaggcaattctagtgaacatttttggtggcattatgaaatgtgatgtgatagcaagtggaattgttaatgctgccaaacaggttgacctgaaagttcctgttgttgttcggttggaaggcaccaatgtagaccaaggaaagaggattcttaaggaaagtggaatgactttgatcactgcagaagatcttgatgatgcggcagagaaagctgtaaaagcatccgtcaaataactagtgtatcaatctgaagtttctttttttttcactggtacaagatgagcagtgctcttttacggatttcgatttggagcagaagtcgtgaactgcaacgtttttgaagtagggttattttggccttgttttgctgttaaatgttgccagtgccgaaattgtggtctcgttttaataaacaaatcaatcggtcccattggtcagctgctattttgccaattgcaaatcaatttacttttttggctcgggcagaggcttctaccctggtagtaaaaaaaaatcgctgccagggcctacgttgccagtttattctgccacatggccaatgccagtttattctgttacgttcctgcaccagtgcaggaacgttgtgaattgtgatctcgtgttaataatgatttcacactatgaatca

SEQ ID NO: 128531 - DNA, 1897 bp, Zea Mays
agctcgtcgtccccgtcggaggagaacctgtttatattcttgtgaggaagaaacgttcccatccccgtcattgaggaattcggaatcggggatcgagtacatctccacttcttcccaggcggccaggccctggcccgcggccgcaccgcaccgtagtttgttccttccgcaaggaagcgagagaaaatcgagtgaaaaggaaggggaaataaggctgaatcacagtttctggatcggaggagcatccccgcctaggtctctgcagccatggttcgcggatcgctcggcaagcttgcatcgcgcgccctctccgtcgcccgggagatggcagcaccagcagctccgccgcctcaacatccacgagtaccagggcgcggagttgatgggtaaatacgggatcaacgtgcccaggggcgcggcggctgggtccgtacacgaggtcaaggacgccttgaagaacatgttccccagcgagaaagagatagttgttaaaagtcaaatccttgctggtggccgagggctgggaactttcaaaagcggactgcaaggtggtgtccatattgttaaggctgaggaagctgaattgattgcaagtaaaatgttaggccagattctgataacgaaacaaactggtccagagggaaagattgtgagcaaggtctacttgtgtgagaaactatctcttactaatgagatgtacttcgccatcacccttgataggaaaactgctggtccgctcattattgcttgcagcaagggaggaaccagtattgaagatcttgcggagaagtatcctgatatgattattaaggttcctattgatgtatttaaaggaatcacagatgaggatgcagctaaagttgttgatggtctagctctaaaggcagcggataggcagtcttctatagaacagattaagaagctgtatgaacttttctgcaagtgtgattgcacattgctggagataaatcctctggcggagacagctgacaacaagcttgttgctgctgatgcaaaattgaactttgatgataatgctgcatttagacagaaagaaatatttgcactgcgtgatacaactcaggaagaccccagggaggtcgctgctgccaaagcagatttgaactatattggtcttgatggagagattggttgcatggtgaatggagcaggattggccatggcgaccatggatattataaagttgcatggtggtacgcccgccaattttcttgatgtcggtggaagtgcatcagaggggcaggttgtggaagcttttaagatactgacttcagatgatagagtgaaggcaattctagtgaacatttttggtggcattatgaaatgtgatgtgatagcaagtggaattgttaatgctgccaaacaggttgacctgaaagttcctgttgttgttcggttggaaggcaccaatgtagaccaaggaaagaggattcttaaggaaagtggaatgactttgatcactgcagaagatcttgatgatgcggcagagaaagctgtaaaagcatccgtcaaataactagtgtatcaatctgaagtttctttttttttcactggtacaagatgagcagtgctcttttacggatttcgatttggagcagaagtcgtgaactgcaacgtttttgaaatggtttgactctgatgtcactcaagcgcgatggacaggtggagcatgctgaatagttcgcattttttgcaaggatgatgctatctagctaaaatttatcatacgcacgcacaaaggaaataacatgtgtgcctgcagcacatcgggacatgcaatcccctgttaatatttttaattagatggagccaacattgcgtccaaccaatctcatacaggagggatggaacacgcgtctaagcacatatatctact

SEQ ID NO: 128532 - DNA, 1270 bp, Zea Mays
atggttcgcggatcgctcggcaagcttgcatcgcgcgccctctccgtcgcccgggagatggcagcaccagcagctccgccgcctcaacatccacgagtaccagggcgcggagttgatgggtaaatacgggatcaacgtgcccaggggcgcggcggctgggtccgtacacgaggtcaaggacgccttgaagaacatgttccccagcgagaaagagatagttgttaaaagtcaaatccttgctggtggccgagggctgggaactttcaaaagcggactgcaaggtggtgtccatattgttaaggctgaggaagctgaattgattgcaagtaaaatgttaggccagattctgataacgaaacaaactggtccagagggaaagattgtgagcaaggtctacttgtgtgagaaactatctcttactaatgagatgtacttcgccatcacccttgataggaaaactgctggtccgctcattattgcttgcagcaagggaggaaccagtattgaagatcttgcggagaagtatcctgatatgattattaaggttcctattgatgtatttaaaggaatcacagatgaggatgcagctaaagttgttgatggtctagctctaaaggcagcggataggcagtcttctatagaacagattaagaagctgtatgaacttttctgcaagtgtgattgcacattgctggagataaatcctctggcggagacagctgacaacaagcttgttgctgctgatgcaaaattgaactttgatgataatgctgcatttagacagaaagaaatatttgcactgcgtgatacaactcaggaagaccccagggaggtcgctgctgccaaagcagatttgaactatattggtcttgatggagagattggttgcatggtgaatggagcaggattggccatggcgaccatggatattataaagttgcatggtggtacgcccgccaattttcttgatgtcggtggaagtgcatcagaggggcaggttgtggaagcttttaagatactgacttcagatgatagagtgaaggcaattctagtgaacatttttggtggcattatgaaatgtgatgtgatagcaagtggaattgttaatgctgccaaacaggttgacctgaaagttcctgttgttgttcggttggaaggcaccaatgtagaccaaggaaagaggattcttaaggaaagtggaatgactttgatcactgcagaagatcttgatgatgcggcagagaaagctgtaaaagcatccgtcaaataa

SEQ ID NO: 128533 - DNA, 2171 bp, Zea Mays
aacgcaagaaagaaccatgcgaaaacaaaaccagacgccgtgcccgtgcccgtgctctcctatcccacctacccgttgtcctgccctgccccgtccgtctcccacggtttccgcgtcccacccatcccttccacactttctcacccccgcccttctcaccccccgaaaaaattcccccggaaatcagagacgcgaatccctccctcgccccacgtccgaggtcgctcgccaattcgatccgcctcgtcgtcgcccgcccgcccgtccgccggtcgaccttgactgctccgtcgcacgtggcgtttcgcagcgcggaatctaccctgggttgggttgggagatccggggaaacccttgttcccgggcgctccgggctcgaatctcgctgcagacgggcaatgtgagcgctctccatcggagagggacgatctgcggggcggttgttggccgggtgaatcgtgcggtgcggggttgcgggaatggagcacgtgatcggagggaagtttaagcttgggaagaagatcgggagcggatctttcggggagctctatctcggtgtcaacgtacagagcggcgaggaggtggctatcaagaatctgtaaaatcaaggcatcctcagcttcattatgagtcaaaactatacatgcttctccaagggggaactggaattcctcatttgaaatggtttggagtggatggggagtacaatgtcatggtcattgatcttcttggtccaagcctcgaagacttgttcaactactgcaacagaaagttttctcttaaaacagtacttatgctagctgatcagatgatatctagggtagagtacatgcacacgagggggtttcttcatcgtgatatcaagccagacaacttcctcatgggcttaggccgtaaaacaagtcaggtttatgtcattgactatggccttgcgaagaagtatcgggacctccaaactcatagacacattccatacagggagaacaaaaacctcacaggaacagcacgatatgctagtgtaaacacccatcttggagtagaacaaagcaggagagatgacttagagtctcttggttatgtgctgatgtacttcttaagaggaagccttccttggcaaggcctgaaagctggaacgaaaaaacaaaagtatgacaaaatcagtgagaagaaaatgctaacctcaattgaggccctgtgtaaatcttatccatcagaatttgttacatatttccattattgccgctctttgcaatttgaagataagccagactacagctatttgaagaaaaattttcgggatttattcatccgtgaaggttgccagcctgattatgtatttgattggactgtatcaaggcaagctgcggacaataacagattgcgactgagtgggaagacaggtgggttggtgggaccatctgtggatcgggctgaacgagctgcagcaaaacaggatgttccacatagattcactggtccagctgatgcattggctaaaagaaccggctctggttctggtcattatggagaacacacaaagcacagaactctgttggattcccttatggcatccaatatgggtgttgactcggataaaagaaggcattcatcgtctcgcaatggaagcacatcaaggaaggctcttctgtcaagcaaccgaggttctggagaccccagtgaaccaaatcgcagcagccacctagttccgaccaccaccagcagcagccgtccatcgaccaatcaaaggcttcaccactcaactggacttgagggcaggaccccatcatttccaaaacctggaagaatcggctatgatgatcccacaatgaggagttttgaacgccttactattagcgcagagaggaggaaatgaatctttggaagagcaaacgatctgagctgctcccggcgagtatacttcactgaatggattctgtgctgtgcatggtgctgagctctgcacatagcggtgctcgttgattcttggcacagatgatttgagttatgtacattcgtttaactcttccaaaaggttagcgaagcattttacaccccgctatgagggaccggggatcggctgcaatgtttaagccgtggtgatttaagatgatgttgactctaatacttatataatgacaatgaaaaaaagttccctagactagcattacatt

SEQ ID NO: 128534 - DNA, 2176 bp, Zea Mays
aacgcaagaaagaaccatgcgaaaacaaaaccagacgccgtgcccgtgcccgtgctctcctatcccacctacccgttgtcctgccctgccccgtccgtctcccacggtttccgcgtcccacccatcccttccacactttctcacccccgcccttctcaccccccgaaaaaattcccccggaaatcagagacgcgaatccctccctcgccccacgtccgaggtcgctcgccaattcgatccgcctcgtcgtcgcccgcccgcccgtccgccggtcgaccttgactgctccgtcgcacgtggcgtttcgcagcgcggaatctaccctgggttgggttgggagatccggggaaacccttgttcccgggcgctccgggctcgaatctcgctgcagacgggcaatgtgagcgctctccatcggagagggacgatctgcggggcggttgttggccgggtgaatcgtgcggtgcggggttgcgggaatggagcacgtgatcggagggaagtttaagcttgggaagaagatcgggagcggatctttcggggagctctatctcggtgtcaacgtacagagcggcgaggaggtggctatcaagttggaatctgtaaaatcaaggcatcctcagcttcattatgagtcaaaactatacatgcttctccaagggggaactggaattcctcatttgaaatggtttggagtggatggggagtacaatgtcatggtcattgatcttcttggtccaagcctcgaagacttgttcaactactgcaacagaaagttttctcttaaaacagtacttatgctagctgatcagatgatatctagggtagagtacatgcacacgagggggtttcttcatcgtgatatcaagccagacaacttcctcatgggcttaggccgtaaaacaagtcaggtttatgtcattgactatggccttgcgaagaagtatcgggacctccaaactcatagacacattccatacagggagaacaaaaacctcacaggaacagcacgatatgctagtgtaaacacccatcttggagtagaacaaagcaggagagatgacttagagtctcttggttatgtgctgatgtacttcttaagaggaagccttccttggcaaggcctgaaagctggaacgaaaaaacaaaagtatgacaaaatcagtgagaagaaaatgctaacctcaattgaggccctgtgtaaatcttatccatcagaatttgttacatatttccattattgccgctctttgcaatttgaagataagccagactacagctatttgaagaaaaattttcgggatttattcatccgtgaaggttgccagcctgattatgtatttgattggactgtatcaaggcaagctgcggacaataacagattgcgactgagtgggaagacaggtgggttggtgggaccatctgtggatcgggctgaacgagctgcagcaaaacaggatgttccacatagattcactggtccagctgatgcattggctaaaagaaccggctctggttctggtcattatggagaacacacaaagcacagaactctgttggattcccttatggcatccaatatgggtgttgactcggataaaagaaggcattcatcgtctcgcaatggaagcacatcaaggaaggctcttctgtcaagcaaccgaggttctggagaccccagtgaaccaaatcgcagcagccacctagttccgaccaccaccagcagcagccgtccatcgaccaatcaaaggcttcaccactcaactggacttgagggcaggaccccatcatttccaaaacctggaagaatcggctatgatgatcccacaatgaggagttttgaacgccttactattagcgcagagaggaggaaatgaatctttggaagagcaaacgatctgagctgctcccggcgagtatacttcactgaatggattctgtgctgtgcatggtgctgagctctgcacatagcggtgctcgttgattcttggcacagatgatttgagttatgtacattcgtttaactcttccaaaaggttagcgaagcattttacaccccgctatgagggaccggggatcggctgcaatgtttaagccgtggtgatttaagatgatgttgactctaatacttatataatgacaatgaaaaaaagttccctagactagcattacattt

SEQ ID NO: 128535 - DNA, 201 bp, Zea Mays
atggcactgagggagctggtgtgccactgcctccacaagaaggtggccttcgacttcgagcgcatcacgccggggacgctcgtcgaggtcgacctgcacgcccgcgagccgtggcccgtgggagctcccagcttccgggaccgcaagtacgcgacggggtcgcgcaccagccgtgccaccaagtcgggctactgctggtag

SEQ ID NO: 128536 - DNA, 946 bp, Zea Mays
aaataagcggtagctaggaactgaagcgtgtagcaggagagagagagagagagacggagaagaagaaataacaatgtagcacggcacacgatcggtagagagagtctaagcgaagaagaagcagcaccagcagcgcgagcaaaacggtagtagcaaataaaccatgcatgcatgcaccggcaaatcgatcgaaacctacataaaatatgctcagtccggccggcataccaaatggggtgcgtgtgtcgtagtactgttcctcaggcctcagcacgccgcgccggcgggcggcggtgccggaggcggcgggtggtgagggccttgtcctccgctcccgctggcgtgatcagctggctgcggcttcttgcgcttcttcttctcgtagctgacgccgcgcgcgcgggcctggtgctcgcggacctcgcggaggtagaggcggacggcgcgcgccgcgaaggggttggactccgggcggcctccgttctcctcgaaggcggcgcggaggcggcccaccagcgcgtcgaggctgccccacgcctggcgcagcgggcaggggcacggcgcgggcgggctcgggtggccgaagaaggggcacgccgccgtgtggaccttggtcttgccgaactggtccaggtaccgcaggaactccagcacgtgcgcgccgctgcactgcgccaggctcagcggcggccggtggttccgcaggtactgcccgaacgtgttccagtcccgccgcttctgcgcctcgtaccggctcggcgtctgcggcgtgccgccgcccggcgccgacgaagacgccccgccgctcgatccaccggctccgcctcctccgccgccatcaccaccgcctcccgggctctcggggtttgggggcagctcagctggagactggagtggttgctagtaggggtggccgctgggagttcctgcggtacctggacgacct

SEQ ID NO: 128537 - DNA, 337 bp, Zea Mays
atctatggacacactgtaaattttatattgatctttcactcagtactttctaaacgtcagcatctaacttggacaacatgcagcttctatacccaaaactggcatgctatcaatgcaacctgctatttttccatattgatagatgatagacaagatatacaacttcgtttttttcgcacaatgtctaactgaagctgacttggaaaacctacaacttctatccaaaataggtatgtttgcaatgcaagccactattttccatattggtagacaagatacacaccttctattttctttgcacaaaatctgataattgaaggaaaaaaacaaatccagc

SEQ ID NO: 128538 - DNA, 102 bp, Zea Mays
agactttgtttggcatactacaacatagttatggatcatatattactaaccactttattacatatttgattaattgtgctacacaaaatttagagtatatat

SEQ ID NO: 128539 - DNA, 1365 bp, Zea Mays
gagccaacccaaacaacagagagagatttctgaactatgagtgcggagctgaagagggactacgagataggcgcggagatcggtcgtggccgcttcggggtggtccaccgctgcacgtcccgcgccagcggcgaggccttcgccgtgaagtccgtggaccggtcgcggctgggcgacgacctcgaccgcgagctcgctgagctcgagccgaagctggcgcaggtcgccggtgcgggcaacccgggcgtggtgcaggtgcacgcggtgtacgaggacgaggcgtggacgcacgtggtgatggacctgtgcgcggggccggacctgctggagtgggtgcgcatccggcgcggcgcgcccgtgccggagcccgtggcggccgccatcgtggcgcaggtggcgcaggcgctcgcgctctgccaccgccgcggggtcgcccaccgcgacgtcaagccggacaacatcctcatcgacgccgccgccgccgccgccgggaccgacggcgacggcgacggcgaggacgaggaggaagagggcggcgacggagaggccgaggcggcgccgcgcgcgcgcctggcggacttcgggtcggcggcgtgggtgggcgccggcgggctcgggcgcgcggagggcctggtggggacgccccactacgtggcgcccgaggtggtgggcggcggcgagtacggcgcgaaggcggacgtgtggagcgccggcgtggtgatgtacgcgctgctctcgggcggcgcgctccccttcggcggcgagagcgccgcggaggtgctggcggccgtgctgcggggcagcgcgcgcttcccgccccggctgttcggcggggtgtcccccgcggctaaggacctgatgaggcgcatgatctgccgcgacgagtggaggaggttcaccgccgagcaggtcctcgctcacccgtggatcgtgagcggcggcggagcccgtggcatggagcggccaacctgaggcggcgcgcggcataccataccagcagaccatggcgggcggacgtgtattgccgtagagacacagatacggcaaggaatcccgacgttatgtgcagaggttttgttacgtgcgtacggaccagagaaggagagacggcagctgctgccggctgcagagtagcatccgtagtcgcagactcggtagcagagcagaaggatcggcaagaagctttagtaggcactaggcaggcatttggttttcctcagcccaccgggagatgctctttacctatgagcacccagtccttttttggacgtgctggtagctggatgtgtatatacactgaccgtctttgtacaaaccgagtggttgaataaataaataaataaataaatgaatgaatgaatataa

SEQ ID NO: 128540 - DNA, 968 bp, Zea Mays
agcgcgagacgggtgttgtccatggacacgccgatgggagttccctggaagttgccgccgtggagcgccttgccacgggacacatcgatgagcgggttgtcgttgacggagttgatctcgcgctcgatggacttggtggcaaagcggatcacttcgatctgcgggcccagccactgcggggaggtgcggagcgcgtatctgtcctgcttcggcttcatcagcgggtcgagctcgccgagcttcttggccagcttcatgtacgagctgccttccaggacgtgctccatgatagcggcggcctcgatctgtccggggtggtgcttcagcttgtgcgtcaggtggtcggtgaactcgggcttgccggtcatgacctcgcagaacaccgcggagatgacctcggccatgacggcgagaacgttggcctcgaagagcacggtggaggcgaggccggagcccacggcggtgccgttgaccatggcgaggccctccttgggctgcagctcgaagaacccgtgctcgatgccggcgatcctgaacgcctcggcggcgcccaccttcctgccgtcggggcccaccgcgacggagttctggcggcccgtgatgaggccggcgatgtaggagagcgggacgaggtcgcccgacgcggtgatggtgccccggagcggcaggcacggcgtgacgttggcgttgagcagcttggcgatggcctccagaatctcgaagcggatgccggagtagccctggaggagggtgttgatgcgcacgagcatcgccgcgcgcgtggcctcggccggcagcacgtggccgtcggcgccggtgccgaacgcgccagcattgaggaatctggaagatggaaacgggacagagtagaggtcaattttcggagccttaagatagaatattgagcaataaacttggtcagggttgtacgtatacgataaacttgaagattaacttggatcaaacaa

SEQ ID NO: 128541 - DNA, 2577 bp, Zea Mays
cggcactggcgctgtttacagcaaaggcgaccaacccccgagccgcgcgggcgcagcccttcgctatttaaacgcgtcctcctcctctgtttcactccaggaagagcagcaccatcaccagctcttctccatcaagagtaacaggccatcgccttactagttctgatcccaaatcatttacggcgtaggtgcctcttgctcataacccagccccacagcaatggagtgcgagaacggccgcggcgttgctgcaaccaacagcgattccctgtgcatggcgacgccccgcgccgacccgcttaactggggcaaggcggcggaggagctgatgggcagccacctggacgaggtcaagcggatggtggccgagtaccgccaacccttggtgaagatcgagggcgccagcctcagcatcgcgcaggtggccgccgtggccaccggcgctggcgaggcccgggtcgagctggacgagtctgcccgtagccgggtcaaggcaagcagcgactgggtcatgaccagcatgatgaacggcaccgacagctacggcgtcaccaccggcttcggcgccacgtcgcacaggaggaccaaggagggcggcgcgctccagagggagctcatcaggttcctcaacgccggcgccttcggcaccggcgcggacggccacgtcctgccggccgagacgacgcgcgcggccatgctcgtccgcatcaacaccctcctccaggggtactctggcatccgcttcgagatcctcgaggcgatcgtcaagctgctcaacgccaacgtcacgccgtgcctgccgctccgcggcacggtaaccgcgtccggcgacctcgtgccgctctcctacattgcgggcctcgtcaccgggcgtgagaactctgttgcggttgccccagacggcagcaaggtcaacgccgccgaggcattcaagattgccggaatccagggcggcttcttcgagctgcagcccaaggagggtcttgcgatggtgaacggcacggccgtgggctctggccttgcctccactgtgctcttcgaggctaatatccttgccatcctcgccgaggtcctgtctgccgtgttctgcgaggtcatgaacggcaagccggagtacactgaccacctgacccacaagctcaagcaccacccgggacagatcgaggctgctgccatcatggagcacatcttggagggcagctcctacatgaagcttgccaagaagctcggcgagctcgatcccttgatgaagcccaagcaggaccggtacgcgctccgcacgtcgccgcagtggcttggcccccagattgaggttatccgcgccgccaccaagtccattgagcgcgagatcaactccgtcaacgacaacccgctcatcgatgtcgcccgaagcaaggctcttcacggtggcaacttccagggcacgcccatcggggtgtccatggacaacacccgtctcgccatcgcagccatcggcaagctcatgtttgcgcagttctctgagctcgtcaacgactactacaacaacggcttgccctccaacctgtccggtgggcgcaaccccagcttggactacggctttaagggtgccgagatcgccatggcgtcctactgctccgagctgcagttcctggggaacccggtcaccaaccacgtgcagagcgcggagcagcacaaccaggacgtcaactcactgggactcatctcctccaggaagactgctgaggccatcgagatcctaaagctcatgtcctcgacgttcctgatcgccctgtgccaggccgtggacctgcgccacatcgaggagaacgtcaagagcgctgtcaagagctgcgtgatgacggtggcgaagaagaccctgagcaccaactccaccggtggtctccacgtcgcccgcttctgcgagaaggacctgctccaggagatcgagcgcgaggcggtgttcgcgtatgccgacgacccctgcagcgctaactacccgctgatgaagaagcttcgcaacgtgctcgtggagcgcgccctcgccaacggcgctgccgagttcaacgcggagacatccgtgttcgccaaggtcgcccagttcgaggaggacctgcgcgcggcgctgccaaaggcggtggaggctgcacgggcggctgtcgagaacggcacggcagggataccgaacagaatcgccgagtgccgctcctacccgctctaccgcttcgtgcgcgaggagctcggagccgtgtacctcaccggcgagaagacgcgctctcccggcgaggagctgaacaaggtgctcgttgccatcaaccagggcaagcacatcgacccgttgctcgagtgcctcaaggagtggaacggcgagccactgcccatctgctgaacagagaaaatacaaggagcagaagactgtatttttagctaataatgctttttattcccaatttatttattgtcgttgatatgctacggattcttgtcatacagctgcaacgccctgtaaccaacttcgaacatgtaataggttttcgagtatgcgaatcatatttgcagttaattaaatccaagtgttacttttttttgaaaaaaaaa

SEQ ID NO: 128542 - DNA, 2534 bp, Zea Mays
ggcatactaccttatatactatcgaagaaaaggggatcggaatcgaggagcttcctacactcctttagtcgaatcccaagaatgttctggatttgatatattgaccagtgtggctttctccattccagcctgtctgcggtacttaggaccaactttatcttggcctatcaccaaggtagcacccgctggttcatagttctaaacttacaaaacaattccaacattgtgatttctgtaccgcataggctctgaggagatctacacatcctcatacaaaacaattccaacattgtgattccagcctgtctgcggtattgagaactttgtgccctgtccttgttgtctctcatgggcacctcaaaatgtttcttgtttatgaggatccttatcttgactaccatggctatatcagctgccatgaatgctacaatcattgggacactagtaactaagagggactacaagtttgctgagctcatgagactccctgacacatttcttatgttgtttgttctgctgtgctttgacttttcaatatatttgtcattcaagatattgtggtctgcaagaacttcagtagatcagaaaatatgttcacaggtcttgttggagagtggtcatggttacaaagttgggaacaaaaggaaccccctaacagatcatttacttggagagttagaggatactaccaaaacaacaggaattgggcgtgacccagttatggactctgaatgtgaaactaccttacaaaagcaagtcatggtcttcgatcagcaggatgaaacatttgacatcggagagacacccttgtccaagacatccaaggatcatttgggtcaaactgttggtaaagaaactccagtttctgaggccttacatgttgacactactgattcattgtcgttccatgattcacttttcctctctaagcatggatgtattgcaaggaatcccattcttccttatagacaagtttcaactcctaagttccattcagtcaagaatatgcttgacatgatagattatcttgctgttgaaggttttgctaatggagaagttgtaagggatgatgtttctgctgccttaagtcaacaagttgccgaattgatatccataagatgtaatgagataaacaacacagtgagattttgtaatgaatatgctagtagcatgaaatcgaaagttcaagtggtttttccttcacaccaccagtttgctgacattcttgatgacttctgggggaatttgtttgacctgcatggtaatttgacagaaaaaggaaatgccataaggttggaccttcttattgggctggatgttgaggagatcaaaagctgcccgtgctattttgatgtactacctgggggactatgtgatcctttgaagctaaatttaggtaacatggggctaccacctttgtttagaatcattaataacatgtgccctgaacatggaaattgcacattgcctgctgttgtggcattcagaaggcgcatcatggacacattcctcacggaggatcctagtctgttgaaggatgagaaggtatcatattttcctatggacaatgaagtacaatatgaagttcccatatacaaaaacttggacatggttgctcaatccattggcatgggaagtccattggaggagttgaacaaaatggaagttttggttcaaaaatgtccatcacagcaagtagctcatcaggcttccaagacaaatgtttatttctcctacaatgaattgaaagggctactcttgaattcttttcgggtttgtattctgaatatatcggaaattgagaaagctgattggctgtttcagaatagaggcgggtatgacgagaagctagtgggcttggctgctgaaatggtgatatttggagatatacatccaagcggggtattctgtccgaatgcagtagttggtcccgatggtaaaatattcaacctgtgcacctcaacccttggttgtggagatggatgtatgtggctacctactctccttattagctttggtgtttggtgcatttctagaatgcttgaagtgcttccttcggcaaagaaacctttgctttttgggaagtatagtagggttctcaatcgacttcagggcattctggatccagcattcttgaagcctgttcaacctgtctccatatgcccgtgcaccaagagcgtcccagtcgtgagactgcctgatggaagccaacgtatcagcgtggaagctgtgctggagatgctgatggaagttgaggccaccatctacggtgtgaggcacgctggagtctatggcagggagaagaaaagcctgaaatctgttctggaccgctataagctccggctctccgaggtggcatctcaggagtaggatttccttcatattagatcgacataataataataaaataaaaagctgaactctccagctatggtcacagatttctgtatgtctcttatctataagctatggtaataatgttatgctacatggtatgggcttgtgaaccgagactaataatttgacaattcctg

SEQ ID NO: 128543 - DNA, 1008 bp, Zea Mays
gaaaaatccggcccgtgaaaaaagtcacaggactctactgtatgtcgcatggaacgattgcacagccctgcttagcagtaatctcgaaccgtcgaacgcgttgaggaatcagtttagttctcgctaatcagccacccgacccgggcattaaacatcagctaacccttgggctcaataccagcgctctatataaaccgtggctctggttcccatccattgcatccccctttctgctcctgtgctgcgtccaccagcctcgtcgttaggacgtaaggtaagacacccaggggcgagccagtgagtacagagagtagccttacgtagcgaagctcagagcaagcgagggtacggtcaaggggggtgatggcgctgtctcgacgcatggcggctcccgtcctcgtcctcatgctcctcctcgtcgccacaggtgcccgactcaactcctcgttgctcgtcagtgctgcttgagtgacccttcaaagtaaagttcacagtaatgcgacgcgcttggtgttgtaatgcttaatttgagtgtggccggccggtgcagagctggggacgaccaaggtggcggaggcgaggcactgcctgtcgcagagccaccggttcaagggcctgtgcatgagcagcaacaactgcgccaacgtgtgccagaccgagaacttccccggcggcgagtgtaaggcggagggcgccacgcgcaagtgcttctgcaagaagatatgctagtagtagcctcggctttgctggcacaagcaggtcgtcggcacgcaacgcaattcaagcatcatatcggtcctcctcccgcgttgctgtctactcgaccccgttttctctttcgatcgatttcgttgtttcctgttgctctcttcttttcccgcgaataatatgctccatgggatctcactgttgtactttctgcatccgttggtagtcaggacgatccttcttcccgctgtcacgtgtgattcaaaatggatgtactaatgcaactgttcgttcttccaa

SEQ ID NO: 128544 - DNA, 699 bp, Zea Mays
attgcatccccctttctgctcctgtgctgcgtccaccagcctcgtcgttaggacgtaaggtaagacacccaggggcgagccagtgagtacagagagtagccttacgtagcgaagctcagagcaagcgagggtacggtcaaggggggtgatggcgctgtctcgacgcatggcggctcccgtcctcgtcctcatgctcctcctcgtcgccacaggtgcccgactcaactcctcgttgctcagctggggacgaccaaggtggcggaggcgaggcactgcctgtcgcagagccaccggttcaagggcctgtgcatgagcagcaacaactgcgccaacgtgtgccagaccgagaacttccccggcggcgagtgtaaggcggagggcgccacgcgcaagtgcttctgcaagaagatatgctagtagtagcctcggctttgctggcacaagcaggtcgtcggcacgcaacgcaattcaagcatcatatcggtcctcctcccgcgttgctgtctactcgaccccgttttctctttcgatcgatttcgttgtttcctgttgctctcttcttttcccgcgaataatatgctccatgggatctcactgttgtactttctgcatccgttggtagtcaggacgatccttcttcccgctgtcacgtgtgattcaaaatggatgtactaatgcaactgttcgttcttccaaatc

SEQ ID NO: 128545 - DNA, 711 bp, Zea Mays
attgcatccccctttctgctcctgtgctgcgtccaccagcctcgtcgttaggacgtaaggtaagacacccaggggcgagccagtgagtacagagagtagccttacgtagcgaagctcagagcaagcgagggtacggtcaaggggggtgatggcgctgtctcgacgcatggcggctcccgtcctcgtcctcatgctcctcctcgtcgccacagagctggggacgaccaaggtggcggaggcgaggcactgcctgtcgcagagccaccggttcaagggcctgtgcatgagcagcaacaactgcgccaacgtgtgccagaccgagaacttccccggcggcgagtgtaaggcggagggcgccacgcgcaagtgcttctgcaagaagatatgctagtagtagcctcggctttgctggcacaagcaggtcgtcggcacgcaacgcaattcaagcatcatatcggtcctcctcccgcgttgctgtctactcgaccccgttttctctttcgatcgatttcgttgtttcctgttgctctcttcttttcccgcgaataatatgctccatgggatctcactgttgtactttctgcatccgttggtagtcaggacgatccttcttcccgctgtcacgtgtgattcaaaatggatgtactaatgcaactgttcgttcttccaaatctgctttggtgctagctagctagggaacttgatgaccaa

SEQ ID NO: 128546 - DNA, 754 bp, Zea Mays
gtatccgcgaggatccccccacaccttgcgacctgcgttgtcacccacccatcaaggttggggccgccagcaggttcagccgttcctgttcttgataaaacgagagaaggatggcggcagtgtctcagggagctgtcctattcttgtttctcctcctcgtcgcagcaggtgattagctggtgccctatggtgtcaggttttaattgctcattatccatctataattgtacgtactcgtaccaggcagattgattggtcacccacctgttcttggtgactaataaatctgtacgttgcgaatctgcaaaatggaatgtgatcagtatggtgcatgcagaggtgggaaccatcgatgccaaaatgggagtagccatgcccatgcatgccttgataatggagaacgtgaaacagcaggagaaggagaaggagaaggagaaggaggagaaaagcacggagaaggaagagagtcgatgcttatcgcagagtctccagttcgagggcttctgcttcaacagcgacagatgcgccgaggtgtgcatgaaggagagctttcccggtggcgagtgcaagcgggacgtggccatgcgcaagtgcttctgcaagaagccttgctagttcatcggtcttgctaattgttgatgggtgcttcattaatttgatttgatgggtctcatggctacgagaaacaaaactacttttgataaaataattaagatacaacgaagcaaacaaaaaaagtaactcaaaataaaga

SEQ ID NO: 128547 - DNA, 729 bp, Zea Mays
gtatccgcgaggatccccccacaccttgcgacctgcgttgtcacccacccatcaaggttggggccgccagcaggttcagccgttcctgttcttgataaaacgagagaaggatggcggcagtgtctcagggagctgtcctattcttgtttctcctcctcgtcgcagcagaggtgggaaccatcgatgccaaaatgggagtagccatgcccatgcatgccttgataatggagaacgtgaaacagcaggagaaggagaaggagaaggagaaggaggagaaaagcacggagaaggaagagagtcgatgcttatcgcagagtctccagttcgagggcttctgcttcaacagcgacagatgcgccgaggtgtgcatgaaggagagctttcccggtggcgagtgcaagcgggacgtggccatgcgcaagtgcttctgcaagaagccttgctagttcatcggtcttgctaattgttgatgggtgcttcattaatttgatttgatgggtctcatggctacgagaaacaaaactacttttgataaaatgcagggcatgaaaagcgtttctgcagtccttaaattgctgggtttttttttgacgaaactgcatggaggggtttgcagccccttgcagaaatttattgaaagaaacagtcaagtaatttacaaatagcagaattaagatacaacgaagcaaacaaaaaaagtaactcaaaataaagatcacaacagatttt

SEQ ID NO: 128548 - DNA, 1008 bp, Zea Mays
aaaatacttgattcagtgtcagagatttgattccatctacatgaacttcataggaaaaaaatgaatggagtgattctaaagttggattttgaaaaagcttatgataaggtaaaatggcccttcctccaacaagctatgcgaatgaaaggtttctcgcagaaatggtgtgattgggtttagtcaattgtctctggaggacatgtgggggttaaagttaatgatgaaattggccctttcttttctactcataagggtctccgtcaaggtgatcctctctctccgattctctttaatatagttgcggacatgttgccaattctatttttaagagcaaaggtaaataaccaattcacgggtgtggttcctcatctagtggatggtggcctttctatcctccggtatgcggatgataccgttgtttttctggatcataacttggatcaagcacgaaatgtgaaacttctcctgaccgcttttgagcagatgtcaggtttgaaaatcaactttcacaaaagtgagcttttttgctatgggttagctaaggatcatgaaatagattattcttgtctttttggttgtgggatcggttcttttcctctcaaataccttggaattcctatgacccatcgcaggttacgaaatagtgagtggcagtgtgttattgatagattcgaaaaacgattagctatgtggaaaggtaaattactttcttccggaggtcgtctagtgctcattaattcagtcttaagcagcctccctattttcatgatgtccttttttgaggtgcctatcggggtgttaaaaaaactagatgccatccgctctcggttctattggcaaaatggccaatttaaaaagaaatacagacttgcaaaatggaatattatttgtcaacctaaggaggttggtggcttgggggtagctaatctagccactaagaacatttgtttactcagcaagtggctctttaagttattgaatcaagacggtacatggcaacaacttcta

SEQ ID NO: 128549 - DNA, 1916 bp, Zea Mays
gacgaggaccgagccatccaagagcttggccacggggacgggggaagctctcgaggctcgagggaaagagacagccccccaaaggcccaaaccctctcctcttcttcttcccttccattcgggtcgcgtccagttgctggcagccatctctcgcggtcgcggcctcgcgggcaacctcctgtcttctccccatcggatccagtgctgcggatccgcatttccgcaaggtagtcaatggcggcttccccggcggaggcgggggcacaggcgctgcccgaggcgacggaggcgaaggagaagggcaagcggggcggggtgctgaggagggtgtggcgggcgctcttcggtggccgcgaggacttcgagaagcggctgcagtacctatccaaggaggaggccgccgtgcacgcgcggatgcgccggcggacgcagttctcgcgccgcaccgtgcgaaacctcatcgtactctccgtcctcgccgaggtgttagctgttgtttatgccatcatgatgacaagaaatgaggatctaacttggcaaatgagggcaatacgggtgctacctatgttcgttcttcctgttgtatcctctgtcatatattcaacagttgttaacttcacaagaatgcttgagcggaaagatcagaagacccttgaaaaattgagggctgagagaaaagccaagattgatgagcttaaagagagaacaaactattatcttacccaacagcttattcagaaatatgatcttgatcctgccgcaaaggctgcagcagcttcagttttggcatctaagcttggggaggacactggcttaaaagttcatgttggagaagaaccaaagctggatgctgcagtggctagaagcaatgatgttgagatagtaccatcagatggtttgagaaacaggaaacaacccaatgcaagaggaagcaggaccgggagccctactgctgataccccagcacggggaactgaatccagtctaactgctggtgcagacctggaaactgctccagctcctttggtggtagaacatcatcaaggcttaggggctagtgatggtggtggatggattgcaaagattgctgccttacttgtggcagaggacccatcacagtcatatgctttgatatgtggcaactgccatatgcataatggcttggcccgaaaggaagattatccgcatgttacctactactgcccacattgtcatgcattaaacacatcaaagcagtccatgtggcaatactcgggctccaactcagggcggtcatcccctgttgttctggatgatggtctatccacttccagttcagtacaagagactgaattgagtaacctgacacacactgcaggagctacctgaggaaggaaatgcagagaagcaagaaaaggcaagttgatggttcacagaacttctattgatgtgtgtggaactacttaatctttagacgtatatcgtcatgtgttctggtggagccacagatttagcactgttgtaaattggaaatagtgactgatatgatccctcagatacttagcacacacccaaaagaagaaactagccatggtgacatccttgagtggatgattttttgttgtcaatagagcgcgaagacttcctgctgcatgacaagagtcacaagatggtgctgaaaagctatatatgataaatgaggcaatctaacaggtcagatgtgtaacgttcatacaagatggtgtaggatataacataatatcattgcttcgttttctatttctatcatttttatatgcacacgcttgttcagagaccagaaacgtggataatttttgcgtttattttgaccttcgatctttcctattatgtttgttacttcactgattccaaattgtgtaagtttgttcagattttgatacagctaaatatgcatt

SEQ ID NO: 128550 - DNA, 493 bp, Zea Mays
gacaagcagctgatgtgggagatcctgtccttcgacggtgggatgccacaatggcagatggccgcacccgaggaacacgacctcgatggaggaagggagctgcgaggtgcgttcgaaggagcacgtccacaccatcgtccaattgacgtcgacgaatcagatccacttgttgcttccgtgttcccttgtaacgacgacctatctgcaacaatggagctcgcacccaatagtacgtgattatttttctcatccttaaactaagtggatctgaagcagagttggcctccgccaccggccgcgctctcagctagcctcattgtggaggatgtcgcgttagaggtcgatgacggggagcgtgtgtgctgggtcaccgccgccgtctccgggagctccttctccttcgcatccgtggccacatcgcaacttattatgcagcggatcctcacgcggtctgtacgtacgtaggattctctgaaaaataatcttgatacaa

SEQ ID NO: 128551 - DNA, 1619 bp, Zea Mays
catcgtcgcgcccccaccccatacgagccgcccccgcgacgctgaccccactgccgtccagcaggatctctcccttcccccgccccacgcctagcaggatctctcccttccctcgcgcgtccgagacgacatggacgaaggtgggaggctcccaacgcatccccgccgacctcaacgccgacggtcctttcctaacccgcagcccccggccacagtctctctcttccggtccagtgggggctgctagcttccaggaatattggagatgtgccttcaacactctagggctcgattgcctccagataagcaacttgctgcagaaaaaagttttgccttgtattgcaagccagttgaattgtacaatattatccagaggcgagctattaaaaatccaccttttgttcaaagatcccttctatataagatacaggcaaggagaaaaaagaggctccaaccgcgcctcctcaagttacttcgcagcaatgccttcaaggcgaagcccgcgctcatcaccctcatcggcgcctgcgcggccatgggcgccaatgccgaagtcaccgcctccatcacgtgcctccgcgatgcaatcgctagcgatgactgggcagcgaggaaggccgcggcggaggcgcttgctgcattggccctagagcacacggatcttctcacgacctacaaatcctcttgcgtcaccttcttcgaggccagaaggtttgacaaggtcaaggttgtgcaagagtcgatgaaccagatgattgaggcggggaaggagatcccaggtgctgaagaggacgagtgctcctcgctctgccaccagcgtcccagtcacaacgaagatcttctcttacagggagtgcaagtgatgggcgatatccagctgcttcgctgggctcaaactcagttcctttagcaacaaggaagagcatattatctgtaagcagatcatctctgtctgacgtgtctaccagtgtaattttctggaccttctccagtctattgtgtagttgcaaaagaatatgtgaattaccagtcagtggagattgagagggattccccggctagaagctcaagcggattaggaagtggctcatcttcatccagtgtttattttttcagtaaccagaggatgacaagcctactacaagagttggtcctaagttataaaataagcctaactttttttacagagtacacaaatgtcaggttttcctgtttgggctagcaccacaaatggaaacaaaaaattggactcagcccatcgtgaagatatgaaggaagagcactgtcccattattctgtttttcgaccatgtttctagcatgaacatgccagcatggtgccatcaacaacttccctgttagctcacggtacaccatgctccagcctgtcccctggttatcactgtggtgctgattgtgttcccaagatgcactgaaatagagcaagatcaaatgaggatgaagttactgtgtagagatttttgttccccctttgtagcagcacccatggatttttatttgcacagaattactctcttttactggttcattcaataattcaatttgttgcttggaaaccactgtataataaatacaaatgctatggtatgattttgtgaa

SEQ ID NO: 128552 - DNA, 1609 bp, Zea Mays
catcgtcgcgcccccaccccatacgagccgcccccgcgacgctgaccccactgccgtccagcaggatctctcccttcccccgccccacgcctagcaggatctctcccttccctcgcgcgtccgagacgacatggacgaaggtgggaggctcccaacgcatccccgccgacctcaacgccgacggtcctttcctaacccgcagcccccggccacagtctctctcttccggtccagtgggggctgctagcttccaggaatattggagatgtgccttcaacactctagggctcgattgcctccagataagcaacttgctgcagaaaaaagttttgccttgtattgcaagccagttgaattgtacaatattatccagaggcgagctattaaaaatccaccttttgttcaaagatcccttctatataagatacaggcaaggagaaaaaagaggctccaaccgcgcctcctcaagttacttcgcagcaatgccttcaaggcgaagcccgcgctcatcaccctcatcggcgcctgcgcggccatgggcgccaatgccgaagtcaccgcctccatcacgtgcctccgcgatgcaatcgctagcgatgactgggcagcgaggaaggccgcggcggaggcgcttgctgcattggccctagagcacacggatcttctcacgacctacaaatcctcttgcgtcaccttcttcgaggccagaaggtttgacaaggtcaaggttgtgcaagagtcgatgaaccagatgattgaggcggggaaggagatcccaggtgctgaagaggacgagtgctcctcgctctgccaccagcgtcccagtcacaacgaagatcttctcttacagggagtgcaagtgatgggcgatatccagctgcttcgctgggctcaaactcagttcctttagcaacaaggaagagcatattatctgtaagcagatcatctctgtctgacgtgtctaccagtgtaattttctggaccttctccagtctattgtgtagttgcaaaagaatatgtgaattaccagtcagtggagattgagagggattccccggctagaagctcaagcggattaggaagtggctcatcttcatccagtgtaaccagaggatgacaagcctactacaagagttggtcctaagttataaaataagcctaactttttttacagagtacacaaatgtcaggttttcctgtttgggctagcaccacaaatggaaacaaaaaattggactcagcccatcgtgaagatatgaaggaagagcactgtcccattattctgtttttcgaagaccatgtttctagcatgaacatgccagcatggtgccatcaacaacttccctgttagctcacggtacaccatgctccagcctgtcccctggttatcactgtggtgctgattgtgttcccaagatgcactgaaatagagcaagatcaaatgaggatgaagttactgtgtagagatttttgttccccctttgtagcagcacccatggatttttatttgcacagaattactctcttttactggttcattcaataattcaatttgttgcttggaaaccactgtataataaatacaaatgctatggtatgattttgtgaa

SEQ ID NO: 128553 - DNA, 726 bp, Zea Mays
tcaaactccttgtcaaggtacacctcgtgtagcgattttctgactttcctgagtgaggcggcgctattggctttgtctattgtgtagttgcaaaagaatatgtgaattaccagtcagtggagattgagagggattccccggctagaagctcaagcggattaggaagtggctcatcttcatccagtgattctgactctgatgttacagtttattttttcagtaaccagaggatgacaagcctactacaagagttggtcctaagttataaaataagcctaactttttttacagagtacacaaatgtcaggttttcctgtttgggctagcaccacaaatggaaacaaaaaattggactcagcccatcgtgaagatatgaaggaagagcactgtcccattattctgtttttcgaagaccatgtttctagcatgaacatgccagcatggtgccatcaacaacttccctgttagctcacggtacaccatgctccagcctgtcccctggttatcactgtggtgctgattgtgttcccaagatgcactgaaatagagcaagatcaaatgaggatgaagttactgtgtagagatttttgttccccctttgtagcagcacccatggatttttatttgcacagaattactctcttttactggttcattcaataattcaatttgttgcttggaaaccactgtataataaatacaaatgctatggtatgattttgtgaa

SEQ ID NO: 128554 - DNA, 468 bp, Zea Mays
atgcagggcggtggtgcggatggagtggacatcgggaaggggacggaccggggtgtactgtggtggggacagcagcagcgggtgacggggtggccgggtcggggtgcggggcggtggagtgtggtagcaggtggtgcggggggaggtggaggtggtggtctggtactctggtccgatggcggtggtggtgcggtcgcggcgatggtactcctctacctcgaccagccagagatctgccaggtggcccacctcaacagtgccttccgcggcacagcctcggcgggctgcgtctgggctgccaagctccccgctaactaccgctaccttgcggccctagtcgcgaccgccgatgacgagggctgtggtgatagagatcccaacggcaagcgcttgaccaagaaagagatttacgctcgtctgtgccgatccaccctcttttatgccgcagaaaggaattctggattctga

SEQ ID NO: 128555 - DNA, 1847 bp, Zea Mays
acctagcgaagaaaacccagccaaagccctcccccctgttcccctcgtctcgtcgccgcctacgaaaatggctgcgctcgcgacactcctccgccacagccgccgcagccatgcccacgtcctccccatctcccgtgcgctctccaccaccaccccgaccaccggcggcaccgatcccgttgccatcacgttgtcggacgccaagagacaactcctccgcgagcgcgatccggaccgcgtggtctccatcctcgacgccatcgacacggcgtccatctccgctgcttccacccggcacgcgctctccctcgccgcgcgccgcctttctcgctcccgccgcttcgctgacgcggaggccctcctctcctcccatctcaccgcgtccaccaccgaggcccacctcgccgccgtcctgtgctcctacgcctccgccaacctccccgagaaggccatcgacgcgttccgctccgctgcgccgtcccttccaacccccaactccccgctccccttcaacgccctcctctccaccttcatacgatgtcgccgctacagacgcgtccctgtcctcttcgctgagctctccaaggagttttccatcacccccaatgccacatcctatggcatccttgtcaaggcctactgcatggcccgcgatgatgctaaggccaagcaggccttggatctaatgcgcgagcaaggtatctcgccgaccaacaggatctacaccacgttgatcgattccatgtataagaggaagatgaccaatgaggctgagtctttgtggaaagagatggtagaaagtgaatgtgagcccgatgtggcaacttataatgtgaaggccatgtactacgcgctccatggaaagccagaagaggttatggaggtgatgacagagatggaagcggctggtgtgaagccggacaccaccacctacaatttcctcatgactagctattgcaagagtggcaaattggaggatgctaaggttctttaccactccctagctgagaaggggtgctcggcagatgctgccacgtacaagcacatgttagcagaactctgtgcctatggagactttgatgctggtttgggcatcttcaaggatagcttaaagaggcgtaaggtgccagattttagaacaatgaaagggttggttgagggattggcaaagggaggcagggtggctgatgccaaagaggttgttgcagaggtaaaaaagatgttcccagagaatttgctgtctggttggaagaaggttgagaaagagcttgggttggactcagatagtggagaaactcctctgttggaagttacatctggagaaactgttgctgaggttaggcccgatgctgcagaggtagaggcacttgagctcgaaggatctgccgctgaggaagttactgtatcagaagaatccagtgatgatgaagcttatgtgcctgaagcatcatctagtgaagaagtgccacaaggtcgtgcctaagtggtattgccatgttattcaagtttcatgggtggtgtttgcattgatcacattctctacacaaaagaattgttaatgctgccctgtaatggtaaacattagattttcaatacatgctcctgagctgctaacatggccaactcctgggataaaagcatacctggtatgcctgctgttactatgctaagaggctattgttttggtgatacgtaccttgtcattttatatgataaaacacattgtgctttgcagttctcttaccgctctggtttgtattactgtttaatttgcactgctaaagacagtcaagtagcagtttgatgttatgaatggctgaatcatttgaccacaatatttgacaaac

SEQ ID NO: 128556 - DNA, 130 bp, Zea Mays
gttaggtttcccttgaaggcaaaaattaattcacccactttaataggaagttattttgatagacttaaatcgaaccataaaattttaactaatttagagcaactccaacagcctagctaaatcaattagt

SEQ ID NO: 128557 - DNA, 3001 bp, Zea Mays
catcaatccgaggcacggaggcagcacgactgcacgagcgtcaaaccaaatggcgccgcacaccaccggggtgggaggcggcagcggggccgaggaggaggtgtcggaggcggcggctgcatcccctgcgttacggcaccgccacgctggcaagggcgaggccgaggccgaggggctggacggcaatggcgacgctggggccgacggccaggcgtccctggagcgggtgttcgcggacaaggcggtgccgtcatggcgggagcagctcacgctgcgggcgttcgtcgtcagcgcgctgctcgccgtcatgttcaacgtcatcgtcatgaagctcaacctcaccacggggatcgtcccctcgctcaacgtctccgcggggctgctcggtttcttcttcgtccgcatgtggaccgccgccgtcgagaggatgggcttcctctgccatcccttcaccaggcaggagaacaccatcatccagacctgcgtcgtctccgcctacggcatcgccttcagcggtggcttcggcagttatctgtttggaatgagtgacaaaatagctaaacaagcaacagaggctaaagatgctaataacataaaggatcctcaccttggatggatgatagggttcctattccttgtcagctttattggtctctttgcacttgtgcccctaagaaagattatgattgttgactacaagctgacctatccaagtggcacagccactgcatatctcatcaacggttttcacacacctgagggagccaagcttgcaaagaagcaagtaaagacgttgggcaagtacttcatgtttagctttttctggggctttttccagtggttctacactgcaggggatgagtgtggattcaaaaatttcccaacgttgggccttgaagcttataacaataggttcttctttgacttctctcctacatacgttggagttggcatgatctgcccatacatcgttaacgtgtccgttctgctgggcggtatcctctcatggggtgtaatgtggcctctcattgccaagaagaaggggagttggtacctggctagcgtcgatgactcaagtctccatgggctgcaggcttacatggttttcatttccatcgccttgatccttggggacggtttatacaactttatcaaggtgctgatccgcacgattgcgggcttcatatcgatggtgcagcaaaattcaaaaggcatgcttcctgtttcggacaatggcagctcaatgtccgctaccgaagctctgtcctttgacgacgaacgtcgcactgagatttttctgagagatcaagttcccaagtcagttgcatacgggggctatgttgtagttgccgcgatatctatcggcacccttcctcagattttcccgcagctcaagtggtactacatcttggtcgcctatgtcgtggcgcctgtgctggccttctgcaacgcttacggaagtggcctcactgactggtctctcgcctccacctacggcaagctcgcgatcttcgtgttcggtgcatgggctggcctctcacacggtggcgtgctcgttgggctcgctgcctgtggtgtcatgatgagcatcgtgtccaccgcctcagacctgatgcaagacttcaagaccgggtacctgacgctggcatcaccgaggtctatgtttgtcagccaggtgatcggcaccgggatggggtgtgtcatcgggccctgcgtcttctggctcttctacaaggcgttcggtgacattggcgagagtggcaccgagtatccggcgccctatgccatcgtgtaccgcaacatggccatcctcggcgtggatggctttggctcgctcccagaaaactgcctcaccctctgctacattttctttgcggcagcgatcgccatcaaccttgcgagggacctgaccccgcacagggtgtcgaggtttatcccgctgccaatggcgatggcgatcccgttctacatcggatcctacttcgccatcgacatgtttctgggcagcatgatcctcttcgtgtgggagcggctgaacaaggcgaaagcggacgcgttcggacctgcggtcgcgtcggggctgatctgcggagatggcatctggaccctgccgcagtccattctggctctggccaaagtgcagcctccaatttgcatgaagtttttgtccagatcgaccaatgccaaggtggacagcttcctcggcttgtcatgattttacatagaatgacaagtgggcacacgctctcatcctgtaattattggttcaaaaatttaatcaccgagatactgaattgtactagaagagaagaggttttgctgtgaggtgaacaaatcttcgtccgtatagtcagttcgtttcaggagaagttttactcaatgtccctctgccatttttttggcggttctattcttgatttgcgtgcttcacggttatataggtcttagaatgtaaaacgttcataacaaatttccgtaggaacggactgatgtcctgcaggtagacctagtctactcacatcttatgtatcattacatatgagagcaatacacacctaaaccgatatgctaagctgttgaccatgaagcctatctgcaaaatataggcgatcctgaagagggtttacatttcttcttccttgaaacggctccatacctacacggagcctgaacgctggacttgcaacgtggtcatccattccggacagatttgtagtggaagtcatcaattgtgttgtaaatgttgcccacatcaacatgaccttggatggccgcactgtgaaataacaaggatcatagtttgtgataaataataaagacaagatccagaattgtagtagagtattacaaaagctggttttcctcagtaaatggggtcagacaatttttaatggtatttttttgtctatacatgttagaactgtattatagtttatggggtcttccttgtacatttttcatctcacccctctatttgtaatgggcctggcccaactctcaa

SEQ ID NO: 128558 - DNA, 827 bp, Zea Mays
tcaccgttttattcccattccatccagcgagcttgattgttgctttgcctttgcgctttgcttgtttactcctactacaatagcctctcgccgccgctggctctgctacccgcgttcttcgctgcatctggttcttctcggactccgccgctccccccgcagacgcaagaaactgctggccatggagcccccatccgcccaggcgatgtccgcgactgacgacttccaggacaaggccgtcgacgagtgttgctcttgctgctacgattgctgctccagcatcctggacttcctgtgctgctcgtcctgatcgatcgatgcctgccctttcgacggccccgtggaatttctcagggaaccggaggccttaccgtggcccactgatcttggattctagatgccgtgggattcgtgtgttctttaggtccttcggtgacgatgtttgtaatccggattcgaatcatcggtaacagtaaaggaaacttgatagactgctgaacagccgagttatcttcaaccctgcggtgtgtttcctctgataaagcttttctgcgcgtttgcagatcgattcgctgtttggaattcttatgggtgacgtgcggtcgcacttgacgcacgcttcattgcagattttatttacaggagttcttttttttttccgcaaaccatttggttctgcgtttcttgtgcactgaacactgagaagtgagaagtcctcattgcactagcaagttagcaaagttacgtgacctacttgctgatatcatcgagacctcggtagaagtagcaaaagcgggcacagattaatacaaaagaataggcctata

SEQ ID NO: 128559 - DNA, 357 bp, Zea Mays
acttacctggacggggtcaacgggctatcaagaaggcctgtggcctagatcagtggccttcattgcactttagagggtgcgctggtttaccatctctcaaagtgggagagtaaacgtcataatttgtggtagcggggtaagcgtccgcgtggcccctgctaaattgaaatgtttaacatttagcttttgtgtaagtcattcaaagagcttttgatgactataaatagcttgttaaatagatgttgaacttgtttaggggattgatgatgaattgtcttcataaatcactagctgaatgctcgtgtgttgcaacgggaatatataataccagtatactacgacaccttatatacaaaa

SEQ ID NO: 128560 - DNA, 1443 bp, Zea Mays
agtgcagcgcacaacgcaccgttctcgaaactcacgacccctctgtctcgtctcgccgcaacctcatcctatccgtctcaccctcatccccgtttaatatataccgttccgccgttcgtctcctctggccctctctccatccccagcccacgaccctccgccaccagccatcgtctgcatcagatctcccgcccgtccgttacatcccagggcgacgcggccgcggccatgacgccatcctcagctctcgccctcgcgcaccacgccgcggtatccccgctcccgtcctccacgccgcggccctcccccaggtccagctctctgagcctgggcccgggctccgccgggctcgggccgcgccggctcgtcgcggcggcgcccccacgggcgttcttctcctcgtccccctaccagccgccccagccggaggggttctcgcagcaccgcgagtacggtctggtccccatggtcatcgagaccacctcccgcggggagcgcgcctacgacatcttctcgcgcctgctcaaggagcgcatcgtctgcatccacgggcccatcgccgacgacacggcctcgcttgtcgtcgcgcagctgctcttcctcgagtccgagaacccgctcaagcccgtccacctctacatcaactcccccgggggcgtcgtcaccgcggggctcgccatctacgacaccatgcagtacatccgctgccccgtcaccaccctctgcatcggccaggcggcctccatgggctcgctcctcctcgcggctggggcgccgggtgagaggcgcgcgcttcccaacgccagggtcatgatccaccagccctcgggcggcgcgcaggggcaagccaccgacatcgccatccaggccaaggagatcctcaaaatgcgcgaccgcctcaacaagatctaccagaagcacacgcgccagcccatcgataagattgagcagtgcatggagagggacctcttcatggaccctgaagaggcgcgcgactggggcctcatcgacgaggtcatcgagaatcgacctgcctcgttcatgcccgacggaatcggtggaggcctcgatgtgcccaggctcggtggcgttggcggcggacgggggagggacgtcgaggaaccttccgcggtgtgaggattggcctcaaaggtgaaatccttcctcatccggtggatgtgttgtttgttgttagatccaaaggttcaattcttactatacaaggttaaccttgttattatggttatggaaacgtccggctccccattgtccttgttgcttaaattgcttcaattgagctattggggatataattattgcaactctaaggaaattctgcactgttgatactgataaattgacacagtattgtgtatgttgtactatatttgtatcaattccatgccaggacattcaaactttttcctcttttgtttctttctc

SEQ ID NO: 128561 - DNA, 1042 bp, Zea Mays
ggccaccggtacctattggacaggcaacgtcctcatcttcatctcccaggttttcccctccaatcacccccaggtcttcctctcgcgagttgcggtctcgcggccccctccgccgaccgccgcctcctcacaaccgcggaagctgcttccctctccattggacgcggccagcttccatctctcggtcacctccctctacatcccacggccgctaccaccttccctctacctcacacggcagccggcctctccaaggtctgcacacgcattcagcgacgcatttgcctatatcagcactgtggtcataactctagtagagaaaggagaagatgcaggcatctagggcaaggcttttcaaggagtacaaggaggtacaacgagagaagtcagctgaccctgatatccagttaatatgtgatgattccaacatattcaagtggactgctcttatcaagggcccttctgaaacaccttatgaaggtggtgtgtttcaacttgcgttcgcaattccagagcagtatcctctactgcctcctcaagttcgatttttaaccaaaattttccacccaaatgtgcatttcaagacaggtgaaatttgtcttgatatattgaagaatgcatggagccctgcatggacctttcagtctgtttgtagagcgataattgctctgatggcccatcctgaaccagacagcccacttaactgtgattcaggcaatctcctgcggtcgggtgacatcagaggctatcaatcaatggcccgcatgtatacaaggctggctgccatgccaaagaaaggttagatgtagaacatgtgccaagccaagagcctatgtcagtccatatgttgtcaggtttgctgtgtgctgtctgtctgtgaacttggtggttcttgtttcctaataagtcctaaccattcatgtgtgtgtattctgtattctgtatcccggattcccgatgcttggtctgtgatgtaataaatcctggaattcaacagttgttacttctgatctatttatttagttgctcagtatttccgtca

SEQ ID NO: 128562 - DNA, 1024 bp, Zea Mays
ggccaccggtacctattggacaggcaacgtcctcatcttcatctcccaggttttcccctccaatcacccccaggtcttcctctcgcgagttgcggtctcgcggccccctccgccgaccgccgcctcctcacaaccgcggaagctgcttccctctccattggacgcggccagcttccatctctcggtcacctccctctacatcccacggccgctaccaccttccctctacctcacacggcagccggcctctccaagcgacgcatttgcctatatcagcactgtggtcataactctagtagagaaaggagaagatgcaggcatctagggcaaggcttttcaaggagtacaaggaggtacaacgagagaagtcagctgaccctgatatccagttaatatgtgatgattccaacatattcaagtggactgctcttatcaagggcccttctgaaacaccttatgaaggtggtgtgtttcaacttgcgttcgcaattccagagcagtatcctctactgcctcctcaagttcgatttttaaccaaaattttccacccaaatgtgcatttcaagacaggtgaaatttgtcttgatatattgaagaatgcatggagccctgcatggacctttcagtctgtttgtagagcgataattgctctgatggcccatcctgaaccagacagcccacttaactgtgattcaggcaatctcctgcggtcgggtgacatcagaggctatcaatcaatggcccgcatgtatacaaggctggctgccatgccaaagaaaggttagatgtagaacatgtgccaagccaagagcctatgtcagtccatatgttgtcaggtttgctgtgtgctgtctgtctgtgaacttggtggttcttgtttcctaataagtcctaaccattcatgtgtgtgtattctgtattctgtatcccggattcccgatgcttggtctgtgatgtaataaatcctggaattcaacagttgttacttctgatctatttatttagttgctcagtatttccgtca

SEQ ID NO: 128563 - DNA, 920 bp, Zea Mays
cgaaccctaaaatccttcttctgattcgttcagttagttgtagatttgtgtgctgacggatgccctgctaatccaatacatcgatccgtggcctgtctagatttttgttcttgaaaacgggcaaggtcgacatgagttgacagtcattcagcgacgcatttgcctatatcagcactgtggtcataactctagtagagaaaggagaagatgcaggcatctagggcaaggcttttcaaggagtacaaggaggtacaacgagagaagtcagctgaccctgatatccagttaatatgtgatgattccaacatattcaagtggactgctcttatcaagggcccttctgaaacaccttatgaaggtggtgtgtttcaacttgcgttcgcaattccagagcagtatcctctactgcctcctcaagttcgatttttaaccaaaattttccacccaaatgtgcatttcaagacaggtgaaatttgtcttgatatattgaagaatgcatggagccctgcatggacctttcagtctgtttgtagagcgataattgctctgatggcccatcctgaaccagacagcccacttaactgtgattcaggcaatctcctgcggtcgggtgacatcagaggctatcaatcaatggcccgcatgtatacaaggctggctgccatgccaaagaaaggttagatgtagaacatgtgccaagccaagagcctatgtcagtccatatgttgtcaggtttgctgtgtgctgtctgtctgtgaacttggtggttcttgtttcctaataagtcctaaccattcatgtgtgtgtattctgtattctgtatcccggattcccgatgcttggtctgtgatgtaataaatcctggaattcaacagttgttacttctgatctatttatttagttgctcagtatttccgtca

SEQ ID NO: 128564 - DNA, 274 bp, Zea Mays
ctatcagtccgaaccgttcttccgtcctgctcaggcgttccgaccagcgttgctcgcttctcgtcactcccgccggctgctgctcttgtctacgccacggtagaatggctttcctcttcaacaagttccaagaggcaatcagaacaattgccaagagccccatgtttgctcgtgatccaaggcatcttcaatttgaagctgatgtgaatcgtttgtttctctatacaaggaagtgtcgggatctccgagctcatggagattttgttatacctag

SEQ ID NO: 128565 - DNA, 1613 bp, Zea Mays
ctatcagtccgaaccgttcttccgtcctgctcaggcgttccgaccagcgttgctcgcttctcgtcactcccgccggctgctgctcttgtctacgccacggtagaatggctttcctcttcaacaagttccaagaggcaatcagaacaattgccaagagccccatgtttgctcgtgatccaaggcatcttcaatttgaagctgatgtgaatcgtttgtttctctatacaagctattatcgtctcggggagaatgctgacgagaaggacgctgaggagattattgacttggctagcaaagcttctattgctgatcagcagaaacaagtgcaggataatgttcattatgaacttacgcatatgtgccaagcaatggatagcattttatgtcctgatacaataaacgacccatcaaaaggaccttcagaagcacataatcattctcagcgtagtggcttaagttttgccgttggtggtgctgcatctgcaaacaagcaaagtgcaattatccctgctacacgacctttaactcgagcagaattgtcaaagaaattcagggatcattttgggtacacacttgacatcggaccatctggaattcctcataaagacgcaggtcaaggtttattcttatcaggacaagcaaatgccggtgctgtcctagccatctatcctggtgttatatattcacctgcttactatcgatatatacctggatacccaagaattgatgtttgcaacaactatctaatcacaagatatgatgggacaataattgatgcaaaaccatggtgttttggtggtgaaacaagagcattatgggatggttcagatttggtggattacaatgctatggcacctaaaggctcagagaacaactctgatcgggtgtggagaatgctaagcaagcctctagaaaaaggtgtaagggaaaattttggtgaagtgcttgaacgacgaaatccccttgcttttggtcattttgcaaatcatccacccaaaggttcaagtcctaatgtcatgatctgcccatacgattttcctttgacagagaaggacatgagagtatacatccctaacattacgtttggtggtcaagagaccattaggatgaagaggtttggctccttctatttcaagtctggaggttctgataatcaggctggtgattctctagtactgaagacgctagtgctggtgagcacaaggtccatatgtgatgaagagctctttcttaattaccgttacagtaactcaaaaagacgaccagagtggtacagccctgtcgatgaagaagaggataagaggagatggagctagtttagcacttctgtatcattctggttgtgcatttttttggctaacttttttagttctttcccccctggaaattgcaactgagcattggtaagctcctgagatcgagatgacagttttgacttaattcgtcatttggtattacatactttggtgtcccaattaccatcatgataaaagttaagctactcatgtaagttctactctcaggtcctttgtggtgcttaaaggattacatttgttactccttttatgtgtgtctatcccaatgattatctatgaaagataaataatttatgc

SEQ ID NO: 128566 - DNA, 1582 bp, Zea Mays
acctttgttcttagcttcgaagctgtctgcatcctcgttcagatgactatttgatttctcagtattttatgtagtgtaactgttacagcactagcccacgaaggcaatcagaacaattgccaagagccccatgtttgctcgtgatccaaggcatcttcaatttgaagctgatgtgaatcgtttgtttctctatacaagctattatcgtctcggggagaatgctgacgagaaggacgctgaggagattattgacttggctagcaaagcttctattgctgatcagcagaaacaagtgcaggataatgttcattatgaacttacgcatatgtgccaagcaatggatagcattttatgtcctgatacaataaacgacccatcaaaaggaccttcagaagcacataatcattctcagcgtagtggcttaagttttgccgttggtggtgctgcatctgcaaacaagcaaagtgcaattatccctgctacacgacctttaactcgagcagaattgtcaaagaaattcagggatcattttgggtacacacttgacatcggaccatctggaattcctcataaagacgcaggtcaaggtttattcttatcaggacaagcaaatgccggtgctgtcctagccatctatcctggtgttatatattcacctgcttactatcgatatatacctggatacccaagaattgatgtttgcaacaactatctaatcacaagatatgatgggacaataattgatgcaaaaccatggtgttttggtggtgaaacaagagcattatgggatggttcagatttggtggattacaatgctatggcacctaaaggctcagagaacaactctgatcgggtgtggagaatgctaagcaagcctctagaaaaaggtgtaagggaaaattttggtgaagtgcttgaacgacgaaatccccttgcttttggtcattttgcaaatcatccacccaaaggttcaagtcctaatgtcatgatctgcccatacgattttcctttgacagagaaggacatgagagtatacatccctaacattacgtttggtggtcaagagaccattaggatgaagaggtttggctccttctatttcaagtctggaggttctgataatcaggctggtgattctctagtactgaagacgctagtgctggtgagcacaaggtccatatgtgatgaagagctctttcttaattaccgttacagtaactcaaaaagacgaccagagtggtacagccctgtcgatgaagaagaggataagaggagatggagctagtttagcacttctgtatcattctggttgtgcatttttttggctaacttttttagttctttcccccctggaaattgcaactgagcattggtaagctcctgagatcgagatgacagttttgacttaattcgtcatttggtattacatactttggtgtcccaattaccatcatgataaaagttaagctactcatgtaagttctactctcaggtcctttgtggtgcttaaaggattacatttgttactccttttatgtgtgtctatcccaatgattatctatgaaagataaataatttatgc

SEQ ID NO: 128567 - DNA, 1646 bp, Zea Mays
ccagcagcgaggagcagcggcagcggcggaccacgcatcctccctatcttcacgaaatcacgatggcgcccgcctgctccttgctcgcgctcgccctctcggtctgctccgtcgtcgcggtcgccgcggcgcagcaggtggacgccgtggccgcggcgcagcaggaggccgaccgcgtggctggtctgccggggcagccgcccgtggggttcgcgcagtacgccgggtacgtgaccgtgaacgagacgcacggccgcgcgctcttctactggttcttcgaggccaccgcgtcgcccgacaagaagccactggtgctctggctcaacggcgggcccggatgctcgtcgattgggtacggggaagcggaggagctggggcccttcctggtgcagaagggcaagccggagctcagatggaacaactactcctggaacacagaggccaaccttatgttcctggagtccccggtgggcgtcggattctcctacacaaacacgagctccgacctgctgcagctcggtgacaagatcaccgctgacgacgcttacaaattcctgctcaactggttcaagaggttcccgcagtacaagtcacacgatttctacatcgccggcgagagctacgccgggcactacgtcccgcagctgtcggagaagatcttcgacggcaacagggcggggcacaaggagagccacgtcaacttgaagggcctgatggtcgggaacgcgctcatggacgacgagacggaccagacgggcatgatcgactacgcctgggaccacgccgtcatctccgaccgggtgtacggcgacgtcaaggccaggtgcgacttcggcatggcgaacgtcaccgacgcctgcgacgccgcgctccaggagtacttcgccgtgtaccgcctcatcgacatgtacagcctctacaccccggtctgcaccgaccccgccagctcgtcggcgccctacgcgcggaaggttgccgttcacggcgccgcccccgggatcttctccagataccgaggatggatcatgaagccagcgggctacgacccctgcacggcggagtactcggaggtctacttcaatcggcccgacgtccaggcggcgctgcacgcgaacgtgacaaagatcggctacaactggacacgctgcagcgatgcgatctacacttggaacgacgccgccttctccaccctccccgtcatccgcaagctggtcgccggcggcctcaggttgtgggtgttcagcggcgacactgacggaaggatccccgtgacgtcgacgaggctcaccctccacaagctcgggctcaagaccgtccaggagtggacgccgtggtacgaccatctgcaggttggtggatggacgatcgtgtacgagggcctgacattcgtcacgatccgcggcgctgggcatgaggtgcctttgtacgcgccgcggcaggcgcgtacgctcttcagcaacttcctggcaggcaccaagatgcccccaacggcgttcccctaactgctgtctccccctcttttctctctctctctctctctcgcttctaccaaagatgcatgtgtaattcgatcggaaaaaaaggaaaaggttcaggaataaaagtcagtcaggttttaatagagaagattcataatgctcaaaatc

SEQ ID NO: 128568 - DNA, 1365 bp, Zea Mays
cttggtcagaagcgactgaagagtgttgttgtcgtcgtccccgtcgcagggcccggatgctcgtcgattgggtacggggaagcggaggagctggggcccttcctggtgcagaagggcaagccggagctcagatggaacaactactcctggaacacagaggccaaccttatgttcctggagtccccggtgggcgtcggattctcctacacaaacacgagctccgacctgctgcagctcggtgacaagatcaccgctgacgacgcttacaaattcctgctcaactggttcaagaggttcccgcagtacaagtcacacgatttctacatcgccggcgagagctacgccgggcactacgtcccgcagctgtcggagaagatcttcgacggcaacagggcggggcacaaggagagccacgtcaacttgaagggcctgatggtcgggaacgcgctcatggacgacgagacggaccagacgggcatgatcgactacgcctgggaccacgccgtcatctccgaccgggtgtacggcgacgtcaaggccaggtgcgacttcggcatggcgaacgtcaccgacgcctgcgacgccgcgctccaggagtacttcgccgtgtaccgcctcatcgacatgtacagcctctacaccccggtctgcaccgaccccgccagctcgtcggcgccctacgcgcggaaggttgccgttcacggcgccgcccccgggatcttctccagataccgaggatggatcatgaagccagcgggctacgacccctgcacggcggagtactcggaggtctacttcaatcggcccgacgtccaggcggcgctgcacgcgaacgtgacaaagatcggctacaactggacacgctgcagcgatgcgatctacacttggaacgacgccgccttctccaccctccccgtcatccgcaagctggtcgccggcggcctcaggttgtgggtgttcagcggcgacactgacggaaggatccccgtgacgtcgacgaggctcaccctccacaagctcgggctcaagaccgtccaggagtggacgccgtggtacgaccatctgcaggttggtggatggacgatcgtgtacgagggcctgacattcgtcacgatccgcggcgctgggcatgaggtgcctttgtacgcgccgcggcaggcgcgtacgctcttcagcaacttcctggcaggcaccaagatgcccccaacggcgttcccctaactgctgtctccccctcttttctctctctctctctctctcgcttctaccaaagatgcatgtgtaattcgatcggaaaaaaaggaaaaggttcaggaataaaagtcagtcaggttttaatagagaagattcataatgctcaaaatc

SEQ ID NO: 128569 - DNA, 568 bp, Zea Mays
actgctgataatattctttcatccgattgtaaataaattccagttgattttatctacctcatcagtgattaatgtaagcagcatgtgtgctataattgttcatcctttccctctgatttcacatgttatatttgtatggtttcattgtagatacacagaagatatggagcttgatgatgccatccacactgcaattttgactttgaaagaaggatatgaggggcaaatttcctccaacaacattgaaatcggaattattcgagctgatcgtgagttcaaagttttaagcccagcagagatcaaggatttcttggaagaggtggagtaagctgtctgttgatgatactagttcagacaacaatagcagcgtcacttatgagcagccagcctgaagattgtcttggttttattactctgtaaactgatttgctccagcgccatgtggtggttacatttgaaccctcctcaacgcatactgtagacaatgagataacgtaggatgaatgctgtatttgacatactttgcagcttgtttatgtgatgcacgttcttgcggacagtatcgata

SEQ ID NO: 128570 - DNA, 384 bp, Zea Mays
atgtcgtcgatctttgctagttgtcaacaccacgcctcgcgtcgatcgtccggtggtaaggtaggccatctaggttttgctgcctatgtggatgacgtgtgtgatgtcgagatgatggttgattggaggaatctcatactatacatgaatttgcaacgccatgtacttgttgatggcaagatgtcatttccatccctaagtcaaatgagaactacaagctgcttccgtcttcacccaatcagtgatgaggatgccaagttcaagctctgcaaggtgaggtctgttcagtttggccagaaaggcatcccctacctgtacacctacgacggccgcaccatctgctacccaaaattaagacggtttataaacatcttaaatgtgtga

SEQ ID NO: 128571 - DNA, 2457 bp, Zea Mays
atatattgtcaatagaccaatagaattaccacttatataattaatattattaatacaaatagttccattggtctatttgtactttggagtgatacatgtttgccttgccccatctgtccttgcgccatgtttacggacacggggtgcactaactggttgtactggaaaataaaatttagacaatagggagtactcatgtgaggtcctagatttttgtacttctaacaacgccatatcattgttactaagcatgataacatggtgaacatatatttttagtagagctcagatcattttcattcaattcacacgacatagttgaacatataagaggaacgtatggctaaagctccgtctcggacggcttattatgcaaataatttgagctcgcaagagtaaatttacaaaagcataggattcaatgttctgaaatttacatgagacaaaacaaaaacaatgattgggtgaatattagaatccaaaaaagagacaatagttttgagaaagagagagcgcacacagtggatttgtcgattggattagctatacagaggggaaggttgtgtgtgcagtgtgcagtgatcgtctctagaatctgcattctataaggcaagaagataagatgcacacgacaagagttgttgagccgtccatttgagttttttctcctctgtacaccccctatcacacacacaacacactcctactctctctttgcggccggtctctgctttcagattcatttctaaccagggttcctccagcccagccgccgccactgttgaggagctcacatcgcctcgacacaacacggtctctggtttcaacgtaagctctaactattccctctttgatccgttctgttccaccctgacccaatcttacaatattatggatacatatgatcttttcttcattaacaaggatgatgaagaggaagaattaggaatttttttttgtcacagcagtgttccgttcgttttattttgcaagtgagggttttaatttagctgctaggccgataaaaggccgtccgatttgaaatactagaaccgaattgaatcttccagtactgaggtacaagatttcaggagcgaactcaggctgttcacagatctgtactggaatatgggtgggtactgtgtaggccataagaagatgcagtgtttgttttcttttaatttaaactcatcaatgaatccatcgttgttgcttggggatcatagggccatgcacaattgaatttaattttaaatgatcaatgaatctatagttgttgtttggggattataaggccatgtacaatgaaaacgcttagaggcagtttccatgttcctattaccctggacatgagcacaaactcctgtgtgtttggcggtgggcgccgcatgaaaaaacattcagaacctgcttgcaacattttcctttcttgacacgcaggagctactgcctatcatgttactaaaaattacttgcttgaaacgtacatgtggcaggggacagtggttagctcaattatttaaacatcattttggaataaaggagaattgtctgaatcctgtgttttttgaactaatccttatgaaatttctataccattcctgtaaaattcctgtgtttcaaaggagcccttagtttgcactggaatggcccagtatgtggaatttgcatcgcgctttttaacagcttgttaaaaatgaggctagaggcgcttgaaattatgttaccctgaaagggttgttcattagctttatgatcttgaaattcttgatgccttctttcgatccacaactgcatttagggtgagttctgagataagtttagtgtttattccactcttcacttcatcctgattacgtgtgccttcttgttatggccacggacacattaccttgcatggcctgtaaatgctactaacaggtataataactgggctgcgagcactatatggatgatggcttcacgaggcaccagtgccgtgctttcaagggctgctcggatgaggcaaaaactgcagtctgccttggaggccagtgccctagatattgaagacgtttcttaccaacatgccgggcatgcagccgtcaaggacaatgcgaacgagacgcacttcaacatcaaggttgtttcaccaaaatttgaggggcagaaccttgtgaagcgtcacaggatggtgtatgatcttctgagggatgagcttagctcaggcctccatgctgtctccattgttgcgaaaaccccgaaagagttagggtcttgattgtataacaatgttgaataagcactgtcctatgtttcgaaataagtctgtcgtagcagccatgacactgattgccaaaacaatgtcaccggcatgctcttcttattaagatctggtactcttcttattaagatctggtattcggattagattggagtgaagaatttatttcagctattttttgatttgacaagtaa

SEQ ID NO: 128572 - DNA, 1415 bp, Zea Mays
atatattgtcaatagaccaatagaattaccacttatataattaatattattaatacaaatagttccattggtctatttgtactttggagtgatacatgtttgccttgccccatctgtccttgcgccatgtttacggacacggggtgcactaactggttgtactggaaaataaaatttagacaatagggagtactcatgtgaggtcctagatttttgtacttctaacaacgccatatcattgttactaagcatgataacatggtgaacatatatttttagtagagctcagatcattttcattcaattcacacgacatagttgaacatataagaggaacgtatggctaaagctccgtctcggacggcttattatgcaaataatttgagctcgcaagagtaaatttacaaaagcataggattcaatgttctgaaatttacatgagacaaaacaaaaacaatgattgggtgaatattagaatccaaaaaagagacaatagttttgagaaagagagagcgcacacagtggatttgtcgattggattagctatacagaggggaaggttgtgtgtgcagtgtgcagtgatcgtctctagaatctgcattctataaggcaagaagataagatgcacacgacaagagttgttgagccgtccatttgagttttttctcctctgtacaccccctatcacacacacaacacactcctactctctctttgcggccggtctctgctttcagattcatttctaaccagggttcctccagcccagccgccgccactgttgaggagctcacatcgcctcgacacaacacggtctctggtttcaacgtataataactgggctgcgagcactatatggatgatggcttcacgaggcaccagtgccgtgctttcaagggctgctcggatgaggcaaaaactgcagtctgccttggaggccagtgccctagatattgaagacgtttcttaccaacatgccgggcatgcagccgtcaaggacaatgcgaacgagacgcacttcaacatcaaggttgtttcaccaaaatttgaggggcagaaccttgtgaagcgtcacaggatggtgtatgatcttctgagggatgagcttagctcaggcctccatgctgtctccattgttgcgaaaaccccgaaagagttagggtcttgattgtataacaatgttgaataagcactgtcctatgtttcgaaataagtctgtcgtagcagccatgacactgattgccaaaacaatgtcaccggcatgctcttcttattaagatctggtactcttcttattaagatctggtattcggattagattggagtgaagaatttatttcagctattttttgatttgacaagtaatgaccatgctaatcatgtcagatgcaaggcttattgttttttttttcttt

SEQ ID NO: 128573 - DNA, 734 bp, Zea Mays
ctactctctctttgcggccggtctctgctttcagattcatttctaaccagggttcctccagcccagccgccgccactgttgaggagctcacatcgcctcgacacaacacggtctctggtttcaacgtataataactgggctgcgagcactatatggatgatggcttcacgaggcaccagtgccgtgctttcaagggctgctcggatgaggcaaaaactgcagtctgccttggaggccagtgccctagatattgaagacgtttcttaccaacatgccgggcatgcagccgtcaaggacaatgcgaacgagacgcacttcaacatcaaggttgtttcaccaaaatttgaggggcagaaccttgtgaagcgtcacaggatggtgtatgatcttctgagggatgagcttagctcaggcctccatgctgtctccattgttgcgaaaaccccgaaagagttagggtcttgattgtataacaatgttgaataagcactgtcctatgtttcgaaataagtctgtcgtagcagccatgacactgattgccaaaacaatgtcaccggcatgctcttcttattaagatctggctgcggagccagtttacctgcatttgctatgtggactttctgagctgaaagggaagcagaatatgggaggaaaatcgttgccagccatgagccatgtcgctgttgtacttgcatcgttgggtgggcaaaacgcaaaacatgtgaaattttttt

SEQ ID NO: 128574 - DNA, 2121 bp, Zea Mays
tagtgaaccaatagagtaactgatgctactttccaccaaacataaacacataggttccctcagtaaaccacaagacacgtgtttccctcagtattcatctagtgccaggaatctctctagggtaggtaagacttggtcgagcaaggtgattcaaaaactttaaccccgacagtatgaaaattcggtagtacaagcaaagggccagaggccagcattttgaaatacgaaactattgcaaaaacgctacaggtaaaaagaagtagtcatgtgcattatgaagattttattccacatcttcctccttgtggacaacaagctcgccttcagtgaactcgcatggcttgatggccacatctaactgcttgcgcatttttcttacaacaaatccctcgctttcttcgcatattgtgaccacgatccctttccgcccaagacgtccagttcttccagctctgtgagcataatgtgtggagtcagttggaaggtccagattaaccacaaggtcacattctggcacgtccagtcctctggcagacagctcattcgtaacgagaactctgaattcaccatccttgaactttttcaaaactgtcgaccttgcaagctttccaaggtctccatgtagctcagtggctttgataccacgggcctccaacttaaacacaacatccttcagtggcttggtgttgttcataaatgcaatcactgtctgtgcttccagagcatggatgcacctccgtaatgtgtcaaccttgtgctgcgccttggccgtacaatagtagtgttccaaagatggcggcaagctgccaacagcagcttggttcactgactgcgatgacgaactggggttagcgtcactttgagataacgcaggtcttggcacagtgattgaatcaagtggaactacacttttagctctaatgagaactggatcatgaccccaactccttgctgctcgtataactgaaaatggtattgttgcagaaaccaggatagtctgacgctcagatcgtctcgcaagtgggccaagaatatccctagatgtgcctccaggtctccttccaacatgctccaaaattctatgcatatcttcacggtaattaaaagacagaagctggtcgacttcatctagtacaagaaaacggcagccatgagtgtgtagcttacctgctgcagaaatttcagaaatacggccaggtgttccgacaacaatgattggtttgttcttcttcaatgcttcttcctgcctggaacgattagctccgccaacaagttgctggaccagtcttttgtcattaggacccaaaatcttctccacttctcgcacaatctgcattcctaattctctcgaaggagcaacgatgactgcttctatacctgatcttttctcagaatggtcttgttccatagtcctcttcagagggcctatatcagaaagaattggaagaagataagcaagagttttccctgagccagtatatgactggatcacaacatcatgcttttgtgctattataggaattgctgcggattggacctcagttggggcagtcagaccttccttgttcaactggtcaacaagcaaaggtggcaaaccaagttcttcaaatgacttggccgaaaacagagcctcatctaccttcagtgtcttctttatcccagctggcttcatcaaggcactctttgctggtttgacatttgaagaaacctttggtttcacatagagggaagaagctcttgaacttggctttggacctccagttcgttccattttccccttttttccatattcaaccctgctttgcacttctaggctagcaagagtcaatggtcctcccctgttatcttccaaaatttgactaccacgccaagcagtctgatgaaatccagctacccgtggttgggacagcatcctgaacgaaacacgatctcccagaacaaaacatgaccgagaagatgccagcgcaagaacatttcgatggacttgcccaatacttagcctcatttcactcctcacagtgaaatcaatcacagcaccaaaattatcttttccttcgaagttcaaacctgttacaagttcacagcaaggtgctcttgtgtctgcgcaaataataacataaa

SEQ ID NO: 128575 - DNA, 451 bp, Zea Mays
acctattggacgggcaacgtcctcatcttcatctcccaggttttcccctccaatcacccccaggtcttcctctcgcgagttgcggtctcgcgcccccctccgccgaccgccgcctcctcacaaccgcggaagctgcttccctctccattggacgcggccagcttccatctctcggtcacctccctctacatcccacggccgctaccaccttccctctacctcacacagccgccggcctctccaaggtctgcacacggtatgcttctctgctcaggtttctagatgatattctgggtttagagattgggagttccaacgtgaaatcgtcttgtgtattattttcgaaaaaggaattgtgtaattgtgttgttgatttcacaatgtcaagtgtctatggcgtctccatgcaagtacacactacactggcacagcgattgacagtcagaacttt

SEQ ID NO: 128576 - DNA, 927 bp, Zea Mays
gctacatacaaggacactgccaaaattcaattaaacgatttatttaacattatttacaagtacgagccattactacacacaaattgagtaagctagttttcggcaagacaaacaagcgaacaccttgagcgcagtatcaacctaaatacccacacgggagaaacaacaaaccgaacaccataggtgctactgtaacaactgcaagaacaacgggtatatagagcaaaattacacgcaccgagagtcgcaggggtgtcgtagaacacggacgacgcctgaacgacggtgacccgcgccgttgttgcggtctggtcggcgccggcattcatctccacctccgggatcaaggcctcgctgtcggacctcgatgggaccagggccatcgtctccgactaccaagcaatcacctggggaccgcagaaggcgggctacttgtcgtgcttcttgcggaggtagtcacggacgaattggtcccgagcgagcgtgcgagcgcgctggggctcgatgtggacgtaggagaggtggatgccgaaggtaaggagacccgcgccgaaggtgaagagtgaggtcgtggagagaagctgccgggaagtggacggggagcaccaccccatccgtcagcacagtgagtggcggagtggcgcggtatgtgtggagaaagtttgtcgtctgtaccgaagtcactctaagaagactcggcgctcggcggcggctcggctgctcggcggcgccctgtgttcggcggtggctcggctgctcggcgacttgctgctcgctgcaccgtattctaaggacgcctggtagatgctggaagccggagcccggatggcctgcggccctacacgagcacggctggagcttcaagcttggcggctagggttacaaacttggagacaagagagagtgagagagaccgactgaccgcgc

SEQ ID NO: 128577 - DNA, 1542 bp, Zea Mays
agatcgtttcttttcgttcaggattcccccttccgtcggctgcattcctacgcgcgtgttctgtctgtttctctcggccccctctcgctctccgacgactggtgggccgctgccggcgccgccgccttaacccaggtgttgaggctttcgttggtctcctcgccgtcgacgagcacccaccaggatgaattctaaacgtaggaggagtcatagcccagttgaatacaaggaaggccgtgacaaagattatgggacttctggaaagaaggataagtcaagagatctagatgacacatgtgatgctagaagaggtcatgaaaccgataggcactctgataagcattcctttggaacatcacgtgaatccaagaagcatgatgactatcggaggtaccatgataagtatggtgatgattatggtaggagccatccaagagcctctcggtcagaccgggaatcaagggctgatacttattatgatcgctcaaagcatgataacacatctggtagatcacgtggtgatcagcgagatgttggcagtaggtacggagaaaaatctgttaatcgagatcagaggagtataaatgaaggaaagcaggagtcccctcgtggctatcaaaagaatgatggcggagaatacaataaacatatggatgcaagaaagcaagagtacaaaggttatggagatgatagagatcattacagggttgttcgtaagaacaaggaaaccatcaaagaggaggaggactcgaagaggagaaatggaaaggaaattgagaaagaagctttggtggaaactagggataagaaaagaagtttattcagctctactgggccaaatgtggataatccaggcgatgtcaaactatcctcagccacaaatgaagccttggataacgctgcagaaaccgtagacggtgtgaatgcagctaaagttgcagctatgaaagctgctgaattagtgaataggaacattgcagcatttggtgctggaactgggcgcctatcaactgatcagaagaaaaagcttctttggggtaacaaaacgagtaatccctctgaggagacaagtaaacgttgggacttattttctgaccgtgagcgccaagagaaatttaacaaactcatgggtgtgaagagcagtgccccagttcaggaaaacacggtcgagaacaaggtcgggagctcggcggaagaagccaagaaactggaggagctcgacaccaacctggagaaacattacatagcaggcctccgcaggagagatggcaggacagtcggccttggcctgtagaaactctgcttgcagttgcagatgctgcggcattgaaaaatgcagagagcttgctctgtacaatctacagtgccttgtttattcttgcacttacaaaatttcctgtacggcttacgttgactgtttccgggttatcttgaagctctagaacatgtgtccctgattgacactcctgtactgcgtttgcataaccccgtcattcttgagtagtaattcaccggttattgttttctctttgcatccaaaga

SEQ ID NO: 128578 - DNA, 1542 bp, Zea Mays
gtttcttttcgttcaggattcccccttccgtcggctgcattcctacgcgcgtgttctgtctgtttctctcggccccctctcgctctccgacgactggtgggccgctgccggcgccgccgccttaacccaggtgttgaggctttcgttggtctcctcgccgtcgacgagcacccaccagtgtaggatgaattctaaacgtaggaggagtcatagcccagttgaatacaaggaaggccgtgacaaagattatgggacttctggaaagaaggataagtcaagagatctagatgacacatgtgatgctagaagaggtcatgaaaccgataggcactctgataagcattcctttggaacatcacgtgaatccaagaagcatgatgactatcggaggtaccatgataagtatggtgatgattatggtaggagccatccaagagcctctcggtcagaccgggaatcaagggctgatacttattatgatcgctcaaagcatgataacacatctggtagatcacgtggtgatcagcgagatgttggcagtaggtacggagaaaaatctgttaatcgagatcagaggagtataaatgaaggaaagcaggagtcccctcgtggctatcaaaagaatgatggcggagaatacaataaacatatggatgcaagaaagcaagagtacaaaggttatggagatgatagagatcattacagggttgttcgtaagaacaaggaaaccatcaaagaggaggaggactcgaagaggagaaatggaaaggaaattgagaaagaagctttggtggaaactagggataagaaaagaagtttattcagctctactgggccaaatgtggataatccaggcgatgtcaaactatcctcagccacaaatgaagccttggataacgctgcagaaaccgtagacggtgtgaatgcagctaaagttgcagctatgaaagctgctgaattagtgaataggaacattgcagcatttggtgctggaactgggcgcctatcaactgatcagaagaaaaagcttctttggggtaacaaaacgagtaatccctctgaggagacaagtaaacgttgggacttattttctgaccgtgagcgccaagagaaatttaacaaactcatgggtgtgaagagcagtgccccagttcaggaaaacacggtcgagaacaaggtcgggagctcggcggaagaagccaagaaactggaggagctcgacaccaacctggagaaacattacatagcaggcctccgcaggagagatggcaggacagtcggccttggcctgtagaaactctgcttgcagttgcagatgctgcggcattgaaaaatgcagagagcttgctctgtacaatctacagtgccttgtttattcttgcacttacaaaatttcctgtacggcttacgttgactgtttccgggttatcttgaagctctagaacatgtgtccctgattgacactcctgtactgcgtttgcataaccccgtcattcttgagtagtaattcaccggttattgttttctctttgcatccaaaga

SEQ ID NO: 128579 - DNA, 2798 bp, Zea Mays
caggattcacagggcgcaacggctgccgtcacgcgcggtcgctggggcgtgggcaactgggcgtgccggatctcatctaacgccgccacttgctgccacgacctcctcctcccccccccgcacacctctgacctccctccgtccatctcatcatcatctttgtccctctcgcgcaattcgccgaacacaccgcgcgcgcctcgcctcccagcgacggccgcctcgacggccaatgctggcggcgggatgagcgtggaggaggaggtggagcgcggggaggaggacctgttctacgagtcgctcgaccgcatcctctcctcgtcgggctcctccacctctgcctcggacgacgatggcgccgaccgcccgcgccaccgccgcagctgcgatgcgccagccgcagcggccctcgacctgtggacctcccagccggcgcccgtccatgagcggcggcgccggctgctccatctcatggggctcaccggcgatccttccctcgccggatttgagattgcccggtccgcctccggagaagccgcgggaccgcccccggcctctcccgtctcgtggtccaggtcaggcggggccgccctgggctccgccgggaagccgccgctcgggggcggccgtctgcgcttctccttgtccgacgggtccgatgccgccgacgaggaccccaggtgcctgatcaggaacctcgacgacggcagagagtacgtggtgagggaagaattcgctctccgcgaggtcggcacggggcgccaccttaccgttgaggagttggcccgttcacccatcgttcaggagcttatgcgccgccaagctttcagtactcccaactccaactgcacctcaaattcccaaagcggcacctccacgccgatcgagagatcgagctcaggttccagcaacggtggggggcgcgccaagcggcgtagcagctggctccgcagcatccgctgcgtagctggctccttcgcgtcccactcacgtgaccgccgcagcagcgacgagaaggacgcgtctccagagaaaggcgggcaccactccagctccacgacggatgacagccaggacagtgttccacgccatggtccggcccgtgtcaaggtgcggcagtatgggaagtcatataaggagctcagtggcctgtttatgacacaggagatacaggcacacagtggttccatatggagcatcaaatttagtcctgatggccgttaccttgcgactgctggggaggattgcgtaattcatgtttgggaggtgttggagtttgagagggcaaggaaggagaatgaggtgtgcaatccgcttgttgctatggtgtgcaatgagtcatcagagacaacggtgggatcagctgctccaagtgagagccattgggagaagaagctgagatcaaaggtactgcacggtgggggatcggtgagctcagacaggttgatggtgcctgagtatgtgtttgcactgtccgagaagcccgtgataacctttgcagggcattcagaggatgtgcttgatctcagctggtccaaatctcagttcttgcagtatttgctttcatcatcaatggataaaaccgtacggttgtggcacatgtcaagcacttattgtttgaaaaccttctcacacactgactatgtgacttgcatccagttcaatcctgttgatgatagatacttcattagtggttccctggatgagaaggttcgcatttggagtattccaaagcgtgaaatagttgattgggtcgaccttcatgaaatggttactgctgcctgctatactccagatggaaagggcgctctggttgggtcccacaagggcagctgccatctgtatgatacatctgatgacatgctttgctacaaaacacagatcgacctacaaaacaagagaaggaaatctagccagaagaaaataacaggatttcagtttgtcccaggggattcttcaatggtcataatcacatctgcagattcacggatcagagttcttgatggttttgagctagcgcataggtttaaaggattccgaaacacaagcagccaaatctcagcttgtttagctggaaatgggcggtatattatctcggcaagtgaggattcccatgtatatatctggagaaacaatgatggtccgaaaccaagtagaaagaagggcattgtttctgtcacagatagccatgaatacttccactgccagagtgtgacagttgctgttacctggccttttgccagcaccgcaatgacttgtttaatgaaccccgggaagcaagaagagcttgagcgtgggtctgagccgcaagatctgcaaaccaaacttgccaaggcacaggagatgccagatgttgagtaccggagcacaaatatcacgagtaacaactcgaatcataataatggtgaccggacatctccgacttggcctgaaaaacttaacacaccaccaaatcaaagtctcagggctactacctgccatgccaacgagggagatcaagctctgaatcggtcggcctggggcctagtgattgtcacagcaggccgtggaggtcaaatcagaacatttcaaaactttggttttcctgtaagagtatagcatgaatatgaatacgtaagataatagtcactgccattcaggagtgtagtttgtgtatagataggagatagtgggtgagtttcacactattcagggattgggtctgattgttccttggcgtgcatgctagagatcagaatcttcatctgacatacactgtgtactgcgaaacttggtatttatttaccctgaggcctaaa

SEQ ID NO: 128580 - DNA, 2948 bp, Zea Mays
ctcctcctcccccccccgcacacctctgacctccctccgtccatctcatcatcatctttgtccctctcgcgcaattcgccgaacacaccgcgcgcgcctcgcctcccagcgacggccgcctcgacggccaatgctggcggcgggatgagcgtggaggaggaggtggagcgcggggaggaggacctgttctacgagtcgctcgaccgcatcctctcctcgtcgggctcctccacctctgcctcggacgacgatggcgccgaccgcccgcgccaccgccgcagctgcgatgcgccagccgcagcggccctcgacctgtggacctcccagccggcgcccgtccatgagcggcggcgccggctgctccatctcatggggctcaccggcgatccttccctcgccggatttgagattgcccggtccgcctccggagaagccgcgggaccgcccccggcctctcccgtctcgtggtccaggtcaggcggggccgccctgggctccgccgggaagccgccgctcgggggcggccgtctgcgcttctccttgtccgacgggtccgatgccgccgacgaggaccccaggtgcctgatcaggaacctcgacgacggcagagagtacgtggtgagggaagaattcgctctccgcgaggtcggcacggggcgccaccttaccgttgaggagttggcccgttcacccatcgttcaggagcttatgcgccgccaagctttcagtactcccaactccaactgcacctcaaattcccaaagcggcacctccacgccgatcgagagatcgagctcaggttccagcaacggtggggggcgcgccaagcggcgtagcagctggctccgcagcatccgctgcgtagctggctccttcgcgtcccactcacgtgaccgccgcagcagcgacgagaaggacgcgtctccagagaaaggcgggcaccactccagctccacgacggatgacagccaggacagtgttccacgccatggtccggcccgtgtcaaggtgcggcagtatgggaagtcatataaggagctcagtggcctgtttatgacacaggagatacaggcacacagtggttccatatggagcatcaaatttagtcctgatggccgttaccttgcgactgctggggaggattgcgtaattcatgtttgggaggtgttggagtttgagagggcaaggaaggagaatgaggtgtgcaatccgcttgttgctatggtgtgcaatgagtcatcagagacaacggtgggatcagctgctccaagtgagagccattgggagaagaagctgagatcaaaggtactgcacggtgggggatcggtgagctcagacaggttgatggtgcctgagtatgtgtttgcactgtccgagaagcccgtgataacctttgcagggcattcagaggatgtgcttgatctcagctggtccaaatctcagtatttgctttcatcatcaatggataaaaccgtacggttgtggcacatgtcaagcacttattgtttgaaaaccttctcacacactgactatgtgacttgcatccagttcaatcctgttgatgatagatacttcattagtggttccctggatgagaaggttcgcatttggagtattccaaagcgtgaaatagttgattgggtcgaccttcatgaaatggttactgctgcctgctatactccagatggaaagggcgctctggttgggtcccacaagggcagctgccatctgtatgatacatctgatgacatgctttgctacaaaacacagatcgacctacaaaacaagagaaggaaatctagccagaagaaaataacaggatttcagtttgtcccaggggattcttcaatggtcataatcacatctgcagattcacggatcagagttcttgatggttttgagctagcgcataggtttaaaggattccgaaacacaagcagccaaatctcagcttgtttagctggaaatgggcggtatattatctcggcaagtgaggattcccatgtatatatctggagaaacaatgatggtccgaaaccaagtagaaagaagggcattgtttctgtcacagatagccatgaatacttccactgccagagtgtgacagttgctgttacctggccttttgccagcaccgcaatgacttgtttaatgaaccccgggaagcaagaagagcttgagcgtgggtctgagccgcaagatctgcaaaccaaacttgccaaggcacaggagatgccagatgttgagtaccggagcacaaatatcacgagtaacaactcgaatcataataatggtgaccggacatctccgacttggcctgaaaaacttaacacaccaccaaatcaaagtctcagggctactacctgccatgccaacgagggagatcaagctctgaatcggtcggcctggggcctagtgattgtcacagcaggccgtggaggtcaaatcagaacatttcaaaactttggttttcctgtaagagtatagcatgaatatgaatacgtaagataatagtcactgccattcaggagtgtagtttgtgtatagataggagatagtgggtgagtttcacactattcagggattgggtctgattgttccttggcgtgcatgctagagatcagaatcttcatctgacatacactgtgtactgcgaaacttggtatttatttaccctgaggcctaaattgtacacgaaagagaaagccctagagagcaacactatcagctgactgcagataatttatctgtccgctaaaacccctcctttcgctattactattccgaaccattgcatgttcttgtaagaaaaaaaaatacatgtggtgaaattgtcgttttggctttgtggtctcatggtattggaaccgtgaataatttttacatgttcgaacagtcctggcaaatgcagtgtttatgcgtcagataagtcaataaagaagaaaaaa

SEQ ID NO: 128581 - DNA, 485 bp, Zea Mays
gcaaattgttctatcccggttctttgtgtagccagaaacgttgcatgcaatgttaggggtggtttcttcaaagacttcgatgaaggactcttaccaaggattagtaatgttcattatgaagatgaagtaaatgatatctcatctgcgccagatgttggcaattatttgataacagaggatgagaatgtcgcattagtgaatggaaatagagattcattgccttttgatggtatgtcagatgcagagattgaacggagaatgaaggaagccaatgctcaagcattccatcaaacagcgactaactttgtcatgccagtagcccctgctcagaattttgtttcgtcttcagttgcaccattagcgccacctcttagcatgatgccgcctccattcagccagccagttgttcagccaggtttttcagatccactgcaaggttctccagctagagaagagggtgaagttcctgagtctgagttggatcc

SEQ ID NO: 128582 - DNA, 1671 bp, Zea Mays
gatagatttggctatcagaaccagaggtttccctctcagctaccgcacaccgaggatcaccacatgcttcagaaccatgcacctccaaaatacagatccttttctggtgaggagctagcaactcggcatgttccctcaagccaaagaaaccatatagaatcaggaagacacttttcacaatatgctgggacctctgctggcgtattagagggcattgctgtgaaatgcggatctaaggtggagtacaggtcaacattatgtgataccgcagaactacaattctctattgaggtttggattgttggagaaaagtttggtgaaggaattggtaggacaaggagagaagcacagcgccaagctgcagaaatgtctttaagaaacttggccaataaatacttgtcatctgatccaaataagttgactgatatgaaacaagatgctttcggtagcaacagaaacatctttggttactctggaaatactagggatgatatgttgccactttcaagtacttctgaggaatctcgctttatgaaaatggaggagaacaattccaggaaaacaggagattctgtcactgctctcaaggaactttgcacagttgagggatataacttagtttttcaagcctgtccatctccagcagatggtttagttgggaaagaatcttatgctcaggtacaaattggtaggcaaattctaggcaaaggagttgggttaacatgggaagaggccaagctccaggctgctgatgaggctcttggaactttaagatccatgctaggtcaacttggtcatagacgatctggctctccaaggtcattggcaccgaattttaacaagcggttcaagccagattttccaaggaccgtgcaaagagttccttatggaacatattctagaatcgaaggccatgctccttagatgcctgcatgaatgatgtgcctgggcactacattttgaaagtggacgaagctttgaactgtgaggtctccacaaattgaatacaagccctggattcttggcttcttgtgggcttccaaggctctcacaggccaccactggccatgagagtaccgacgaatatatttatggaagggccaagaaactgtgaagtatgaatggtggccatgacttcatacagaatttcactgccgttgaccagtcgccagtgttaccccatgctgtcaacttggcataattgttgacctggaagttttatggttgaaccagggattgatgcaggcttgcggctccatttcatttctgggtgtatgccaggaatccatggatcaaagggcagcgctgtagttggacacttttttttcccgtgctctggttcagttgaaagttggaccccagtaggttggagccttagcatgtagccagttttattagtgctaagtttttaggcaagttataagttatagcacagaattgagtacttgacagtgttaccgttacattgtttatgtagtcatcttcattagcagcctaggcaggcaacatgaatccagtagctgacagcattcatttactatatatataattatagtatgttgtagtcatcttgtaatagaatatgcccccgtttcttgggaatctgtgcctctaattctgttgtcccttttctggttgtgtcccactcgctctgaatgtgcatgcatttgt

SEQ ID NO: 128583 - DNA, 1536 bp, Zea Mays
agcaccctactcgtgcattcccattgtcccttccccggcccgccatttctgcaggggaggaggggctgcctctgagcgctcagcgcatcggggactggggcttctcgaagccttaaaagcgatcccagagagagaggaggaggtaccaccaccaccaccactcgagcgagctcggccatttcgttctgcaccaggacagcgggagtgtcggtaggcgttcgctgcctgcttgtgccgccgtttctctgctagctcttcacgtgcgcgccatggccgcctcctcgagctcctgcctctccgtcctcctcgcgtcgtggctcgtgtgcgcggcgtgcctcttcgtctccgggaacgcttcgggggcggcgcacagggtggtcgaccccgagtggcacccggccaccgccacctggtacggcagcgccgagggcgacggcagcgacggcggcgcgtgcgggtacgggacgctggtggacgtggtgccgatgaaggcgcgcgtgggcgccgtgagccccgtgctgttcaagtccggcgagggctgcggcgcctgctacaaggtgcggtgcctcgaccacggcgtctgctcgcgccgcgccgtcacggtcatcgtcaccgacgagtgccccggcggggtctgcgcgggcggccgcacgcacttcgacctcagcggcgccgcgttcggccgcctcgccgtggccggcgccggcggccagctgcgcgaccggggcgagatcaacgtcgtgttccgcaggacggcgtgcaggtacgggggcaagaacatcgccttccacgtgaacgagggctccactagcttctggctctccctgctggtggagttcgaggacggcgacggcgacatcggatccatgcagctcaaacaggccaactcggcgcagtggcgagacatgcagcacgtctggggggccacgtggagcctcaccccgggcccgctcgtcgggcccttctccgtgcggctgacgaccctgtcgggcaagcagacgctcacggcccaggacgtcatccccaagaactgggcccccaaggccacctacacctcccgcctcaacttcgcgtagaggccttctgccttggcccgccgcgtatctatcgttctgtgcagtttgatgtcgcgtgaaggggataagctggtatagtagtggataaacctggtgtttagggcccaggtagccctctccgaactggagagagagcgtctgattggtcggcgtgggccgcatgcttcctggaggctggaaatgggagctcgatccggtgaagagcggctggggaaccaaaggcgtgagcgtgacgtgactcctcttcgttttcgatggactcatgcagtgcttatttctgtgttcttctctcttaacttatctattgttgttgttatattttcgtgcccttggtacatgggctgtaacttgctgtcacctatgcgcaccgtaaactataataatcatgtattgttcgttatgttagtcatcaacgactgttgccgttacaaaaaaaaaaagaagcaaagctcgaatgatc

SEQ ID NO: 128584 - DNA, 1323 bp, Zea Mays
caagcacccccaacccaaccatcatcaggaaatccctgccttgcgctgtctgagtacctaatgctgacccgcatcctctctcgtcaacagaccacatcaatatcaatactagtactaggattcatcatcagtagtatataaaatgaaccagaacaacctatctgtctgcaaatgcactcgtttcaggcctgacgtccgtctccaactcgactactatactaccgccgcgctctgctcctgcaccagccgggtcagctgaactgagcatcatatcatggagggaggagccgttcccaagccatcggagaagagggtggccctcgtcacgggcgggaaccggggcatggggttcgagatatgccggcagctggcgtccagcggcctcaccgtcgtcctcaccgcgcggagcgagacgcggggcgccgaggcggcccgcgagcttcacggcttcggcctgcctgacgtcgtgtcccaccagctggacgtcacggagcccaccagcgctgctcgtctggctgatttcgtcaggaccaagttcggcaagctcgatgtgttggtcaacaacgcgggaatcatgggggtgacgatggaggttggcgacgacgaggcagccgtcaaagaaatgatggtaggcaaggaccagaacgagattgcagagtggctgaagcagcggaccacgcagagcgccgagcaagcggaggaatgcgtcaggatcaactaccacggcaccaaaaccgtcacggaagcgctcctcccactcgtgcagtcgtcctcctcctcctcctccggcgggaggatcgtcaacgtcacttcatccttcggcctactcaggtttttcagcggcgaggagctccggcaggagctgagcagcgtcgacacgctgaccacgcagcgcctggacgagctgtcggcgctgttcctggaggactacaggagcggccggctggagccccgcggatggccgaccgaccgggtgtacgcggcgtaccaggtgtccaaggcgctcgtctccgcctacgccagggtcctcgccagggacaaccccgcgctgcgggtcaactgcgtgcacccgggctacgtccagacggagatgaaccgcaacaccggggacctcacggccgcggaaggcgccagggtctccgtcgccgtcgctctcgccgaccagggcggcgtcaccggcgcttacttcgatcgcactcaaatagcttcgttcgtgtaatcctcgagtgctacgcacgcgtagagaagaacacgcaccacgtttaccatgtatttctaccgcaaataatagagctctatgcttgatgcttcacattcagaaaa

SEQ ID NO: 128585 - DNA, 1530 bp, Zea Mays
tgagaccccagagcgaagaagccccggcctcctgtagagctggtctccctctgaccctctctcctctgcgcttccgctgcgtcggccggccctgctcgtagcttggaggcggcggcattctccggcaatggggtgcaaggcgtgcgacaagcccaagcccaactaccgcaagggcctgtggtcgccggaggaggaccagaagctccgcgactacattctcctccacggccacggctgctggagcgcgctccccgcgaaagccgggctccagcggaacggcaagagctgcaggctgcggtggatcaactaccttcggccggggctgaagcacggcatgttctccccggaggaggaggagacggtgatgagcctccacgccacgctcggcaacaagtggtccaggatcgcacggcacttgcctggcaggaccgacaacgaggtcaagaactactggaactcgtacctcaagaagagggtcgagggcaaggaccaggggcccagcacgcccgcgccggcggcgtccaattcggacgacgactcgcactgcgtcaagcagcgcagggacgacgacggcacggcggactccggcgcgtcggagccgcgcgagtcgtcgtcggccgacgactcgagctgcctgacggacccgcacgcctgcaggccccacgcgcccgtgccgcccaaggtcatgttcgcggactggctggacatggactacgtgggcggtgccctgccggcgacagcaccagcagcacctggtctgctcggcgctgcgggcgtggccacggccagcacgggcgaccgcgatcagcatcaggtgatgagcatgagccaggggtccgttcaggtggatgggccatccggtgccgatgtgtccctgcacggcttcgatgacagcggcgccggctgctgggagttccaggagcacttcgatgccatcgatcacatgcaggcggccggcttctgcgacctgctctccatgagcgactacttcggcctcgactagactccaaccctggttggtcatccatcgttggtgaaaggatttgcgtttttttttatttacactttgttagaagtctcggtgaaaggcttgcttgtgttgtaaattactgtcgtgtacgtatagatagaggaattttaaaaagcagataaaagtcaaggacctacattgtaaaaatgttgtcgtgtttgttgtggttcgctttgtagagtagagcaccgacggaaggaaaaggaacagatgtagtagttatactagcaagtacacatacgttgctacctttacatttatacttgagtgtcaaatataaatataaagacatgtgtgttttattgtctaggtagatatgattgtgggtttagagtcaacaatcatagttcaaatacccgtttacgtatgattttagttgtttatcgttcaaatgtgagcctgataacggtgcaaagtggtgttccatattatagagatatatgaatagaaaaatattgagagttacacgcttgcatctagctattgggttgcgcagattg

SEQ ID NO: 128586 - DNA, 2293 bp, Zea Mays
caaacccacagttgccctaataaggtttcgagtcttacgacgatccggcgacgctacctttccgtcgctcctcccccacccacgaaccctgccggaagggcaaaaaggggttcgaaattggtcctgatccaggagccaatcctacagacttcacctcccaaattcttttcccgatccgatctgcaagttctccttggatcctgcatcctccagccgattcctgggaagatctgaatcctcctctcgaccatggatccacgcgccaggtatccttcgggcatgggcaacggccgcggtgggaacctcaactactacggccgcggcccaccgccgcaacagccgcatcagcaccacaaccaccagcagacgtcgggggcgcaccaccaccagcagacgtcgggggcgcaccaccaccagcagtacgcgcagaggcagcaccagcaccagcaccacggccacaatcgccatcagcaacagcagcagcaccacatttaccagcagcaacagcagcagtggctgcggcggagccagattgcccgcgagacctcgggcgcagccgtgaccagcgagccgaagtccctggcgccatccacggccgccgatggcgtcgattcgagttcacaagattggaaggcccaattgaagctgccgcctccagatacacgctacaggacagaggtatgttatggcatttcaacccccctttctgttgcaaatttagaatgttgtaaattctccttccatcccatctaccaaggtataggtcactttatctttgttctaagtcaaaagttctcttactttgacacataaattatcccaaggctacggtaaaagttcaatgcagattttttttctttagttttaatcattacatcacagtcatggtggaatgcaattctgatcgccagaaatttctgagggacctaaatttgataagtgtccttttcacagggaagagtcatcttcaaacacccccatatttgtgtaattattacatggttgatggtatctatttgtgtaatgctaggaatctaagatcaactttgattcatcctatctagtgacaccaagggaatatgattcactatacaactgtatactgaactgtttagacaattagctggcaccttagctgggctttgcaagcacggtggccatggttacaaaaaactgatcctaacagaccatggtcttctctccccattcatgtgtgcccggaagtgcgatcttttgtgggagtagcagttgtgacacagcttgatgatggttctaacactcttttttggaaagatcgttggttgaatggaaactgtatccaagactttgcacctgcgttgttggggctggttcctagacgtctgattgattccttgacagtccaagatgctctcccaggttttcagtggatggcaagcttgagaggtgcgttttcagtaagagttattgctgagtttcttgacctttgtgaagctttagaaggcagggtgctacagccctaggggtataagactggcatatatggaagtttgctgcttcaggtttcttttctataggttcagcagttcagcttatagtgctctctttccaggaacaattgagtttgaaccggctgaaagggtatggaagtcttgggctcctagaaagtgcaaatttttcatttgggtagttgagcatgacagatgttggacagccgatagactcgccaagcgaggtctcgaccatccagagaggtacttgttgtgtgatcaggctgttgaatcgatcaaccgtttgctagttgggtgcgtctttgccaaacaattttggcttgagctcgtgaagattggatgctggcaaggcctctgtcctcaacaggatgaccattccttcgagacatggtggatgggtagtagctccagagtgattgagacagcaaggaaagacttcaactcttttgttattttaggagcttggattatctggaagcataggaacaggtgtgttttccatggctgcagcctgagtctggttgtggcccttcgggcagcaagggaggaagctgtcctttggtctctaacagagatcaaagctttgtcttcccttcggatcgatgagctcctgttctacctgtggtagagttttaggcctagctagtgctgagttgtctgtagagttcttttacaatgtgcgtgtgtgtgtttctttattctaaattctggcctccgtaaggaggtttccttgtacttggtccattttggacctcttttatctccttaatattattgatgcgcagttctcctgcgtattcgag

SEQ ID NO: 128587 - DNA, 1536 bp, Zea Mays
atggtcaccactggtggaaccagtttgaaggatgatattgttcgtctgtaccaacctgtgcacttactcgttggaacacctgggcgtattttggatcttacaaagaaaggtgtttgcattttgaacgactgttcaatgcttattatggatgaggcagacaagcttctctctcctgagtttcaaccttccatagaacagttgattcgctacctccctgctagtcgacagattttgatgttttcagcgacattccctgtgactgttaaggagtttaaggacaaatatctgcctaaaccttatgtgattaaccttatggacgaacttacactgaagggaattacacagttctatgcttttgtggaagaaagacagaaagttcactgtctcaacactctcttttccaagcttcaaatcaaccagtcaataatattttgtaactctgtaaatcgtgttgaactattggcgaaaaagatcacagagcttggctattcttgcttctatattcatgcaaagatgctacaggaccaccgtaatagagttttccatgatttccgtaatggagcatgcaggaaccttgtttgcactgatctttttacaaggggaatagatattcaagctgtgaatgttgttatcaattttgatttccccaagaactctgaaacatatctccacagggttggtagatctgggagatttggccaccttggtctggccgttaatttgatcacctatgaggaccggtttaacttgtataggattgaacaagagcttgggactgaaataaaatcaattcctcctcagatagaccaggctatatactgccaataatctgaccgttttcatatgctttcatttctccgcgaataatgagaacttttgtaaataccagctcatcaggttttatggtgttgatctcgtttgttgcatcagagacaattctatgttggtggataacattagatgaggcacccaactttttttattacaccttgtcatgctgacactgttatggctatatgagggcaaatgtcctgccacattaggcacaaagtagtgtatattctaggtgcctattcctaggccctgtcctgcttttagtttctttttctcttattttcatcctattgtgtcattagctgtttcacacaggacattttaaccctgttgctggttctgggcgtgtgatctgtcggtgctcacacaagcttgttgcccgagtcgaacttggggatgtgggcctcagatgggttattgggtgacaggtcggccattgaacttgaagtctggagtctgaacggtagtgaactggttaagtttgcaaataatcggtggtgagctgcatcatgttgtgctgtcttacccttgcagtcatgtcacttttgcttggtgccgtggtcaccatttagatttgcttggataaaacgctcgtcacgtttgtgctgactttgtgttcggcacaagcaacctgtccaggttatgtgtaaagaactgtttacttgtttttttcataataacaaacgttgcagctgtttttgc

SEQ ID NO: 128588 - DNA, 1643 bp, Zea Mays
ggcctccgctcccctgcttccccggctggctcccccacgccacccgtctactccgttgtctcgtcgcaggcagcaggtgaaaatctccgccattaagcgcgccccagggatcctcctcggccgcaaacaaaaccctcctcgtcatccgcgcccgctttcccccctgccggcccccggtctcgctctcgcccaagcaccaaatcttcctcccactcatcacaagacgaagtttcagtgcctgcgcgtgccgcgcgatctctcgtccttggcgtcgtcaagacgcgttagtttcagtgcgcgcacgagtgtgtgttgtgggagttagtgagagcgagagcgagagcgagcgcaccaagcgattcggcgggcggcggccgatggggagggcgccgtgctgcgacaggaccaagggcctcaagaaggggccctggacgccggaggaggacaagctcctcgtcgactacatccagaccaacggccatggcagctggcgcctgctccccaagctcgcagggctaaaccggtgcggcaagagctgccgactgcggtggacgaactacctccggccggacatcaagcgcgggcccttcacatccgaggagcagaagtccatcgtccagctccacgccatcgtcggcaacaagtggtccatgatcgcggcgcagctccctggccggacggacaacgagatcaagaactactggaacacgcacctcaagaagcagctgcgtcggatgggcctcgacgagcccccgcccggcccggccgccggctgcccctccgcgcgccacatggcgcagtgggaaacggccaggctcgaggcggaggcgcgcctctccctcctcgccaccgccgcctcctcctcctcctgcggcgccatcgcggccacctccgcctcatcctcctcctccaccgtggacttgaagaccgcatgcgccaggcccgcggacatcttcctgcgcctgtggagctcggacatcggggactccttccgccgcaagacggccgcggcgcccgtggtcaagaggaaggacgcggtgatcaagcaggagtcgcaggcgctgctgctgggtcccggggacgactcctcggccgcgtccaacgagacggaggtggcggaggcgctggaggagtaccagatgttcctcgacttcgccggcgaagagctggggctgtttcacggccggcacggcggcttctcgctgttcccgccgctcgacgtgctcgccgaggcgtccctggacacggcgttcaagtgaagacgtagcgagtaccacgtacgtacacatacctattgccatgggcaagcggcagtggacatgcctctacggctagctgtatactgtacgccgcctccgccttaacatgagcgcggatgtactatgtatatatgcatgctgtctcgcgtattataccgcgggctggcgcgcgcgcatacgtacggtacttctacgtgtgactgctggcatcaggagttttttttttgttagggcatcaaccaaccagcaagtgcgtggtttagcttgttaaccgggttagttttggaccttttggtaggacgccatggtgtgtatggggggattctctgtgcatgcgtcagccgtaactagatatgctgtgctctaatacatcaacaatcgatt

SEQ ID NO: 128589 - DNA, 1203 bp, Zea Mays
agctagcctctcccacttcttcttctagctagcgcagcagccagcagcgcacgcagtgttgactgattcgtctctcttcgatctctatatgcatgcgcgcgcaggtcggcgtgccttgcagcagcctgttcaagacggtgacggtgcgttgtggccactgcgccaacctactctccgtcaacctccgcggcctcctgctcccgcccgccgcgccggcgccgcccaaccatctcaacttcgctcactccttgctgtcacccacatccccgcatggcctcttggacgagttggctctccagcaggcgccgagcttcctgatggagcaggcgagtgccaacctgagcagcaccatgacgggccgcagcagcaacagcagctgcgccagcaacctgccgccgccggcgccgatgcctgcagctcagcctgtgcagcaggaagccgaactgcccaagaccgccccgtcggtaaacaggcctccggagaagcggcagagagtcccgtcggcatacaaccggttcatcaaggacgagatccagcgcatcaaggccggcaacccggacatcacccaccgggaggcgttcagcgcagccgcaaagaattgggcccatttcccacacatccacttcggcctcatgccggaccagggcctcaagaagaccttcaagactcatcaggatggcgctgaagacatgctactcaaagacgatctctacgccgcagcggctgcagctgcagcagccaacatgggcatcactccattctaataactctggttaggcatgtgttctgaatcagctggcacgtcgtagtggctatcgccctttgtgctgcattctagggtttcgtctcagatcttgatctcaacatcgatcgtgtgtcgtttaattagagtactttccagtgtggggatagaaatggagaataatcaagttagagcgcgcatcaagtaggccactgatgatccgtaggtacagacttgattgtctcctctatatatcccttttcatttcatgttctctctctttttcctattttttgttcctggaccccttcaactcgccagtagagagctcgttgtgcctctccaatcccatgtttgcgtatgtctgctcaacaacatgtttttaccatggagaacaagttgaacatctgttagatctatcaagagtgtcatatatatgttccatcgtcctttaccatgta

SEQ ID NO: 128590 - DNA, 691 bp, Zea Mays
tttcagtatttgcttccaagtactcggtcggtcgtacgtaccctactaatgttgcattgcctttctctgatttgtgttcataatcagtgggcccatttcccacacatccacttcggcctcatgccggaccagggcctcaagaagaccttcaagactcatcaggatggcgctgaagacatgctactcaaagacgatctctacgccgcagcggctgcagctgcagcagccaacatgggcatcactccattctaataactctggttaggcatgtgttctgaatcagctggcacgtcgtagtggctatcgccctttgtgctgcattctagggtttcgtctcagatcttgatctcaacatcgatcgtgtgtcgtttaattagagtactttccagtgtggggatagaaatggagaataatcaagttagagcgcgcatcaagtaggccactgatgatccgtaggtacagacttgattgtctcctctatatatcccttttcatttcatgttctctctctttttcctattttttgttcctggaccccttcaactcgccagtagagagctcgttgtgcctctccaatcccatgtttgcgtatgtctgctcaacaacatgtttttaccatggagaacaagttgaacatctgttagatctatcaagagtgtcatatatatgttccatcgtcctttaccatgta

SEQ ID NO: 128591 - DNA, 1343 bp, Zea Mays
cgtcccatacttcgggacagacggccgttgattcggccggaaggagagaggtcttggacggttttggattatgctgggggtcatcgtcgcccccccaacaacatcctcggcctgctgtgcagggaacacttccctggacttgtggagtacgccggagtgacgggcccagccttcaccttcgaccactacgccgtcgcccccgatgcagtagaccgggacggcagggaattcaataacaaggcggagcgggtgaagcaagagctgtgggtaagtcttagtataatataaaatatgtcgcattcgttgcaaattcttgaaataatgtatggatacatcgtttttgtatgcaggatttctttagatgcgatgctggatacgaggctagggcgaatgtggtggccaccacgtgctgtaagaagctcgtcgtggacatgcactatgaggcccgcatccaggccatcatcacctaccacggctccgtccttggggagaaggtgaccaaacctcaagcccgaaccatgtcgttgaccagggagcagtacatgcaggtaaagtcatgcatgtttggtaccagtactccatgcatgaattttattttatcttctgatatgcactttatgtgtttactttgcaggtgattccacattggtgcgccgcacatcctctatgctgggagcagatggtggataggtggtgttcggctgagtgggacgaggtgcacacagctagccgggaacggcgtttgcagatgcaaggcccctcgcaccaccaaggcagccggagcctgggccaatatgccgaagcatggtcggcgtcacatggtggcaggccttgttccaccttctcggcctatgctatggcccataagggtaaggcgacgtccgacgtcacctacaacccggatgacgggcccgaggcctacaccaaccccgccgtctacagccgcctccatgactacaccgccatggcgcaggaggtccatggcccagactatgatccgagcaccgagcctatcgaccccgatgtgctcatgagggtcggaggaggcaagagacatgggcggtactggattgccgacggggcaatcgactcgtcctccactcccactctgtctcaggtgagagcaaggagcacgggctcgagcccagccattcgacctcggcacgacagctcacagcatcgcatacagcaactcgaggttagtgcttctgtaactcgtccttcctttagttatatacctagtctttgagttactataacgttggcttgtaatattacagacccaactagaagagatgaaggcgaggataatggcggagcgggcggcggctgatcagaggatg

SEQ ID NO: 128592 - DNA, 729 bp, Zea Mays
tgtcgtctgccgtgcacctgaggtccaagcgccgccgcccgcacgagtgctgctcgccgcgcgcctgagcgccatccgcagttcgttcaggccgcctaggccgcacgtccgactcccgagcgctgccaaccacacacctaaacgcgccgctcacgcccatcagcttcctcgagcgcaccacgctcgtctaccccgaccgcccctccatcgtcgccgctggacacgacgccgcgccgccgccccgcacctggcggcagacccgggactgctgcctccgcctcgccgccgcgctcgcggggctcggcgtcgcgcgccgtgacgtggttgcggtgttcgcgcagaacatcccggccttctgcgagctccacttcggcattcccatggcgggcgccgtgatctgcgcgctcaactcgcggctcgacgccggcatggcgtccgtgctgctgcagcactcggaggccaaggtcgtgttcgtggacgccgtgctgctgggcgtcgcccgggaagcgctccgcttcatctcccagcaggccggcggagcgagcagggtacccgccgtggtgctaatcaacggggcgctcgacgagccgccgccagcggcgacaggaaacaacaagatcccaggcgtcgatcgatgctacgagtacgaggccctcctcagcaacagcagaggcggcgatccagagttcttgatccggtggccggacgatgagaacgagccgatcgcgc

SEQ ID NO: 128593 - DNA, 2246 bp, Zea Mays
ctacgctccactcttaatagttgtagagatgttatcggctatgtgcactctagttgtgtagaggatggcttccatgttgtatctgcgtgatgctaactcttgagggcgtttagtttgtgaatgtgataatgcagtagcgccggatcttttcttcgcgcccgtgtcgcgagacggctccgctagcagttacgtgttcgcgcgcaagccgccaccaccaccagtctgtcccgttccccacctcaccctcttcttccctatactcgggctacacctgcgaccactgctcacctgtcgcggccatgactcccgcatccacctcccctctcgccgccgccgtcctgcccacgaacttatcttccttctctcgctgcccacctcgccgcctcccgcgcatctcctgcctggcagcgcccgaacgcgggggcaacaatgcgtcgaacgcctcgccggcaccgcagcagccgaggtggggtgccgcggtatccgccgcgctcgcggcggccgtggttgccgcctctatgccagcttacgcggacctgaacaagtttgaggccgagcagcggggcgaatttggcattggctctgccgcgcagttcggctcggccgatctcaagaaggctgtccacgttaacgagaacttcaggcgggccaacttcacatccgctgatatgagagagtcagatttcagtggttccacattcaatggtgcctatcttgaaaaggctgttgcttataaggcaaatttcactggtgctgatttgagtgatacattaatggaccgcatggttctgaatgaagctaaccttacaaatgctgttcttgtacggtcagtcctcacacgtagtgatcttggaggagccatcattgaaggtgctgacttcagtgatgctgttattgacctatcacagaaacaggcattatgcaaatatgcaagtgggaccaaccccatgacaggggtgagcactcgaaaaagcctaggatgtggcaatagccgtcgaaatgcatatgggagcccttcatcccctctgttgagtgccccgccacagaagatccttgaccgagatggtttctgtgatccagctactggtatgtgcgatgcaagctgagaggtttgatccaacatggaaactggtcaatggatggtgtacatacattggagattgagtaagagcagaacagtgcagagaaacaagtcgtttttcttttcctcttgccattgttgtaacattgcaacacggaatcaggtaaaattcaggatgtagatgagatatgcacgctgagtactgaatggcatgtatagcatagtatgtatacgaaaatagatcatatcaatcatgtgcttcatgcttgaaaggagtggcccctgccttgttctaaagccaacatagccaaaagcagaagttcaacagaggagtgtctcagcaaataaactttccactccatttcacaaacattgctgatgcatcggcagcaaccagagctgccgttctggatgaaccgcacaaatagacgtccatcgacagcttgactgtttgtgcagattgtcaggtcagttgctgaagtccctccttagcttcagctttcagctagctaccttgttaacatcaggtcctgaaacctgatatcaaataacaatatatatatatataaccacttcggttacatgtttattatgcatatggagatttttcatgtgccatgacacgcattgcatgatacatatttgtacactaataaatcaggtgtgggaggcatattttatatatatgaattgtatagggcttccaatggattcatgtacgttgtgtagtagctacttccacatgctcgcctcgccgtccccagaggcagatgtagaggcgaagtccagtgcttcttccggctgcctgttctcagactgaaatgcctgcgccgggctggagtaagcggtctctttcgctgtgtcatcgccgccgtggctgacgagctgagacgcgacgaacttgtcgagcactctccagtcggtgaccgagtcgtccatgtaagcggcttccgtcatcggcagttgccgcgcggtgtacccagaagcatcgtcgggggactggaggctgcagctgccctgggcggcgatgtaggcgggaggaggcttggggctctccaactgtgggagctgctgcaagaaggcgtcttggctgggcagaaggtgatggtactccagctccggcttgcagtggtagagctgctgctggccgctgtacaccgccgct

SEQ ID NO: 128594 - DNA, 2585 bp, Zea Mays
tgttcctaattgttgtgtagcttagatcttgtgtggaggtttcctatttagttgggataaaggatgttttctgtacttccatgatggtgtattcagcaacttgttgatcactatgctagcgagttccaacactggtttgtgctttaggtgttccgactcaatcaagcatgaatgatcaaggaggaggcgatctagttaatttaggagaaatttggtttataggcgtgaccttagatctaattggtcttctcggtcttttctgggacaaaggcaattttattgtttgattatttaatcagcagcttgatgcatcttatctgtcaatcactactcctttgaaaactgacggaacatgttgctccttttaggttaaggttgcaggcttttagcttgggattctgaaagatggggacctcttctggcgcgaatttccatcagcaacctcctccgacccaggggatgttgcctccaaggcatggtccacgcccctcagggttgcagacctcgctctcgctggcctcttcggagcaggttggctcgcctgacatgcaggagcctggttcaaactcggagccagggcatgattccgccactgagagcgccagttccaaagacacatggccagctgagccgaaccagagcaatggtggagtggctgccagtgatgttgtgagtaaggcggcggagaaggaggtggcaaatggtgtatccaagccgcaggttatccatggaccctcctcccgtatgagtgggatgcttctgcgggaggttgcacgggagagggttgatctggtcgctgagaagatgaagatgatgtcggatgagcacctagaggaggtcaagaatgagctcaggtcgattctggagggcactggaggttctcaccacatcgaggagttcttgtacttgcagaagcttgtccaggacaggcatgatttgacaccatccatgctttcagtggcacaccatgtgcagcttgagatccttgttgcaatcaagactgggatacaggcctttctgcaccccagtgttaccattccacacaatcgcttggtggaggtcttcttgtacaagaggtgccggaacattgcttgccagagtgctctccctgctgaggagtgcagatgcaacgtgtgcgctagcaggaatggcttttgcaacctgtgcatgtgtgtcatctgcaacaagtttgattttgaggtcaatacatgccgttggattggctgtgatttttgctctcactggacacatacagattgtgcaattcacaatggccagatcggaatgggacaatcagtgaaaagcagcattggtcatgctgaaatgctttttaggtgccgagcttgtcagaggacctcagagctgctgggttgggttaaggatgtcttccaacaatgcgctcctggttgggatagggatgctttgttacgcgagcttgagttcgtttgtaagatattccgtttaagtgaggatgcaaaagggagagtgttgttcaggaaatgtctagatctgattgaaaggctgaggaacactccagctgattccatcaatcctaggatgatactacaagcactccaagagcttgagatggactcccccaagatctctgaaaatgaagatgttgggcatctgatcacaccccaggaagcctgcaaccgcatagcagaggtagtccaagaggccgtgagaaagatggagctcgtggctgaagaaaagatgcgactttacaagaaggctcgcctcgccgtggaggcctgcgaccgagagctggaggagaaggttagggaagcccaggagctgaaggcagagcgtcagcgcaagaagcagcaggtggaggagctggagagcatcgtgcggttgaagcaggcggaagcggagatgttccagctgaaggcgaacgaggcccggcaggaggcggagcgtctgcagagcattgcgctcaccaagtccaagacagccgagcaggactatgccagcatgtacctaaagcggcgcctggaggaggcggaggcagagaagcagttcctcttcgagaagatcaagctgcaggagaaccagaggccaacggtcggcgtgggcagcagcagcggtgcgggaggggactccacgccgacgatgatgctatccaagattcaggatctgctcaagaacgtccgcagcatgccagcaaagtcggagggtcactagtcggagtaagagctttcgctgctgacactttcggtaattatgtgtgatctgctgacttgttcgagcagaggtgtaacgaaatcgtgtggtgctgtgagaaattcgaatcccttcgcgttactgtcggtactcgctaggcgtgctgatgtattaactctgttggcgcaggtgatcatagtgtcttgaaacaatgttaaaagttacatcggtagacacgaaacaaccaacagttgtggccctccctttgcatcttaaatctacgtatacacccgcatgcatttttaacggagcccttgaccaaacacggtatggttggtgagtatgtattgatctgtgagaaatctgttagattatataatccaaacagattataatctcatgcaaatatccttttatct

SEQ ID NO: 128595 - DNA, 539 bp, Zea Mays
gcattccccaccgacaaactctaacaccgatctgagagagggtgcgcagctagcaacaggaagacaccatcgttcttagccgtcgccagcctcgctgcatcgaccatagctgccctagcgcagatcttcaccaacgaacctgatggcgactggatctgcatcctccaacacgcctgcgctttctactgacggatcaaaaccttgataaaggtaaagcttctcgcccttgaaggtcttgtcaccatattccatgacgtgagagcctgcaccatagctattgaagtctgaagtacgcttcttcacctgtgcacaatgctgtgactaagtacaagtttataaagcgatcaaatgaaatgcctagaaggcaagtccagactcaccacttcatattgttcctttattgtttcctccttcagattgttagtctcactgtcaagtagtaatattatggttattcatcatggaaccaagtggccatctccaaattaacaaaaaaatatgattcaagacgaagtaatcaagtcaagtggatgtttggt

SEQ ID NO: 128596 - DNA, 2194 bp, Zea Mays
tttataaaaacctcaaagcttttcgccttaatccccatcaaccccccccggacatttctggtcgcaccctcctccggccctcccagccgccaagccctctggaaccttcgagagctcgatcggatcggagcccctgccatggccgacgaggcgaaggcgaagggtaatgcggcgttctcagccggccgcttcgaggaggcggcgaggcacttcacggacgccatcgcgctcgccccgggcaaccacgtcctctactccaaccggtcggcggcgctcgcctcactccaccgctactccgacgctctcgccgacgcgcagaagaccgtcgagctcaagcctgactgggccaagggctactcccgcctcggcgcggcgcacctcggcctcggcgacgccgccagcgccgtcgccgcatacgagaagggccttgcgctcgaccccagcaacgaaggtctcaaggcggggctcgaggacgccaagaaggccgccgccgccccgccgcgtcgcgggccgtccggccccgacgccatcggccagatgttccagggccccgagctgtggagcaagatcgcgtccgaccccaccacacgcgcctaccttaacgagcccgactttatgcagatgctgcgcgaagtgcagaggaaccccagcagcatcagcatgtacctctccgatccccgcatgatgcaggtgctcagcctcatgcttaatgtcaagatccagagacccgaggcctccgagccatcgcagtctaccccaccgccgccgccgccgcagcagcagcagacatctcctcttcagacgaaagccagagaggtggagccggagcccgagccagagccgatggatttcactgatgaggaaaaggagcgcaaggagaggaaagctgctgctcagaaggagaaggagttaggtaacacagcttacaagaagaaggacttcgaggcggcgatccagcattacaccaaagccttggaacatgacgacgaggatatttcttatttgactaaccgggcagcagtttatattgaaatgggaaagtacgatgaatgcatcaaggactgtgataaggctgtggagaggggaagagaacttcgtgctgatttcaagatgatctcaagggcactgacaagaaaaggaacagctctagtcaagcttgctaagacctctaaggattttgatattgccatcgagacctaccagaaggctctaactgagcatcggaacccagacactcttaaaaagttgaatgaggctgagagagcgaaaaaagagttggagcaacaagagtactatgatccaaaattagcagatgaggagagagagaaaggcaacgagttcttcaaggagcaaaaatacccagaagcaataaaacactacacggaggctctcaagagaaacccaaaggatcctagggtttacagcaatagggctgcctgctacaccaagttaggagccatgcctgaaggtcttaaagatgcagagaagtgtcttgaactagaccccaccttcactaaagggtacacaaggaaaggtgcaattcaattcttcatgaaagaatatgacaaggccatggaaacctatcaggctggcctgaagcatgacccgaaaaaccaggaactgcttgatggtgttaggaggtgcattgaacaaattaacaaggctaacagaggtgaaataagtcaggatgaattgcaagaaagacagaacaaagctatgcaagacccagagatccagaacattcttaccgaccctatcatgagacaggtgctaaatgatttccaggagaacccaagggcggcccaggagcacctgaagaaccctggagttatgcaaaagattcagaagcttgtaagtgctgggatagtccaaatgagatgatcaggcacacgatgcgattgtacctgcttgttcgtcccttgtgcttggctttgttagttaacgtgccctttaacaagcagcgacggcaaaagaatgaggggctaatcttttttcccaattggattgtaagtgcagttaacattggattattcatgtttgtggcagagtctgagtataggcgccgtcttgctttattgatgctggactttgcgtgcttgtgggtgggggttggttccctagctaaagtttagttcatgtcccattaaatatttgaatataatatatatttaattaggtttcataaaattttctc

SEQ ID NO: 128597 - DNA, 713 bp, Zea Mays
atggcgtagagtgacctgagcagcgtgatgcagcgcttgtacgcgcggttgaccgccagcccctcccccgcggcggcgggcgagggccagggctcgcacgccacggtccacctctcgagcacctcctctggtccgccgcccgatggggccaggtacacgtccaccacgagcggctcggcgggagacggctccggcaggtgctccgccgcgggcggcaggtggagcggcaggtggaaccaccggtcccgcctccggaacgccgacgctgccgggggcgggggcgggggcgcgtgcgggcgcggcgaccgcgcggcgaggatggcgtgcagcaccttgagtaggaactgcggcaccatcagctccgcgccggcgcggccgccgctgcccgcgcccgccgagtccgacaggctcgccattgcggatcccgaaaccggtccctcagcgcagcggcagcggcagcgtcagtagtcaaactgttccggaacccgccgttctgcatggctgcataaatctggccggcgcggatggccggggatcgatcgaattagaattgtgcgggaaggagaaacggatctgtaatcagacgacagggggagtttagctttgcgcaaggtctggaatgatgggagctgaggatggattcctcttctccccggttttgaatccggctagcgaacgggtcgctgttatagtgccaagaagaaaaaaaaaaa

SEQ ID NO: 128598 - DNA, 1758 bp, Zea Mays
attcaatgacccaccagacgctcatcgcttgcacccacgctgtcgttgccgccgctgccttttcccctgcctcccactccctccacgcctccttgcctctccttttcacccgttcctcgtctccctcctgcggtcctgccccccctcccctgcagccgctccctccatggcgtccttcgtcgtgcaccaccacggttcgccgctggacagggagggcaaggtcaagatgtccgccctggccctgaggagtagcctcaggccgtgcgaggccgccgaggaggtcggggccgggcaggcgtggtgcagaggcgcggacatgggcatcgccgcctttgccgatgagttctccgtggaggacttgctggacctcgaggacctctgcgaagttgacaaggactgcgccgagctgggcgacacggtgccggcggcggagtctgtgcaggaagaggacaaggtgtccagtgactcccacgggtcgtcggtgctgtcctacgagctcatgacgctcccggttccgcacccgatgattgacctcccgttgccggcccatgacgccgaggagctggagtgggtgtcccgtatcatggacgactcgctcgccgagctcccgccgccaccgaagctacccgcggcgccgttgggagctgcgcggcggccgctggaaggcgcagtggcaggccctatgcggagcccgaccacgaccatatgcgcgctgtcgacggaggcgctagtgccggtgatgagggcgaagcgcagcaagcgctcgcgtggctccgtgtggtcgctgtccggcggagcgcccctgtcggagtcgacatcgtcgtcttccacggccaccacgtcgtcctgctcctcgtccgcctctttctcgccgctgttactccttccggcggacccgtccctcgtcctgtcctcgcacctcctcgacgagacgccgcggcccaagaagaagtccaagcacgggaagcatggcaagagcggcaagcccaagaagcgcggccgcaagccgaagcaccaccccaagccgccccagttctcgggcggcgccgcctacgcgccggcccagggcgaccggcgctgcagccattgcggcgtgcagaagacgccgcagtggcgcgcgggccccgagggcgccaagacgctgtgcaacgcgtgcggggtccgttacaagtccgggcggctgctcccggagtaccgtccggcttgcagccccaccttcgtgagcagcatacactccaactcccaccgcaaggtgctggagatgcgccgcaagaaggatggcgaccttggccagctcccgctcccagtcccggccgcgcttctgcttgggccggccgtcgagtcgttctagccggcgctgtacattttttcgtccgcgggtggagctgtttaacctgctgtaccgtacttggtttttttttctttctcttccacttctatatttagtagttgtgctgtactatttagctagagctctgaattgtagaagctttattaggtcgagttaggtagtagagattaagatttccatggttgattaggattgttagggtatgtatggccatagtacttgtggtagtagttaagaacttggtgaggtgtttggcctgacctacgaggaatgatgttgtcatgtcgaggcgctgctggcaccagtgacaagaaagttaggcgtgccttggcgcggaacatggaactgtctgccttgttgtaatcgagagtgtcaggcgagtaagaaagtgattgtttgcattgcca

SEQ ID NO: 128599 - DNA, 938 bp, Zea Mays
catatctttccgcgctaaccccggtctagtagctaggaagtaacacactagtagcatcccccatcatccagcctcgcggttgctacagttagcttcgctttcctccagcccatccttctatacacgattgacctgagctgagccgcctccgacccgtctcgagagggagggagagggagagcgagagctagcgcgcgcgatcgcaaagagagcggtgaaagatgaaggtgcagtgcgacgtgtgcgcggccgaggcggcgtctgtgttctgctgcgccgtcgaggccgcgctgtgcgaggcgtgcgaccgccgcgtgcaccgcgccaacaagctcgccggcaagcaccgccggctctcgctgctcagcccggcggcgccgtcctcgtcggcgcagcagacaccgccgcctccgctctgcgacatctgccaggagaagcgcgggctcctgttctgcaaggaggaccgggcgatcctgtgccccgactgcgacgtgccggtgcacacggccagcgagctggccatgcgccacacccggttcctgctcacgggcgtgcgcctctccggctctccgcagagcccgccgcgcgcccgccgccgtcggaggaggacgagaacgacagcagcagcagcagcatctccgagtacctgaccaagacgctgcccgggtggcatgtcgaggacttcctggtggacgagaccgccgccgcaactgccattggcgtctccgcagacgtgtcgtatcaggcgggagggctagctcggacaggcggcccgcaggacggctactactccgcgtggatggcgccggagcagatcttctgcgagggcaagggcagcaggatgccgcagatggcgatgtgcagcagcagcaagagacccagagccacgtcctcctattcttactggtgaacaacccaacaggagacgaccgtgtcag

SEQ ID NO: 128600 - DNA, 428 bp, Zea Mays
cggtaggggacgatccctcgacttcgttgtcgccaccaagatacactgactggcctagatctgacctgttaccagtagatgcctacaaccatgccaggttaaaagccccctttcagagttctgtcgtatggtgtccgaccatcttttggctgaaggggaactaccaatttacattatcttgcccggtacaactccaaggcttagctaatgctatagtaaagttgtgggagaaaagttctattgctaaaattgctttgaagggaggagtatagcttaccacaagtgagaggatgtcgaagatattaaagtaagtacaaaaagtgtctcttgttagattttgtatagtttgggtagcatatgtaaaaatttatatcctagttagaagtgttaattgatcactagcaacaacacattacagatttgtagtc

SEQ ID NO: 128601 - DNA, 899 bp, Zea Mays
gcaatcacgtgggtcaggaaaaggacgagagcggaaaggaccgaacggctcgggttgatccatcggatccgaaggggcatggctctggtcagattggcgtttcccgtgttcttcttcctcgcagcggcggagttcgcggcggggacgcggtcgccgtcggctttcgtacaaaacgccatctactccaaccgcatcaccatcttctccaagacttactgccccatacgaagcctagatgtttggtgtatcgatttgtaatatgtatttatcagaaaaagggtaaatacagggaaggccttttttgtttttttggtaaatatgcttcctacaaggattgtgtatattgagcaggtatatcttgtagtgcccttgtcgttataattctaagcatttttttgtgaaaagccaacttaaggaccttctcaaaactcacccctgttgaatcagagaacagtgagaatcccccttcaacatgccctcaccttccctgcctaccgtgttgtcaatggctattcaagggaaggggatcgttccttttttttatcttgatgcactttgtttgttttattcttacttttagcttgtctcattcttctctccaatgttgctactgtgccctttctgttatgggcacgatgttgtctgttatttcttccaccaccaccagaacaaagccttttcgttctaagcaagttcgggtatgctatatttgaaacctaacaaaaactacaaatcaaggttcagtcacgtggacagctatttttcatttgcttttattcaagtctaagtctttgggtgcattccattctttcaagtctgcttttactgcatctttccatgccaacttcgacttccccctgtctctcttcccatttactataacaccttagtattccact

SEQ ID NO: 128602 - DNA, 832 bp, Zea Mays
gcaatcacgtgggtcaggaaaaggacgagagcggaaaggaccgaacggctcgggttgatccatcggatccgaaggggcatggctctggtcagattggcgtttcccgtgttcttcttcctcgcagcggcggagttcgcggcggggacgcggtcgccgtcggctttcgtacaaaacgccatctactccaaccgcatcaccatcttctccaagacttactgcccctactccatgcgtgctaagcacatatttcgagaccttaaggaagatccatatgttgttgaactagatacccgagtggatgggcgtgacattcaaagtgttctcctggacctagttgggcgtcgtactgtgccacaggtgtttgtcaatggacagcatattggtggctcagacgatacagtaaatgcgctttcaaatggacagctccagaaacttctcgggaagagtcagtcacaatgatgggtcgctggacaagcttgcactgtcaagaacacgtgagtatatgtttgggaggggtgttcttttgtgtttagggctgaacagaatctggtgttgtgacaaccatctgtactgctggatttgtgatctgctcaattgcacccatccatgttttaccttgttcattatggaaattattagtataggtagctcaatgaactagctgcataggctatcctcagaaaaaaaattcctaaacttctgacgactttattggtatcgacatcctccgttacaaagtcattttagattttctaggtacataatttttgctatatatatggacctcagacatagcacatttaggtccttttaacttgcgtcgcttgtttca

SEQ ID NO: 128603 - DNA, 603 bp, Zea Mays
gtcgtactcgtctccgagcctccggtccactgcctccgctactcttccttcgccgagcgtaggacccaccgcggcggcgagccggcgccccgtgtcggcgcatatggcctccctccccgtgaggagctcgagcagcagcacgccgaagctgtacacgtcgcccttcttggtggcgacgccggagcggaggaagtgcgggtccacgtagcccggggagcccatgacgacggcgcgcggcgccgacgacgccctggccctggccccgctggcctccggcggctggagcgcggccgagaagcccacgtgcgcgaagcccaggtcgcagagcttggcgtcgaggctggcgtccagcagcacgttggaggccttcacgtcgccgtggatcaccgccgggtcgcggctctcgtggaggtgctccagcgccatggccacctggaacgccaccgccatgcggcgcgcccacgggagcggcgccttgccgctgccgtggagcctctcgtggaggtcgccgttcggtgcgtactcaaagaccaacacgccttcctctgcacgtacgcacgcagaaagagagggagagagagagagagaaaagaaactcgtgtt

SEQ ID NO: 128604 - DNA, 157 bp, Zea Mays
gatctagtgcgcctgcatctgataagatgcaggaaatgcactagtcgtcgacagacaccctggaagcctgaaattgtctcataaagaattaggctccgtttgattcattcgaatcgaattttattccaataattataatttgggcacatgtccatta

SEQ ID NO: 128605 - DNA, 1297 bp, Zea Mays
ctcggcctctttccttcctctgttcctcatcttcgtctcggcctcacccccgacgaccccgcaccgatccctccacgcgctcgcgcgcagcacgggcggagttgggcgaactccgtgctcgttcaacccgtactctagtacctccagggttcgggtcgggtctgccttcctcttcgtatggcttccgccgccgcggaaaccctcgcctcgttcccaatcgcatccccgtcccgctcgctcctacgccccttccccaggcgaccagccggcgctaggacaggcgcaccgtcgatccggatatccgccgtgccgccgcggggcctcgggctcgcgctcgtacaccgccgctgcccgccagcggcgcgcgcgaatgttgagcgcgacggcgacggcgcctccgggaacggcgagccgtcgtcctcgtctggggatggcgaccgcgacgcggctgcggagtcggggggcgatagcaccagcacgagcaccacgagcacggccgcgacaccgccgccgccctcgtcgaagaggaacgaaaataagtggcggcggaggctgactaagggaggcggcgtggggcggtggctatgggagcccatagtccagggacgggagatgggcttcctcctgctccagctgggcttcgccatatttgcgctacgcatgcttcgcccagagatcgcgttgcccggttcagagccccgcccacagacgacgtacgtcagtgtaccatacagcgacttcctggccagcataaacaaggaccaggtgaagaaggttgaggtggacggggtgcatatcatgttccgactccgcccagaggtggagtcccaggtccgtgttgagcagacaccgacacagcgcggagcagattatgtcattgataatgctggagtttcaaggagaattgtgttcacgacgactcgtccagtggacataaagacaccatacgagaagatggtggaaaacatggttgaatttgggtcaccggacaagaggtctggcggcatgctcaattctgccctggtaaggcactcatgccgaaagatatttctgatgcaaatgcaatgttcgtggcttcaaattaatgtagtaatagtaccaatcacacaagtttaggaattttaaaatttgtatctaagcatgtaaaatgacagttggaaagtcagagatgttctgagcattgaaactgacagggcaaatatttcataatgatattgacgagcgaacccagtaggttcactttgtgtgagcattgtatatgtacagtgtgaggcagaatattgcatagtatatgttg

SEQ ID NO: 128606 - DNA, 3199 bp, Zea Mays
ctcggcctctttccttcctctgttcctcatcttcgtctcggcctcacccccgacgaccccgcaccgatccctccacgcgctcgcgcgcagcacgggcggagttgggcgaactccgtgctcgttcaacccgtactctagtacctccagggttcgggtcgggtctgccttcctcttcgtatggcttccgccgccgcggaaaccctcgcctcgttcccaatcgcatccccgtcccgctcgctcctacgccccttccccaggcgaccagccggcgctaggacaggcgcaccgtcgatccggatatccgccgtgccgccgcggggcctcgggctcgcgctcgtacaccgccgctgcccgccagcggcgcgcgcgaatgttgagcgcgacggcgacggcgcctccgggaacggcgagccgtcgtcctcgtctggggatggcgaccgcgacgcggctgcggagtcggggggcgatagcaccagcacgagcaccacgagcacggccgcgacaccgccgccgccctcgtcgaagaggaacgaaaataagtggcggcggaggctgactaagggaggcggcgtggggcggtggctatgggagcccatagtccagggacgggagatgggcttcctcctgctccagctgggcttcgccatatttgcgctacgcatgcttcgcccagagatcgcgttgcccggttcagagccccgcccacagacgacgtacgtcagtgtaccatacagcgacttcctggccagcataaacaaggaccaggtgaagaaggttgaggtggacggggtgcatatcatgttccgactccgcccagaggtggagtcccaggtccgtgttgagcagacaccgacacagcgcggagcagattatgtcattgataatgctggagtttcaaggagaattgtgttcacgacgactcgtccagtggacataaagacaccatacgagaagatggtggaaaacatggttgaatttgggtcaccggacaagaggtctggcggcatgctcaattctgccctggtaggtcttatctatgttgtattgattgcggtagttttgcagcgcctgccaataagcttttctcagcaatcacccggtcagttgaggaataggaagaattctaattccggcggagcaaaagtttctgaaagttcggatatagttacatttgctgatgtggctggagtagatgaggcaaaagaagagcttgaagaaattgtggagttcttaaggaacccagaaagatatattcgtctcggtgctcgccctcctcgtggtgtcttattggtgggtcttccagggactggaaagacacttcttgcaaaagccgtagcaggagaagcagaagtcccattcataagttgctctgctagtgaatttgttgagctatatgtaggcatgggagcagctcgagtacgtgacctatttgctaaggccaaaaaggaatcgccatcgattatttttatcgatgagattgatgccgttgcaaaaagccgtgatagtcgatatcgcattgtcagtaatgatgaacgtgagcagacattaaaccaattgctcacggaaatggatggctttgataccaactcggctgtcattgtattgggggcaacaaatcgagctgatgttttggatcctgcccttaggcgccctgggagatttgaccgtgtggttatggttgaagctcctgataggtttggaagagaatcaattctaaaagttcatgtgaaaagaagagagcttccactgagtaaagatgtagatctagccaatattgctgcaatgacaactggttttactggagcagaccttgcaaacttggtaaacgaagctgctctgttggctgggcgattaaataaagaaatagtggaaaaggttgacttcatccgtgcggttgagcgatctatagcagggatagagaaaaagcatgcaaaattgaagggtaatgaaaaagctgttgttgcgcggcatgaagtaggtcatgcactcgtgggaactgctgtagcaaacctccttcctggacagccacgtgtggagaaattgagtatattgccaagatctggaggtgcattaggcttcacgtacacccctcccgtcacagaggatagatatttactctttgttgatgaactacgtggccgtttagtaacactactgggtgggagggcagcagaggaagttgttttagcaggacgggtttcgactggtgcacttgatgacataagacgtgctactgacatggcctacaaagctgtagcagaatacggtcttagtcagcgcatcgggccaatatcacttgctacactgtcaaatggtggtttagatgactctggtggctctccatggggaaaggaccagggacatctagttgatctcgttcagagggaagtaaaagcgcttttacagtcgtcactggaagtagctctttcagttattcgtgctaatcctgcagttttggaaggcctcggagcatacttagaagagaaagaaaaggttgaaggcgaggagcttcaagagtggctaaaatcggttgttgcatcaaaagagttgacctcttttatcagaggacagcaagagcaagttcttcagctggaagcaggctcctagcgtcaggagtatgcaccgggctcttaaaattaattacttaacaaaagtgactcagcaattagaacatacaatatgagacacaaggtatgcaatggaaaccttcatatactgggaagagacctgtggccatgtgtggtgggttgtatgaacccccacccattcatgctaagacaaaccgggtctgctaagacaaactggtcggatgcccaccctttgttcggtgaatcatgagatcgagccctatacgagaattcaggaaaaaaaaagaaaatctacatgcccgagtgaccatgtaaatatctatcattgcagttcctgaacccttgactacaaaaaaagaaatccagagatgattcatattgagctgtaacattgtacgatcaacctcaggaatattgtaagtgattcagcttcacatgttgttccatagattaggtcggtgttacacatgtaaaagattcttttttggcaatatattcttgtactcaccctattggaagttgttttcctctatataccatcctagaaatgatcaataggataatgcttatacggactatggttcctgtattgagaattgttcttcagaaat

SEQ ID NO: 128607 - DNA, 1192 bp, Zea Mays
tttatttgtaggatggaatgtcttctgacaactgccatatctttgcaggggcttgttcttctgtgttgcaattggtccatgggctggtctgattattggttttgtcacagaatactacactagcaatgcatacaatcctgtgcaagacgttgcagattcctgcagaactggtgctgtcactaatgtcattttgggtcttgctcttggatacaagtcggttatcatcccgattttcgctatcgctgttatcatctatgttagtttctccattgctgcaatgtacgacatcgcagttgccgctcttggtatgctgagcacaatcgcaactggtcttgctattgatgcttatgctcccatcagtgacaatgctggtggtattgctgagaactgatgctgttgatgctgctggcaacaccactgccgctattggaaagggatttgccattggttcagctgctcttgtgtctctggcgctttttggtgcctttgtcagcagagctggagtcaaggttgtcgatgtcctctcccccaaggttttcattggtttgattgttggagccatgcttccctattggttctctgccatgaccgtgaagagtgttggaagtgctgccctaaagatggtggaggaggtccgcagacagttcaacaccattcctgggttgatggagggaactgccaagcctgactatgcaacctattggaagatctccactgatgcttccatcaaggagatgattcctcctggtgctctggtcatgctcactcccctcattgttggaaccctcttcggtgttgagactctctatggtgttcttgctggtgccctggtttctggagtgcaaccgtcgttttctcttaacagaaaagaactataaaaacgtcgccgctgtcaaaacccagaaattacgaggcgcgaaatggaaagcttccagcagattaacgatcggctagatttgattcattccgcccgcccactacctctcacggtcacggccaatccggccaacccagagatcacgtgtcagtgctattttgtgtacaagtactacttaatatatgtttgaaaacttttttaagtgatttccaaacttgaacgggaatcattcttattcttttaaatgtctgatagtagttattgtttgtgtgacattgtactgttttgtttcttaaacaaacaccattctacaaa

SEQ ID NO: 128608 - DNA, 108 bp, Zea Mays
cagaatgtatttttgagaaatggtgaacatagtcttattgaatatttttacatgagtttctacacctatttgttaacataatatgtgttgtgttaagccagctaaaaa

SEQ ID NO: 128609 - DNA, 141 bp, Zea Mays
atgacagccaatgtagataagagcgtaaccaggcagctcatcaatcttcttccttttggacccaaactttcacggtcttgtcattgtcaagcgccccggatgcgatcatgttttccttgggatgacatgagactgcaatga

SEQ ID NO: 128610 - DNA, 485 bp, Zea Mays
aacaacagccgctatgtaagaaaacaaacgaggaactatccaaatcggaggcgaggcgaggcgaggcacccgaagaggagtggtggaaggcggcggcgcggtcggagccagagagccggcggacggcgacgaaggagccggcgctcccgtccatccctctgcctctacgcgcgggggctcatggtgtcgtgcagccggagctccaaccgcgggggcacaaggcgggcgggcagatcccgagaaggcaggagaggaacgggtagaggaggggggctattgctcggcttcgcggcggccttgcctcgccacttccgtccgttggttagttggttcgttggcgctggctccgcttcgtcgttctggttgggcggcgcagcgctgctcaggcctcaggacaatgctggtgtgtgctggacggtgcagtgctcctgccgctgctgctttggataaatcaatcaatatagggaaatgcttccggctttgcc

SEQ ID NO: 128611 - DNA, 168 bp, Zea Mays
ttgttcccatggtttgatttgaggattggatggaaagcagagtatgtgcttcctgagattcatggggctgttggcgcaggagaaccagccttcagtatgaactatagaaagttgcatgcatcgatagatcgggtcgaggctatagttactcagtcagatcggtattga

SEQ ID NO: 128612 - DNA, 342 bp, Zea Mays
atgaaccaagcacgagtggaaggaaagatctgcaccccgttgccatttcgtataataataactaggatgcaaacagcaaaagaaagaaaaatggagactagagcagaaatttcatcttcttcccccgagcgagccttttcccccacgtcggtctcaactcaacaacgcttccgttggctgcaaccttttcttgcatcttactacgcatcagccggcgcggacgagaagatgaggctcatcaggagccccaccatgagacctattagcccagcaaacgcggcgaacgtcagggagaaacctgcatcgcctttgcggctcctgcgcctccgaagcacatcctga

SEQ ID NO: 128613 - DNA, 1923 bp, Zea Mays
cccgccacgtcctctctcttcccccatcattccggccttccacacggccccaccggccattgtccctccggccctcgcgagtcgcgacctccactgcaaccgcaccgccatgatgaaaccgccggcaccggcggttccgtcgcctgagccgccgcgcctcgccggcggtgggcgtgggccgcgcggcctccgatccctgcccgcgctctcctacaacacccaccgcgccctcgtcctggggctcaccttcctggcctacgcgctctaccacgcctcccgtaaaccgcccagcatcgtcaagcgcgagctcgcccggtcgtggccgcccttcgccgacccggcgctcctcggcgccacggacgtcgccttcctcacctcctattccctcggcatgttcgtcgccggccacctcggcgactgcctcgacctccgccgcttccttgccttcggcatggtcaccagcggcgccgcggtggcgctcttcggcgccgggtacttcctaggccagcattcgctcgcgttctacgtcgtcgcccaggtgattgcgggcctgctccagtccacgggctggccctccgtcgtcgccatcgtgggcaactggttcagcggccggaggcgtggcctcatcatgggcatatggaacgcgcacacctcggtggggaacatcaccggatcgcttgtcgccgcagccatgcttgggtacgggtggggatggtcgttcgtggtccccggtggtctcattgcgctcggtggcgtcctcgtgctgttcttcctcgcgccatacccccagtacgtcggcttcggcccgtcgccgattgaagaacctgtcactgatgagagcaccgacggggaggacattagtgccgcagggaaggacagacgggatgccgtcggaatttttaaggcactggccattcccggtgtcgtcatcttcgcgctctgtctcttcttcgccaaactagttgcgtacacttttctgtactggctcccattctacttgagccagactgctattggagacgagcatatgtcagctgcatctgcaggatatctatcagttttgtttgatgtaggtggaatagttgggggagttctggccggcttcatatctgaccagcttaatgctagggcaaccactgctgccgttttcatgtacttggcgattccatctcttttcctctttcatgcatatggtagtacctcaaaagcgacaaacattggcttgatgatgatcagtggcctgtttgttaatggaccctatgctctgataacaaccgctgtttctgctgatttgggaactcacaaatctcttaaaggagattctcgcgcattggccacggtaaccgcaattatagatgggacaggatctcttggtgctgcactaggaccattcataacgggcttcatttcaagaaaaggatgggatttagtattcacaatgcttgcactctgtgcactggttgctgctgtgctgttgtcaagtcatgtgaaaacagaaattcctcagatcatccagaagtggagagatcgctcgactaacgcgcagaatggaaatgcagatcctggtgttcagccacttctagtggacgaaagttgacggggagatctttcggtgcggctcctagtgcgacacagttttgtagtgttgttgtgaggcagtgtgatggttctggagaaaagacaaatcagacgatgacgaggaaacggtttctgtccctaatgcttattgatctgagcaaacaaacatgagcgggatacaatctattttctcaaaaatgatggtatagtccattgtagatttgcagtagaatctttagatacaccaatatgttgtgtaagaatatactgtgtatctttacgcatatcagctgtacttcaggggtttagatgaacctaggaagatggaacaatgacttgacagtg

SEQ ID NO: 128614 - DNA, 77 bp, Zea Mays
ctggttttttcacatctcttcgctgttctttactgcatccttctcctcccttctgtctgcttccaccatgggcaagg

SEQ ID NO: 128615 - DNA, 1099 bp, Zea Mays
actgctcgagctcagctcaaggaaccacagaaaatggcgtcacttctccgccctctcgtcctcgtgctcctgatcgcctcctgcgcagcgcagcagtcaccgccggcgcagcccccgccaacgccgaacgcgccaccggccaactcgccgccccaggcgcctccagccggcaacccgccgccggcgccccaggcgccgccggcaggcaacccgccacccgcgcccaccgccactccacctccggccccgaccactccgcccccggccccgaccactcctcccccggctcccacaacgccgcccccggcgccgacaactccacctccggcccccaccacgccgcctccgtccccaccggcgtcgccaccgcccgctcccaccactccgccaccgtctcccccggcaagcccgccgcccgctcccgccaccccgccaccgtctccgcccatggcgccacctcccgccacgccccctccacccgccaccccgccgccaccggccgcgcccacgccggccccgagcgtggccccgactcccccgcccgtggcgacaccggctgcgtcccccaagagccccaagacgccgagccccgccgccgcgacgtccccggcgccctcgctctcgcccgcgggcacgccgacgaacgaagactcgggtgcaagcgcgcgcgcggtcggcttcgccacggtggtggcgttggcgggcgcgggcctcgccgtcttgctttgagtagtagactccgactcttcttcctgtcctcactagtcacgccgatgttgtcaccccctccgcgtgcctcgacgttgctgctcgctccatttcagtttcatcttttttttttcctttggtgttgttatttaattttaccggccctacgatcgattcttgatgtacgacgacgacgatgatgatgcattggttgctttggatccgcgggcggcggggcgggtggtggttagtgttctgcccgcgggtgtcgactcgccacgccatgtacttttaccgcactacattttggttctatagagagaggatttgtgtacattctcgtgcattatttctatggccgttgaataaaatctctgtgcagattcactcg

SEQ ID NO: 128616 - DNA, 1333 bp, Zea Mays
gatggatgaagtataatataaagtcggtaggggttacctaagtattttatcgttccaccccaaacctccgacgttttgcatctccaagcagcatcgtctcctccccagatccatcaattcgttcggaccgcccttctcgtgtccccgttccaaagcgcggcaggctgagcggttccgtcagatttgagtcgtcatgaatcccgagtatgattaccttttcaaacttctgcttatcggtgattctggtgttggaaaatcatgcttgcttctcagatttgcagatgattcatatctggacagctacatcagcacaattggagttgactttaaaattaggacagtagagcaagacgggaagaccataaagcttcaaatttgggatactgctggacaagagcgcttcaggacaatcactagcagctactaccgcggagctcacggaatcattattgtatatgacgtgacagaccaagaaagcttcaataatgtgaagcaatggttaaacgagattgaccgttatgcaagtgacaatgttaacaagctccttgttgggaacaagagcgatctaactgctaacaaagttgtggcaaccgagacagcaaaggcgtttgctgatgagatgggcatcccattcatggagacgagtgccaaaaacgccatcaatgtggagcaggccttcatggctatggctgcatccatcaaggacaggatggccagccaaccagctgcggctaacgcaaggccagcgaccgtgcagatccgcggtcaacccgtcaaccagaagacgtcttgctgctcatcctaaggttgcctgatttttttttgtactttgtgtaaactcaaacacacaactactaccttttgtgtgcgcttgcaaatgtatttgcattattttcagaagacgctgctgatagcatctattcattgatcggacgattagggctagcttgtcgaactccatttttccaagggatttctatttttctaagagaaattatttttattttttcttaaaaaaataagattttttttggaaaaatggagttaccaaactagctattagggagctgcaaatatgtaagcaggtacttggtgcactctcgactttccattcctttctaccctatcatacagcttcaccgtttataagccacgaattgcatttgtgaacaaccctctgatttggttttggtgattcaggataatatgatgtgacttttgcagtatgtttgtttggctttaatcggtacttgtttctttgtttttgtctttatggaatatagctgcaacagttcgatcaactggctttctttgtttttgtctttatggaata

SEQ ID NO: 128617 - DNA, 1577 bp, Zea Mays
gatggatgaagtataatataaagtcggtaggggttacctaagtattttatcgttccaccccaaacctccgacgttttgcatctccaagcagcatcgtctcctccccagatccatcaattcgttcggaccgcccttctcgtgtccccgttccaaagcgcggcaggctgagcggttccgtcagatttgagtcgtcatgaatcccgagtagtaaggcctccgattatccttcccttctcttccgagcccgtcaccgtgatctattcggtcggattttcggttgctgctttgggcctgtggttgcgtggttctctgatggaacttacagggatctgatcaggcgcgtgctagtggctctcattagcttccgatctggatctcggaatttgtggtttctattgggatttcgtgaatggaagggcctcctgcggccggcgctgctttggtcctactttgattaccttttcaaacttctgcttatcggtgattctggtgttggaaaatcatgcttgcttctcagatttgcagatgattcatatctggacagctacatcagcacaattggagttgactttaaaattaggacagtagagcaagacgggaagaccataaagcttcaaatttgggatactgctggacaagagcgcttcaggacaatcactagcagctactaccgcggagctcacggaatcattattgtatatgacgtgacagaccaagaaagcttcaataatgtgaagcaatggttaaacgagattgaccgttatgcaagtgacaatgttaacaagctccttgttgggaacaagagcgatctaactgctaacaaagttgtggcaaccgagacagcaaaggcgtttgctgatgagatgggcatcccattcatggagacgagtgccaaaaacgccatcaatgtggagcaggccttcatggctatggctgcatccatcaaggacaggatggccagccaaccagctgcggctaacgcaaggccagcgaccgtgcagatccgcggtcaacccgtcaaccagaagacgtcttgctgctcatcctaaggttgcctgatttttttttgtactttgtgtaaactcaaacacacaactactaccttttgtgtgcgcttgcaaatgtatttgcattattttcagaagacgctgctgatagcatctattcattgatcggacgattagggctagcttgtcgaactccatttttccaagggatttctatttttctaagagaaattatttttattttttcttaaaaaaataagattttttttggaaaaatggagttaccaaactagctattagggagctgcaaatatgtaagcaggtacttggtgcactctcgactttccattcctttctaccctatcatacagcttcaccgtttataagccacgaattgcatttgtgaacaaccctctgatttggttttggtgattcaggataatatgatgtgacttttgcagtatgtttgtttggctttaatcggtacttgtttctttgtttttgtctttatggaatatagctgcaacagttcgatcaactggctttctttgtttttgtctttatggaata

SEQ ID NO: 128618 - DNA, 1240 bp, Zea Mays
gcttgtgtcgacataaatcaaatttttgattaccttttcaaacttctgcttatcggtgattctggtgttggaaaatcatgcttgcttctcagatttgcagatgattcatatctggacagctacatcagcacaattggagttgactttaaaattaggacagtagagcaagacgggaagaccataaagcttcaaatttgggatactgctggacaagagcgcttcaggacaatcactagcagctactaccgcggagctcacggaatcattattgtatatgacgtgacagaccaagaaagcttcaataatgtgaagcaatggttaaacgagattgaccgttatgcaagtgacaatgttaacaagctccttgttgggaacaagagcgatctaactgctaacaaagttgtggcaaccgagacagcaaaggcgtttgctgatgagatgggcatcccattcatggagacgagtgccaaaaacgccatcaatgtggagcaggccttcatggctatggctgcatccatcaaggacaggatggccagccaaccagctgcggctaacgcaaggccagcgaccgtgcagatccgcggtcaacccgtcaaccagaagacgtcttgctgctcatcctaaggttgcctgatttttttttgtactttgtgtaaactcaaacacacaactactaccttttgtgtgcgcttgcaaatgtatttgcattattttcagaagacgctgctgatagcatctattcattgatcggacgattagggctagcttgtcgaactccatttttccaagggatttctatttttctaagagaaattatttttattttttcttaaaaaaataagattttttttggaaaaatggagttaccaaactagctattagggagctgcaaatatgtaagcaggtacttggtgcactctcgactttccattcctttctaccctatcatacagcttcaccgtttataagccacgaattgcatttgtgaacaaccctctgatttggttttggtgattcaggataatatgatgtgacttttgcagtatgtttgtttggctttaatcggtacttgtttctttgtttttgtctttatggaatatagctgcaacagttcgatcaactggctttctttgtttttgtctttatggaatatagctgcaacagttcgatcaactggctttaatccgaagaatagtctataagctttgtttgtttgttcgaaaagctagaagaccaaaaa

SEQ ID NO: 128619 - DNA, 1617 bp, Zea Mays
cacgcacatgtaccgtgtggtcaaagaaagcctccaggtcggcgtagctggttccgctatcaaacagtccatccgcggcggccggaccgccggagccaccgcttgccttgtacgaagctcattccgggcaggggtcaggccgcacggaacggcggaggtcaaatcgaacgaacacgctttggtcatcacgggcctccccgtgtctccgtcgcgcaccgaagcaaacgcgcggccaacggccatcgacgacccacgcgggacgcgcacacgcggctttcgctccgcgaccgcgagcctcggctcgggctctcgaatccaccgactcgctctgagtctctgaccgccccttccgtcgtccccgttcgaaggcgcggcaagcgagcgattcagccagattcgattcgacatgaatcccgagtacgactaccttttcaaacttctgcttattggtgattctggtgttgggaaatcatgcttgcttctcagatttgcggatgattcatatttggacagctacatcagcacaattggggttgattttaaaattcggacagtagagcaagatgggaagaccataaaacttcaaatttgggatactgctgggcaagagcgcttcaggaccatcactagcagctactaccgtggagctcatggaatcattattgtatatgacgtgacagaccaagaaagcttcaataatgtgaagcaatggttaaatgaaattgatcgttatgcaagtgacaatgttaacaagctccttgttgggaacaagagcgacctaactgccaacaaagttgtggcaactgagacagcaaaggcatttgctgatgagatgggcatcccgttcatggagacgagtgccaaaaacgccaccaacgtggagcaggccttcatggctatggctgcatccatcaaggacaggatggccagccaaccagccgcggccaacgcaaggccagcgacggtgcagatccgcgggcaacccgtcaaccagaagacgtcttgctgctcgtcttaagcttgcctgatttctctggttccttgtgactattactaccgtttgtgcgagcatgcaaatgtatttgttgcattattgctgatagcatctgttcgttggccagatgagtagagagctgaaaaaatgttaagaacaccatagagagaagtctatccgtgctctctcaacttaaggagcaaacagcaagacttcattttttttctactttactgtttattagtcgcgttacatttgtgaacagttattgtaatgtctttttttttaactctgtattcgtagtgagatgaaatgcgtgtgtgggcaacaaatttcctttttggctagttgagtggtcttatcattgtgcccggtgacggtgacggtgcctctgtcctgtggccttgcaatggtctgtgggcttcgagtgggtgtgatactgatacgccctctagtgcgtttttgacatggagaagaacgccgcttggcccaccaccaccgccaattgctgtgtcctctgtggtgtgtcagcgcgagataacgtttgacaggcgaagcgatgttggggcacatgcgcaccaccgctgatcgtgaggcactgaaaatttcaaaaaaaaaaaaaa

SEQ ID NO: 128620 - DNA, 1698 bp, Zea Mays
cgcacatgtaccgtgtggtcaaagaaagcctccaggtcggcgtagctggttccgctatcaaacagtccatccgcggcggccggaccgccggagccaccgcttgccttgtacgaagctcattccgggcaggggtcaggccgcacggaacggcggaggtcaaatcgaacgaacacgctttggtcatcacgggcctccccgtgtctccgtcgcgcaccgaagcaaacgcgcggccaacggccatcgacgacccacgcgggacgcgcacacgcggctttcgctccgcgaccgcgagcctcggctcgggctctcgagtatttatcattccgccccttgaatacatcacgtttgcatctctaaccacctgcgctgcgctcgcgtctctcgtccccctcagatccaccgactcgctctgagtctctgaccgccccttccgtcgtccccgttcgaaggcgcggcaagcgagcgattcagccagattcgattcgacatgaatcccgagtacgactaccttttcaaacttctgcttattggtgattctggtgttgggaaatcatgcttgcttctcagatttgcggatgattcatatttggacagctacatcagcacaattggggttgattttaaaattcggacagtagagcaagatgggaagaccataaaacttcaaatttgggatactgctgggcaagagcgcttcaggaccatcactagcagctactaccgtggagctcatggaatcattattgtatatgacgtgacagaccaagaaagcttcaataatgtgaagcaatggttaaatgaaattgatcgttatgcaagtgacaatgttaacaagctccttgttgggaacaagagcgacctaactgccaacaaagttgtggcaactgagacagcaaaggcatttgctgatgagatgggcatcccgttcatggagacgagtgccaaaaacgccaccaacgtggagcaggccttcatggctatggctgcatccatcaaggacaggatggccagccaaccagccgcggccaacgcaaggccagcgacggtgcagatccgcgggcaacccgtcaaccagaagacgtcttgctgctcgtcttaagcttgcctgatttctctggttccttgtgactattactaccgtttgtgcgagcatgcaaatgtatttgttgcattattgctgatagcatctgttcgttggccagatgagtagagagctgaaaaaatgttaagaacaccatagagagaagtctatccgtgctctctcaacttaaggagcaaacagcaagacttcattttttttctactttactgtttattagtcgcgttacatttgtgaacagttattgtaatgtctttttttttaactctgtattcgtagtgagatgaaatgcgtgtgtgggcaacaaatttcctttttggctagttgagtggtcttatcattgtgcccggtgacggtgacggtgcctctgtcctgtggccttgcaatggtctgtgggcttcgagtgggtgtgatactgatacgccctctagtgcgtttttgacatggagaagaacgccgcttggcccaccaccaccgccaattgctgtgtcctctgtggtgtgtcagcgcgagataacgtttgacaggcgaagcgatgttggggcacatgcgcaccaccgctgatcgtgaggcactgaaaatttcaaaaaaaaaaaaaa

SEQ ID NO: 128621 - DNA, 89 bp, Zea Mays
tgcattggtgattcggaaacaagatccaaaaactgtgtccgtctcacggtggtccgagcatttctactttttgaatatcagattatgag

SEQ ID NO: 128622 - DNA, 2039 bp, Zea Mays
ccgtgtcacctcacatttcggaagctagctagctctgccctctgctcggggctcctccttcccagtaacaactaacaagtctacacacaggggacaccacaagtacatcgccaccgacggaggaggaacaacaagaaccccgatgacaattgcagccgcggtgaccgcgcccacgtccgcgccagtgcacgtcgcgccgcgccacgccagccccgcggtccagccgcgcgccgcgccgcgcagggagccgtcgccgctcaaccccaacgcgccggcgcaggcgctccgctcggccagccccggcggcggcgggtcttccgcggccccggacggcgccagggctcacatcgccaaccttgacaaggtgctcgggaagccgccgcaggtgccgaggcccgcgagccacgccgccgcgagcaggcagggccagggccagggccaggacggcgagcaggagccgctcaacgtccggcacggcctgctcaacgcgctcaacctctccttcttcgtgcccatgcccgggatgcgggcgcggacggccgccgacgagcacatgtcgccgcgcagcctcatgcacatgcagcagctcctctccgccgactccccgcgggcctccccgcggtgcaccatcgcgccgcgctggcgcagcctccacggggagggcggctgggagggcctgctcgacccgctggactccgacctccgccgcgagctcctccgctacggcgacttcgtgcaggccgcgtaccaggccttccactcgctgcccaccgcgtcggcgaggcaccgcggcctcatgctccccgaccgctcctaccgccccacgcgcagcctcttcgccacctccgcgctgtccatgccgccgtgggccaagcgccccaacacgcccgagtggctcacgcagcagtccaactgggtcggctacgtcgccgtctgcgagtcggagcgggaggtcgcccgcatgggccgccgcgacatcgccatcgtgctgcgcggcaccgccacctgcctcgagtgggccgagaacctccgcgcctcgctcgtgcccctcgacggcggcgacagcagcgacggcgccgacacgccgccgccggagccagagcccaaggtggcgcggggcttcctcagcctctacaagacggccggggacaaagtcaggagcctgtccgaggaggtcatggacgaggtgcgccgcctcatggacaagtacaagggcgaggagctcagcatcacggtcgtcggccacagcctcggcgccgccctggcgctcctcgtggccgacgaggtcgccacctccatccccgacgcgccccccgtcgccgtcgtctccttcgggggccccaaggtgggcaacgccgcgttcgtcgataggctcgccagcagcggcaaggtcaacgtcctccgcatcgtcaacgccggcgacgtggtcaccaaggtgcccggggtggcgccgcggctgcccaacaagaaggagcagtaccagcacgtgggcgcggagctccggatcgacagcaagaactcgccgtgcctccgcccggatgcggggcccgcctgccgccacgacctggaggcgtacctgcacctcatcgacggcttcaccgggacggggcgcccgtttcggcacgacgcgcgccgcagcgtcatccgcctcctgcagctgcagaggggcaacgtcaagaaggagtacgtgaaccgggcgcgcgagctcggcgtcgaccccgccgcgccggcggacgtcagccggagcatggcgtacgggaactgcgccgtcgccagcccctcgtgagggatcaaattattattacgtctccttcggtggaccgtcatgtaaattttgtaggagggaaagaagaattctttcgttagttgccggtgcgatccgggaaagatctcccgtcttccgtttcgtttcgttttgacatcgatgcatgtacaggaccaaaaaaaaaaaacaggcaagccgcaagcgcaagtgcgtgcgcagcccaatcaataagtgaaagcgtgtcttgatgtgttctttgacgggtgccccattg

SEQ ID NO: 128623 - DNA, 1308 bp, Zea Mays
ctcaaagacgtcctttcgcagttggcacacatcagagtcctaccaagtggcaccaaagctcgttctcccgaccccgactgtccccaatgcgcagtccgcgaggcctcctcaccgcctccggctaccttgcgggccggcacgctccgtcgccctccgtgtccaccactggccacaactccctactcgctcgcaccttccaaatcctagcccagccggagtccgtccgtctgcagaagcacccggcacccaactccgggatcttagagctgaggctggagcggccggaagtcaagaacgccattaattgggatatgatgaggatgctgcggagcgccatagagaagattcaggccgacacgacggcgaaggtcgtccttgttgcgagctccgtgccgggggctttctctgcaggcgccgatctcaaggaaaggaggctaatgagttcttctgacgttggggggtatgctagatccttgaggtctacattttcgtcttttgaggcacttcctattccaacaattgctgtcattgaaggagctgcccttggtggtgggctagaactggctttggcgtgcgatcttcgaatatgtggagaaaatgctgaacttggactgccagaaacaagccttgctattatacctggagctggtggtacgcaacgccttcctaggatcatagggaggtccagagcaaaggaactgatattcactggccgcagatgtggtgcagctgaagctgtaacgatggggttagcaaactattgtgttccagcaggagaggcttaccagaaggctcttgacattgcctgtgagataacccagaagggtcccatggggataagaatggcaaagaaggcgatcaatgagggggcagaggttgccgacatgtcctcggcgctggctatcgaaggggagtgctacgagcagctgctttacacgcaggatcgcgttgaggccctagctgcatttgctgagaagaggaagcctgtgtacacaggaaagtagtagtgtcagaaaggatgataatcgtcttgagagtctgctacaagcagagatggtggcaatggataccccaaatccatacatccaatagccgggtgtggaataaattctttatcatagatacgttaatgggtacaatattatacccatcagtagacgggtgcaagatggatgcgggtatagatatatattagctatctatgggtaatttttacccacctcatctatatatataatctactcaattaagtacatataaatatatattagctaaaaataaaatcaacttacatatctctacaacact

SEQ ID NO: 128624 - DNA, 1369 bp, Zea Mays
gtgtcaatccatacgatcgtatctaaagatgccagttgcgtctgtctccctccattcttgcccatctctacctgacacggcgacagatcgtcagttcgtcaccgcccaatcagtctcccagcatttaccggctcctccgcacctgctgctccagttccagctctcccaacaccaacatgctcggcctccggcgcctccccgctgtctccggccgcctcgcgccggaggtcacctccgtctctgcggcctcctcccacagcgccgtcttctttcgcaccctccaaatcctcgtccagcaggggcccgtccgcctccaaaagctctctgctccggacaccgggatcgtggagctgaggctggagcggccggaggccaagaatgccatagggaaggagatgctccaggggctgcggagcgcgatccaggaggtggaggccgacacggctgcaaacgtcgtcttggtgacgagctcggtgcccaaggttttctgcgcgggcgctgatctcaaggaaaggaggttgatgggtcctagtgaagttcgggacttcgttaattccttaaggtctacattttcatcctttgaggcactgtctattcctacaattgctgttgtcgaaggggttgcttttggtggcgggttagaattggctctgtcatgtgatcttcgcatatgtggcaaggatgcaaaattcagtttgccagagactggccttgctattatcccaggtgctggaggaacacagcgccttcctaggattgttggaaggtcaagagcaaaagaactaatattcactggtcgtagattcgatgcggtggaggctgtaactatgggagtagtaaactactgtgttcctgccggcgacgcttatcaaaaggctcttgaacttgcgcgggagataaaccagaaaggcccgttagcagtaaaaatggctaagaaggccatcgatcaaggggcagaggtagacttgccctcagcattggccgttgaagaagaatgctaccagcaagtcctgcacactgaggatcgtcttgagggtctagccgcattcgccgagaaaagaaagcctatatataaagggaagtagggccgtgtatggtcttagattcataataatagaaagtcgcattaacatgccatccaataatagtggcatgattgcatgacattgatatgtgcaaattcatgtctctctgtaactttcaggaaataagataagatgtatcagcgctgctacctatgtgttctgaacgaggtgaatttggctgcggctttagacttaagatagacagattagacagctgggctgattggagtccatttcccttacgaatgtgagatttgagttggacctcaataatcattactgat

SEQ ID NO: 128625 - DNA, 1317 bp, Zea Mays
gtcaatccatacgatcgtatctaaagatgccagttgcgtctgtctccctccattcttgcccatctctacctgacacggcgacagatcgtcagttcgtcaccgcccaatcagtctcccagcatttaccggctcctccgcacctgctgctccagttccagctctcccaacaccaacatgctcggcctccggcgcctccccgctgtctccggccgcctcgcgccggaggtcacctccgtctctgcggcctcctcccacagcgccgtcttctttcgcaccctccaaatcctcgtccagcaggggcccgtccgcctccaaaagctctctgctccggacaccggtctggatcgtggagctgaggctggagcggccggaggccaagaatgccatagggaaggagatgctccaggggctgcggagcgcgatccaggaggtggaggccgacacggctgcaaacgtcgtcttggtgacgagctcggtgcccaaggttttctgcgcgggcgctgatctcaaggaaaggaggttgatgggtcctagtgaagttcgggacttcgttaattccttaaggtctacattttcatcctttgaggcactgtctattcctacaattgctgttgtcgaaggggttgcttttggtggcgggttagaattggctctgtcatgtgatcttcgcatatgtggcaaggatgcaaaattcagtttgccagagactggccttgctattatcccaggtgctggaggaacacagcgccttcctaggattgttggaaggtcaagagcaaaagaactaatattcactggtcgtagattcgatgcggtggaggctgtaactatgggagtagtaaactactgtgttcctgccggcgacgcttatcaaaaggctcttgaacttgcgcgggagataaaccagaaaggcccgttagcagtaaaaatggctaagaaggccatcgatcaaggggcagaggtagacttgccctcagcattggccgttgaagaagaatgctaccagcaagtcctgcacactgaggatcgtcttgagggtctagccgcattcgccgagaaaagaaagcctatatataaagggaagtagggccgtgtatggtcttagattcataataatagaaagtcgcattaacatgccatccaataatagtggcatgattgcatgacattgatatgtgcaaattcatgtctctctgtaactttcaggaaataagataagatgtatcagcgctgctacctatgtgttctgaacgaggtgaatttggctgcggctttagacttaagatagacagattagacagctgggctgattggagt

SEQ ID NO: 128626 - DNA, 1561 bp, Zea Mays
gtcaatccatacgatcgtatctaaagatgccagttgcgtctgtctccctccattcttgcccatctctacctgacacggcgacagatcgtcagttcgtcaccgcccaatcagtctcccagcatttaccggctcctccgcacctgctgctccagttccagctctcccaacaccaacatgctcggcctccggcgcctccccgctgtctccggccgcctcgcgccggaggtcacctccgtctctgcggcctcctcccacagcgccgtcttctttcgcaccctccaaatcctcgtccagcaggggcccgtccgcctccaaaagctctctgctccggacaccggtctgtctgtaccgaccccatctcaacgaaattttgcatttgcttgtaggcccagggattgtgtttcccagctgtgattcgttggttacagggatcgtggagctgaggctggagcggccggaggccaagaatgccatagggaaggagatgctccaggggctgcggagcgcgatccaggaggtggaggccgacacggctgcaaacgtcgtcttggtgacgagctcggtgcccaaggttttctgcgcgggcgctgatctcaaggaaaggaggttgatgggtcctagtgaagttcgggacttcgttaattccttaaggtctacattttcatcctttgaggcactgtctattcctacaattgctgttgtcgaaggggttgcttttggtggcgggttagaattggctctgtcatgtgatcttcgcatatgtggcaaggatgcaaaattcagtttgccagagactggccttgctattatcccaggtgctggaggaacacagcgccttcctaggattgttggaaggtcaagagcaaaagaactaatattcactggtcgtagattcgatgcggtggaggctgtaactatgggagtagtaaactactgtgttcctgccggcgacgcttatcaaaaggctcttgaacttgcgcgggagataaaccagaaaggcccgttagcagtaaaaatggctaagaaggccatcgatcaaggggcagaggtagacttgccctcagcattggccgttgaagaagaatgctaccagcaagtcctgcacactgaggatcgtcttgagggtctagccgcattcgccgagaaaagaaagcctatatataaagggaagtagggccgtgtatggtcttagattcataataatagaaagtcgcattaacatgccatccaataatagtggcatgattgcatgacattgatatgtgcaaattcatgtctctctgtaactttcaggaaataagataagatgtatcagcgctgctacctatgtgttctgaacgaggtgaatttggctgcggctttagacttaagatagacagattagacagctgggctgattggagtccatttcccttacgaatgtgagatttgagttggacctcaataatcattactgataaaagtaagcccaaataccgctgtgagattgttaaaattagcatcgagacagtgtttaagggcatgcacaatcacattgattctatccatagctcattgattc

SEQ ID NO: 128627 - DNA, 836 bp, Zea Mays
attctgactttattgaaacataaaggatgttgtatcaatctttatatctgagtggcatatcacggtgaaattaccttgtgaattatttggaggtctagattcaaatgacattttcagcccttgacatccatttgatacaatatacagtgctggaggaacacagcgccttcctaggattgttggaaggtcaagagcaaaagaactaatattcactggtcgtagattcgatgcggtggaggctgtaactatgggtcagtttaacgtcctgagatctgcttcctgctgttacgacttcttcctcaagggcaacttttatcgattctttgaagggtcatgtatgctcacattgcaggagtagtaaactactgtgttcctgccggcgacgcttatcaaaaggctcttgaacttgcgcgggagataaaccagaaaggcccgttagcagtaaaaatggctaagaaggccatcgatcaaggggcagaggtagacttgccctcagcattggccgttgaagaagaatgctaccagcaagtcctgcacactgaggatcgtcttgagggtctagccgcattcgccgagaaaagaaagcctatatataaagggaagtagggccgtgtatggtcttagattcataataatagaaagtcgcattaacatgccatccaataatagtggcatgattgcatgacattgatatgtgcaaattcatgtctctctgtaactttcaggaaataagataagatgtatcagcgctgctacctatgtgttctgaacgaggtgaatttggctgcggctttagacttaagatagacagattagacagctgggctgattggagt

SEQ ID NO: 128628 - DNA, 1320 bp, Zea Mays
gtgcgtactgtcttcaggttcaggcccaaccgcccaggtaggcttccaggccgtgcgccgcgtgggcggcatgccggcatggcaaatcggttccgaaccgaatcttaaaaaaatgaatgcccagtctctactcagcctgcgttcgcgccttttccattttcaccccccgattccgatcgcttttcaccgccgcctctgttccttcgctagtcgacaggccccgcttccgctctcctcttccaccggccaccgccgcgcgccgagaagatggggaagcggtggatcccactggaggccaacccggacgtcatgaaccagttcatatggggtctgggagtctccgagagggctgtgcagttctgcgacgtctacggcctggacgacgagctgatcgccttggtgccccatcccgttctcgcagtcctcttcctctacccgttcacctccctggacgaggagaataaagaagaatcaagtgtttctgccaaatcgaccgcagggggcaaggatttgagcaagaaggtatactttacaaagcagactattggcaatgcttgtggaacaattggtgttattcatgcaataggaaatgcaacatctcaaatcaagctagttgagggttcctattttggaaagttctataagcaaacagctgatatggatccagtccagcgtgctgccttccttgaggaagatgatgagatggaggatgcacattctattgctgcatctgctggtgacactaatattaatcttgatgttaatgtacactttgtatgtttctcttgtgttgacggtgaactttacgagcttgatggactaaaatcacaacccacaccccatggcccatcatcacctgaaaccttgttgcaggatgctgcagaagtcatcaaagctagaattgcggagaaccctaactcgatgaacttcaatgtcatggccctttcaaagaagtgaagtatactgtgatgggtggatttcatttggcagaatacgggtcccttttcttttcagttctgctgagtactgcaccgagtggaaggtttgcacagggaaacaaagatagggaaaaatgttgactcgatgtattatcgtgccttcttgatggatagagaaatggtggttcacgatttcacctttttcctgcttacttatagctattcaccatgctaagtttcatgatggtttcatgcacatttaataatgtgttatatcatcattttagacgacatggcatagtatttaagataaataagtttcatagataaaattagttttatagggatgaaatcatgtcaactcgtttaaaggtattgaaaa

SEQ ID NO: 128629 - DNA, 1212 bp, Zea Mays
attcgatccgttcccttgccctaagacccacccctgatttcatttccccaatcatggcggcggctctgtcggggacggcggtgtccacggcagcgcttctagccccaatccgagctccaaccagcgcgtttatccggcgctcccagctcacctgtcatcgcctccactcactaaaatgccgccgcgctgggtccatcgtccccgcggccgctgctgccgcggcgggcagcagctcgccgtcgtcagccgttttccacggcgagtgcttcgtggtgggcgacaatatcgacaccgaccagatcatccccgccgagcacctcactctggtgccctccaagccggacgagtaccgcaagctcggttccttcgccttcgcggggctcccatccgcggcctacccgacgccgttcgtcgctccgggtgaggagtcctcccgctacgccatcattgtcggcggagccaacttcgggtgcggttcctctcgcgagcacgcgcccgtcgcgcttggggccgctggcgcacgcgccattgttgcggagggctacgcgcgcatcttttttcgcaactccgtggccactggagaggtgtaccctctggagctcacggacgttggggcctggaaggagtgcaagacaggggatgtggtcaccgtggaccttgctaactccgtttttattaaccacacctctggcaaggagtacaagctgaaaccaattggtgatgctggccctgtaattgaggcgggagggatctttgcctacgcccggaagacaggaatgattgcgtcgaaagctgctgcatgagggaaaggtatttctttggatttgtcgtcgctttctacatacatagaatccggaggatctgcatatactccactttaaagatgaagaaaacctgatcagcttatgcagccgagcctctgcggagatgaagaagtaagctggagttaggactaagagttactgcacctacttgatgtcgacggtgtctcaaaataagttgcggcctaccgaaattatgatgaatcaatcaatttggtctttgtcacagatcgtttttttttgttactagtacttgtacaattgtactcctgcctgctactgttcttatctgtttgaataactgctctgttgccatcttatgtgtacaactcttgaaactcgctgccgttcgatgtatttgagcttttggtatgcaactcttgaaaatggt

SEQ ID NO: 128630 - DNA, 1125 bp, Zea Mays
attcgatccgttcccttgccctaagacccacccctgatttcatttccccaatcatggcggcggctctgtcggggacggcggtgtccacggcagcgcttctagccccaatccgagctccaaccagcgcgtttatccggcgctcccagctcacctgtcatcgcctccactcactaaaatgccgccgcgctgggtccatcgtccccgcggccgctgctgccgcggcgggcagcagctcgccgtcgtcagccgttttccacggcgagtgcttcgtggtgggcgacaatatcgacaccgaccagatcatccccgccgagcacctcactctggtgccctccaagccggacgagtaccgcaagctcggttccttcgccttcgcggggctcccatccgcggcctacccgacgccgttcgtcgctccgggtgaggagtcctcccgctacgccatcattgtcggcggagccaacttcgggtgcggttcctctcgcgagcacgcgcccgtcgcgcttggggccgctggcgcacgcgccattgttgcggagggctacgcgcgcatcttttttcgcaactccgtggccactggagaggtgtaccctctggagctcacggacgttggggcctggaaggagtgcaagacaggggatgtggtcaccgtggaccttgctaactccgtttttattaaccacacctctggcaaggagtacaagctgaaaccaattggtgatgctggccctgtaattgaggcgggagggatctttgcctacgcccggaagacaggaatgattgcgtcgaaagctgctgcatgagggaaagatcagcttatgcagccgagcctctgcggagatgaagaagtaagctggagttaggactaagagttactgcacctacttgatgtcgacggtgtctcaaaataagttgcggcctaccgaaattatgatgaatcaatcaatttggtctttgtcacagatcgtttttttttgttactagtacttgtacaattgtactcctgcctgctactgttcttatctgtttgaataactgctctgttgccatcttatgtgtacaactcttgaaactcgctgccgttcgatgtatttgagcttttggtatgcaactcttgaaaatggt

SEQ ID NO: 128631 - DNA, 1120 bp, Zea Mays
attcgatccgttcccttgccctaagacccacccctgatttcatttccccaatcatggcggcggctctgtcggggacggcggtgtccacggcagcgcttctagccccaatccgagctccaaccagcgcgtttatccggcgctcccagctcacctgtcatcgcctccactcactaaaatgccgccgcgctgggtccatcgtccccgcggccgctgctgccgcggcgggcagcagctcgccgtcgtcagccgttttccacggcgagtgcttcgtggtgggcgacaatatcgacaccgaccagatcatccccgccgagcacctcactctggtgccctccaagccggacgagtaccgcaagctcggttccttcgccttcgcggggctcccatccgcggcctacccgacgccgttcgtcgctccgggtgaggagtcctcccgctacgccatcattgtcggcggagccaacttcgggtgcggttcctctcgcgagcacgcgcccgtcgcgcttggggccgctggcgcacgcgccattgttgcggagggctacgcgcgcatcttttttcgcaactccgtggccactggagaggtgtaccctctggagctcacggacgttggggcctggaaggagtgcaagacaggggatgtggtcaccgtggaccttgctaactccgtttttattaaccacacctctggcaaggagtacaagctgaaaccaattggtgatgctggccctgtaattgaggcgggagggatctttgcctacgcccggaagacaggaatgattgcgtcgaaagctgctgcatgagggaaagcttatgcagccgagcctctgcggagatgaagaagtaagctggagttaggactaagagttactgcacctacttgatgtcgacggtgtctcaaaataagttgcggcctaccgaaattatgatgaatcaatcaatttggtctttgtcacagatcgtttttttttgttactagtacttgtacaattgtactcctgcctgctactgttcttatctgtttgaataactgctctgttgccatcttatgtgtacaactcttgaaactcgctgccgttcgatgtatttgagcttttggtatgcaactcttgaaaatggt

SEQ ID NO: 128632 - DNA, 1224 bp, Zea Mays
ataaatataaatggagttctttgtgtcaaatgaacgctagctgaaccctagccggcggatctccgcgggcggcagtcaggagtggaggcgtggtcgcacgggcgaggtcgcaataggagaggctcagagagatggggcggccttacgcggtgaaggggcggaagaagaagcgcaagctcgaggaggcggcggcggcctcggacgctgccccgcccgtcgaagaagcggaggagctgccaccgccagaggtgagaagcggcgaggaaaagagcagcgaggaggatgaggcagcagcgggggaggaggagcacgcggcggcggacgggctcccaatcctacccaggacggttgatgggaagcggcgacccggcgccatcttcgtactcgagagggcctgcctcgaggtcggcaaagtcggcaagactatgcaaattttgaactctgatgatcatgcgaattatttgaggaagcagaatcgcaatcctgcagattataggcctgatatcattcatcaggctctactagcaatatttgatagccctctaactaaggctggaaggttacaggctgtttatgtgagaactgaaaagggcgtattgtttgaaatcaaacctcatgtccgcatgccaagaacctttaaacgtttctgtggtttaatgtcacaattgttgcaaaaactgagcattacggcagttggaaagcgtgagaagcttctcaacgttgttaaaaatcctgtcactcgttatctacctgttggtgcacgtaagattggcctttcatttagtgctgagaagtcagtcaacttgtttgactatgttgccaaatccaatgacgacgaacctcttgtgtttgtggttggtgccatggcccatggaaagatcgacaaggaatatacagatgattacatacaaatttgcaactaccctctcagtgctgcctgctgtttaaatcggatatgcagtgccctggagcagaagtggaacatccaatgaggaacttttgacaagcatgggaatcttgttttattatatacatcttacatgtacttccctctgcttatgtacaatgtttgaaagttaaaaccaaatgtttcagtgtggcattatgacgtgttttagacatcaattcatggctttaaactggtttgttcagagtcattttagcaaaaactgagtgttctgcatgccaaacttcggttaactcaaacattggtgtcagatctta

SEQ ID NO: 128633 - DNA, 1173 bp, Zea Mays
ataaatataaatggagttctttgtgtcaaatgaacgctagctgaaccctagccggcggatctccgcgggcggcagtcaggagtggaggcgtggtcgcacgggcgaggtcgcaataggagaggctcagagagatggggcggccttacgcggtgaaggggcggaagaagaagcgcaagctcgaggaggcggcggcggcctcggacgctgccccgcccgtcgaagaagcggaggagctgccaccgccagaggtgagaagcggcgaggaaaagagcagcgaggaggatgaggcagcagcgggggaggaggagcacgcggcggcggacgggctcccaatcctacccaggacggttgatgggaagcggcgacccggcgccatcttcgtactcgagagggcctgcctcgaggtcggcaaagtcggcaagactatgcaaattttgaactctgatgatcatgcgaattatttgaggaagcagaatcgcaatcctgcagattataggcctgatatcattcatcaggctgtttatgtgagaactgaaaagggcgtattgtttgaaatcaaacctcatgtccgcatgccaagaacctttaaacgtttctgtggtttaatgtcacaattgttgcaaaaactgagcattacggcagttggaaagcgtgagaagcttctcaacgttgttaaaaatcctgtcactcgttatctacctgttggtgcacgtaagattggcctttcatttagtgctgagaagtcagtcaacttgtttgactatgttgccaaatccaatgacgacgaacctcttgtgtttgtggttggtgccatggcccatggaaagatcgacaaggaatatacagatgattacatacaaatttgcaactaccctctcagtgctgcctgctgtttaaatcggatatgcagtgccctggagcagaagtggaacatccaatgaggaacttttgacaagcatgggaatcttgttttattatatacatcttacatgtacttccctctgcttatgtacaatgtttgaaagttaaaaccaaatgtttcagtgtggcattatgacgtgttttagacatcaattcatggctttaaactggtttgttcagagtcattttagcaaaaactgagtgttctgcatgccaaacttcggttaactcaaacattggtgtcagatctta

SEQ ID NO: 128634 - DNA, 2195 bp, Zea Mays
ggggccacgcgcccacgcctctccgcatgacgcaagagccgacgtcactcctcccgatctgggcgcggacgccaacgacgcgacggcccaagtcgcgacgccaccagctccccatcccctcggacgccatggaggaagctcgcgaccacaggctctcctccaccgccggccgccccttcctctctggcttctgcgccgcggcgctccgacgtaagcccctcggcgcccgcgcctccgccgccgccgccgccaccggcgagggccttgtgcggcagctcggcgtcctcgacctcgtgctgctcgggatcggtgcgtccatcggcgccggcatattcgtcgtcactggcaccgtcgcccgcgacgccggcccaggtgtcacgatcagttttgttcttgctggagctgcgtgcgtgctcaatgccctgtgctatgctgaactggcgtctcggttgcctgctgtggttgggggagcatacttgtacacgtacgcagcgttcaatgagatcaccgccttcttggtcttcactcagttgatggtggattaccatatcggcgcagcaagcattgctcgcagcttagcaagctactttatcgagttcttggagctaatcccgctcttgaagggccaaattccaagctgggtaggccatggggaggagttttttggtggtgttgtatcaattaacatactggcccccgttcttctcatcatcttaactgcgattctctgctatggtgtcaaagaatcatcagcagtgaacacgtttatgacaacattgaagataatcattgttatagtcattgtatttgctggtgtgtttgaggtggatgtatcaaactggtctccgtttatgccaaatggtttcaaatctgtagtgactggagccacagtagtcttttttgcatatgttggatttgatgcggttgctaattctgctgaggaagccaaaaggccacagagagacctacccattggtatactaggaagccttatagcatgtgtgttgttatacgttgctgtatgcttggtcattactggaatggttccatatacattactcggtgaagatgctcctttggctgaggcttttgctgctaagggcctgaaatttattactgtattgattagtattggagctgttgctggacttacaacaacacttcttgttggcttgtatgttcagtcacgtttgtactttggacttggaagggatgggcttttaccttcagtatttgctgaagtacacccaacaaggcatactcctgtacagtctcagatttgggtcggttgtgttgcagcagtcatggcaggcctctttaatgtgcgtatgctctcacatattctttccgttggcactctgaccggttattcagttgtatcagcttgtgtgatcacactaagatggaatgacaaaggaactagtcgtcgctcccttggaagtatgtcaatttggcaagagggtgttctaagtcttgtcatagttgctctttgtggttttatagtgggactttgctatcgctttaactatgctatagcctttatggttgtagcttttctgatagctgttgctgccagtttcgctctccagtttcgtcaggtctatgtggatccacctggcttttcttgtcctggggtaccgttggttcccattatttctgttttcttcaacatggtcctgtttgctcagctacatgaagaagcgtggtatagatttgtcattcttagtctcatcgctgtgggagtttatgccggctatggtcagtacaatgctgttccttccagctcagaacactctactattggttaccatggcattccttctgaagccgcatgagctatgttcatccccggagttcttcgaacatactgtatggtaccaacatacaccatcgtcaccgaagtttgaacctgttgcttttttttttgatgttttgcacagtgcatactcttgtagttacgcttagtactcctatacctatatctagacagtgaatttcacagcctgtgttgtgcccaccacaccattcgtcaggaagcttgccaagtgcatagaccttgtaaaaatgcaaatgaaaataaagaactgcagctgcattgtttgtaggaactcattgtcatgcactatgtataattctgtgtatattgtgaagagttcatatcaaattgcactgcggccgtcttttgccgttgccct

SEQ ID NO: 128635 - DNA, 376 bp, Zea Mays
catctgtctagagatcgtcatatacatctagaaagtcgtatgctttggaagaagcttgtacagtttgggaagggttttttttgagaaaaaagaagaatctacttcaaccgatatgcctttaggcacgaccatacataacatagaaatcgcacgtcgaaggggtgggcaattagctagagcagcaggtgttgtagcaaaactaattgcaaaagagggtaaattggccactttaagattaccatctggggaggtctgtttggtatcccaaaactgcttagcaacagtcagacaagtgggtaatgttggggtgaaccaaaaaagtttgggtagaggcagtgagagagaagatgatcagaaggaggaagccaaggaagga

SEQ ID NO: 128636 - DNA, 752 bp, Zea Mays
cacctcgccctagtcatatgatcctctccccgccctcccaaccgcccccgtggcccctcccctcactctgtgagaccaatgcccgcagtgcttgccgccgcccaaccatggagatagggcagtacgccacgaccagctgctccaaggagcatcagaagatttccgctcgtggacgcatgtttgattttgtcccccctactatgtttccttcgatccccaatccccttcccaggtaagaaacacacgtctccacaggcggccaccactgattcggtctagctggaggtaacagtggcgatggagatggcggtcacagagccatgaactcatgggcgggggagcgtgtcaagaaaagaattacttcgccgagaaaagaaatctgacgaaatgacaatgcaagtagggattgttaacctgctaacacgtggagggctcgccttcaaggggatgcaacatggttgtaatctctaaagaagtaacatatgtctccaacaacaaagggtccatttatgtttttatggtttgaagctcctgacttgcttcaggaagattagtacaagctttgttgttttgatccctagctgtagttagtcctgggtgtagttggtaaatttgtgtttggaaattgatccagacatgtgcttttagtgtctgtccatgtaaaaacacagttagatcttattactttccattcctggctctgacagaatgacttgcgagactgttctatgctattagttttcatatttgtt

SEQ ID NO: 128637 - DNA, 2215 bp, Zea Mays
cacctcgccctagtcatatgatcctctccccgccctcccaaccgcccccgtggcccctcccctcactctgtgagaccaatgcccgcagtgcttgccgccgcccaaccatggagatagggcagtacgccacgaccagctgctccaaggagcatcagaagatttccgctcgtggacgcatgtttgattttgtcccccctactatgtttccttcgatccccaatccccttcccaggtaagaaacacacgtctccacaggcggccaccactgattcggtctagctggaggtaacagtggcgatggagatggcggtcacagagccatgaactcatgggcgggggagcgtgtcaagaaaagaattacttcgccgagaaaagaaatctgacgaaatgacaatgcaagtagggattgttaacctgctaacacgtggagggctcgccttcaaggggatgcaacatggctggagagaagcgaaaagaggcagagatgatagagcttgaaggatcgttgggcaagagtaatgctgttaatcaggaactagttgctttggagaaagagctctcaacacaccgaagaactggctctattgattcatttggactctacttgtatggcattgttctacgtgataaaggatgtgaaggtctagctagaacaatcttagtagaatctgtcaatacttatccttggaactggagtgcttggtcagagttacaatctttatgcaccagcagtgacattttaaacaacttaaatctgaagaatcactggatgaaagatttctttcttgctagtgcatatctggaacttaagatgcatgaagaagctcttaaaagatatgagcgtttgatgggggtcttccgctgcagtggttacattcaggctcaaattgcaacagttcagtacagtatgagggaccttgatgaagctgagatgattttcgaagaactgctcaggactgatccttttcgcgtggattctatggatatttactcaaatctactatatgcaaaagaaagcttgactgctttgagtttccttgcgcacagagtatttttgacagataaataccgcccagaatcttgctgcataattgcaaattactacagtctgaagggtcagcatgagaaatcagttttatactttcaaagggcactaaagcttaatcgaaagtacctctcagcttggaccctgatggggcatgagtatgttgaattgaaaaatagtcctgctgcaattgatgcctacagaagagctgttgatattaatcctagagatttccgtgctttgtatggtcttggtcaaatctatgagatgatggggatgccgttttatgcactttattacttccggaaatcgtcatacttgcaacccaatgatgctcgtctctggattgccatggctcagtgttacgaaagtgatccacttcaaatgattgaagaagccataaagtgctatgagagagctgcaaacagcaatgacactgaaggaatagcacttcaccaactagcaaaactgcatggcatgctggggcaatccgaggaagctgcattctactacaagaaggatttagagagaatggaggttgaggaaaggcaaggccagaattttgttgaagctctgctgtttcttgctaagcattacaagagcataggcaggtttgaggatgcagagcactattgtacaaggctcttagattacactggcccagagaaggagactgctaaaaatatgttgcaagggataaaaaggttacagtcaggatttccatcaatggatattgatcattttgcactgtaaactgttaatgtgatgcttattgtttgtatcctcgctatgcgactccatacttctggatatgatgacctactgcgcatgatgctcgcttctagttcctggaacttgacaacaaggagaaccaggcgcctgcatggtgcaaagatgagcgtcattggaatgatccagacccctaacccaaatatcagcatagctgccttgtggagagctctgaatttctgtgggtttggcttccttcaccggacaactctgcctaaggcatcagaatctgtacttggattgcgttgcgtggtaacattgtatgaaagtgagattgttacaatgagtataagaagtttatgtagaagaaggaaatctgacgggttaggcacaattttgtacatacagataaattggaaagctataacagagactctttag

SEQ ID NO: 128638 - DNA, 3027 bp, Zea Mays
acaaacctcaaacctcagtatcatcatcgccgccttccactccacggttccacgtatcgcaagaattcaaataatttttgcgctctcgcgtcgatctgcttcaagcaagccccgaccggagccatggcttccgccaaggagagctatcgcgccgagctccgcgcctcctcccgccagctcagcgagcgctgcctctactccgccgctaaatgggccgccgagctgctcgtcggcgtagagctggatgcggccccggtcccttcggccgcgatggactccccatcctcctcgtccgcagcctccgcggggcggctattgcaccttcaccgtagcgggggttccagcttccgccaccgaccccgccccggcggcggcagtagctcggaggccgggaccccgctcggtggcgtgtcatacgtcagcacgcccatccccgacgacgacgcgttcgattcgggcggcgacaaatacctgctggccaagacctatttcgactgtcgggagtaccgccgcgccgcgcacgtgctgcagaaccaggttgggcgtaaggcagtgttcctgcgatgctacgcgctctacatggctggagagaagcgaaaagaggcagagatgatagagcttgaaggatcgttgggcaagagtaatgctgttaatcaggaactagttgctttggagaaagagctctcaacacaccgaagaactggctctattgattcatttggactctacttgtatggcattgttctacgtgataaaggatgtgaaggtctagctagaacaatcttagtagaatctgtcaatacttatccttggaactggagtgcttggtcagagttacaatctttatgcaccagcagtgacattttaaacaacttaaatctgaagaatcactggatgaaagatttctttcttgctagtgcatatctggaacttaagatgcatgaagaagctcttaaaagatatgagcgtttgatgggggtcttccgctgcagtggttacattcaggctcaaattgcaacagttcagtacagtatgagggaccttgatgaagctgagatgattttcgaagaactgctcaggactgatccttttcgcgtggattctatggatatttactcaaatctactatatgcaaaagaaagcttgactgctttgagtttccttgcgcacagagtatttttgacagataaataccgcccagaatcttgctgcataattgcaaattactacagtctgaagggtcagcatgagaaatcagttttatactttcaaagggcactaaagcttaatcgaaagtacctctcagcttggaccctgatggggcatgagtatgttgaattgaaaaatagtcctgctgcaattgatgcctacagaagagctgttgatattaatcctagagatttccgtgctttgtatggtcttggtcaaatctatgagatgatggggatgccgttttatgcactttattacttccggaaatcgtcatacttgcaacccaatgatgctcgtctctggattgccatggctcagtgttacgaaagtgatccacttcaaatgattgaagaagccataaagtgctatgagagagctgcaaacagcaatgacactgaaggaatagcacttcaccaactagcaaaactgcatggcatgctggggcaatccgaggaagctgcattctactacaagaaggatttagagagaatggaggttgaggaaaggcaaggccagaattttgttgaagctctgctgtttcttgctaagcattacaagagcataggcaggtttgaggatgcagagcactattgtacaaggctcttagattacactggcccagagaaggagactgctaaaaatatgttgcaagggataaaaaggttacagtcaggatttccatcaatggatattgatcattttgcactgtaaactgttaagtccacccgcaggtaaattatttggctgcgaaaattggacattaagtgtgtcatgtgcggccgcacatacgctaggcgcagacgcgcccgtgacgtacgtcgcacggctgagtgcgccgagcgggcgctgcatgagccatcgcctagtggctggaaggaaacttagagtagtaagctgttttggtaattcctagaattaaggagagctgttttggtaattccttgaattaaggagaatcttctccagtcggttatggtagttcctagaattaaggagatccttctccattcggttaagccattggctatatatatttgtaatcgtttgacagaagggggggggggggagaaatcagttatctccaatcctctctctctctctaattaagcctgcggtagaggggtataacctcggagcgcggctacgaactacgtagccggggttcggctagttaggggttcggtacccttgacaaagtgtcaagataacattgcttccttactatgtccatcttgcattgcatacaaggaggaatttaagctttcaagcaaacatctgtagggtaagactagtcatgaactagggcagttgaggtgtggtactcacccgatacatgactggtggcctgtttgttctagaagctagaagttgaaaacaaacaactcagttgttgagctggcttttgaaaatctggtttccgaggcaataaactaaaaactgaaaagcatgctgagacaagcttttctgtcttttggtgcgctaagaagctaaaattttactacagaagtcaaaataaaaagccaacagccagaaactgaaagccccaaaactgtagttcaaacaaagaggccctgaaggaaatgactctaatgagggctgcccacctgatgaaagttcaaatgcatatctcaactgggaattacttccaatcttccttcacagtgtgatgcttattgtttgtatcctcgctatgcgactccatacttctggatatgatgacctactgcgcatgatgctcgcttctagttcctggaacttgacaacaaggagaaccaggcgcctgcatggtgcaaagatgagcgtcattggaatgat

SEQ ID NO: 128639 - DNA, 1765 bp, Zea Mays
acacgcctctacagatccaggcgctcttctgctgcagcgccgcctctcgtcctcccggcgtcatcgtcgccgccctgatctccgcaggccggcgtgtggcggagatccatccgtgcttgaactgactccttccttagctacaagtacctattatcaaccatgtttggacgcatgccaaggaagagtagtaacaataccaagtattacgaggttcttggtgtgtctaagaccgcaagtcaggatgagcttaagaaagcatacagaaaagctgccataaaaaaccatcctgataagggtggagaccctgagaagtttaaagagctgtctcaagcttatgatgttcttagtgacccggagaagagggagatctatgaccagtatggagaagatgcccttaaggaaggaatgggaggaggcagcagcagtgatttccatagccctttcgacatttttgagcaactttttccgggttctagcacctttgggggtggtagctcaagaggacgcagacaaaagcgtggtgaagatgtggtgcatactatgaaggtttccttagacgatctgtacaatgggacaaccaagaaactatctttatcgcggagtgctttgtgctccaagtgcaaggggaaaggatccaagagtggggcatcaggaacatgccatggttgtcgtggtgctggaatgagaacaatcacaagacagataggccttggcatgatccaacagatgaacactgtttgccctgaatgcaaaggatcaggtgagatcataagtgacaaggacaaatgcccaagctgtaaaggaaacaaggtagtccaggagaagaaggtgttagaggttcatgtggagaaaggaatgcaacataaccaaaagattgtattccagggtcaagctgatgaagctcctgatacggttacaggagacattgtttttgtcttgcaacttaaagaccatccaaaatttaagaggatgtacgatgacttatatgttgagcacacaatctctctcaccgaagcattgtgtggcttccagtttgttcttactcatcttgatgggcgacagcttctgatcaaatctgaccccggggaggttattaaaccaggtcaacacaaggccattaacgatgaaggtatgcctcagcatggccgtcctttcatgaagggccgtctgtttgttgaattcaacgtggtgtttcccgagcctggtgcgctctcccctgcccagtgccgatcgttggagaagatccttccgccgaaaccagggagccaactgtcggacatggagctggaccagtgcgaggagaccacccttcacgatgtcaacattgaagaggagatgaggcgcaggcagcagcagaagaagcaggaagcctacgatgaagacgaggaggaggatgctcaaccaagggtgcaatgtgcccagcagtaaaatccgtgttcgttggaactgttctccaaaagtttcagcaggattttttatccatctgatcatctcgattctttttggcaaaaatataatcgttttataaactttaaactgttagttccatcctagtgtcagggaaaaaatgagagcccggaatggcatgttccttgtttgaactgcaatgcgtgattggtgttagttaagctctgctccatgttattttgttgtacccgtgaaaaaggtatcatgttcatggtgtgctactatttttgatgtgtaagaaacattgagcttgctggtagtgatgatttgtgatgcaccctggggtgctggctcaaaa

SEQ ID NO: 128640 - DNA, 834 bp, Zea Mays
atggaagctgacgcactactccatgcgcccatgacttcctcttcctcctcttcttcctcctcctccgactccgtcggcggctcgtgcgtcgtcaatggcgcgcaggagctaccgtccaataccggcaagccgcacaagaacgtgaaacggaagagaaccgcgtccccgtccgctgctccaggtggcggcgtggcgccggcgccgcccgaggccgccatagcggacgacgactgcggcggccggcggcgcaagagggggagcgccggcaccaggcacccgacgttccgcggcgtgcgcatgcgcgtctggggcaagtgggtgtccgagatcagggagccgcgcaagaagtcgcgcatctggctcggcacgttcccgaccgccgagatggccgcgcgcgcccacgacgtggcggcgcttgccatcaagggccgcggcgcgcacctcaacttcccgcacctcgcgcacgacctccctcgcccggcgtccacctcgcccgccgacatccaggccgcggcagccaaggctgctgccgccgccgccgatgccgacgtagaggtagagcaatgcgagtcctcccatgcggtcgagacgccatcgtcgtcagccgccagttcggaggaggtcgccgcggccagcaacgcggaggagatgagcgtgctgttcgacttgcccgaccttctgatggacctgagcgacggcctctggtcacccatctgggcggcagctccggcggcggtcgaagaatacgacggcggcgacagcctgagcgagccgcttctgtgggcccacgaacactgctggctggacgccgccgcgccggtgcagccggactag

SEQ ID NO: 128641 - DNA, 813 bp, Zea Mays
atgggaggaattatagagcaaactctagacgccgtgctaccttggctccgaaggtttgcaagctttgcacagtgttcatccctcatggaagaagagcgagcactgtccccggtgtccgatgccagcaccacctgcagcagctccggcggtaccggccccaactcccctatcacttcgtcgcagtctgtggacgacacctgcggtggcgccggcagctcgagcagccggaagcggccgcgccgggagctgaagcacccgacgtaccgcggcgtgcgcatgcgtgcgtggggcaagtgggtgtccgagatccgtgagccccgcaagaagtcgcgcatctggctgggcaccttcgacacccccgagatggcggcgcgcgcgcacgacgtcgccgcgctcgccatcaagggccgcgccgcgcacctcaacttcccggggatgtcccacgaactgccccgcgccgcatcggcggcgcccgaggacgtgcgcgccgcggcggcgctcgcggccgcgatggagatggagagcgtggcgccgcccacgccgcctggcgattctagccacagcgcccgcaatgacgagaacgaagagccggccgcatcgagctcatccggcaacgacgccgacaatgcgcagagcgaagagcaggctgcgccgtcggagcactcggtgctggccgacgggcacgtccttgatctcgcgctcttcgagctgccggacgttctactcgagttcggcttcgcgccgccgccgccgttgacgtcttgtgcctacgatttgtcctgggatgagccgttgctgctctgggagcactga

SEQ ID NO: 128642 - DNA, 687 bp, Zea Mays
atggccatggactcttcctcctccggctccgagcccacgtcctcgtcctctgctgaggctcctgcgtccccaaccgcgtcgtcctccgaatcctccgccgcgggcagcaagaagcggcggcgcagcaaggacgggcaccacccgacgtaccgcggcgtgcgcatgcgggcctggggcaagtgggtgtcggagatccgggagccgcgcaagaagtcgcgcatctggctcggcaccttcgccaccgccgagatggcggcgcgcgcccacgacgtagccgcgctggcgatcaagggccgcgccgcgcacctcaacttcccggagctcgcgaacgatctgccccgcccggccaccgccgcgcccaaggacgtccaggccgccgccgcgctcgccgcggccgcggacttccaggcgcccgccaatgcagccgccgccacggaccccgacgacggcccggccgccgccgccgactccgcgtccgcctcgccgccgccgccgccgccacagctggacaaccccgacgacgctctgttcgacctccccgacctcctcctcgacctcagacacggggcctcgtcgtgccagctctcgtgcgcgccgtcgtggtacgacgacgcgtgcttctccggcgccggcgccggcgccggcgcgttgttccgcctggaggagccgctgctgtgggagtactga

SEQ ID NO: 128643 - DNA, 621 bp, Zea Mays
ggcgacctgctggtaggagccgccgatgaagacgtcgccgtagacgaggccagcgagtccgccgccgatgagcgggccgacccagtagacccagttgccggcgaagtcggccgcggcgacggcggggccgaaggagcgggcggggttcatggagccgccgctgaagggccccgcggcgaggatgttggcgccgacgatgaagccgatggcgatgggcgcgatggtgccgagggagcccttcttggggtcggcggcggtggcgtacacggtgtagacgagcgcgaaggtgatgacgatctcgaacacgacgccctccagctcggtggtgccgccggagacgccgtgggtcgggatggccttgccgtgggtcacgaacctgaggagcaggcacgccacggacgcgcccagcagctgggccacccagtagaagaggccggtgaggacggtgatgtggccgcccacggccaggccgaacgtcacggcggggttcaggtggccgccggaggtgttcgcggccacggagacgcccacgaagagggccagcgcgtgcgccaccgcgatcgccaccagtcccgcagggtccagcgcgccgccattcgtcagttgccctgcacgcacgcg

SEQ ID NO: 128644 - DNA, 315 bp, Zea Mays
atgatccccaagaacgacaggattcgatttccgaaatgcaaaatcacaagcaaacaggaatcaatcaagaacgtagggcgtggaggaagggggaagggggcttgtagagctcggacctctggttctcaaggcggagggagggcgtggatgaagaaggagcttgccacctgcggagctcgaacctttggttcttgggggccgattggcggccgcggcggcagttgcaaggggacgattagcgggcgggggtggagcgcatcccgggcggcggcaattgcgttgagggacggtggagacatcaagcaggaggcttag

SEQ ID NO: 128645 - DNA, 967 bp, Zea Mays
atgacatgtctgcaattgctattcgaggacgcaatagatgacaggattctcgccaaagaggagcttggagcagcagccgacgagttcctgctctgcttgacgatgcgtcaacgggccttgacgcgcgagtactcgcgccttaccaacctgaagaggccttcggatctctccggtatgaccgaggccgaccgggcggcagaggcggagaggctgagggaggagaggctgcagaaggcgcgtcaactccaggaccagggggacatgagcggcgcccgtgagtgtgaaggtctggcacgcatcatcgacttcgatgtcaagcagggtggtagatacctcaactgtatctgctatgtcgatgacatctacaccttcgaccaaacagaggagtgtggcgcgacggtgacgcggttcgctggactggcgggggcctctctaccaacagagcgtcgcgcggcggcgatggtcgcgatggcgaagagggagcaggagctggaggagatccgggccatgacgacggaacagatggaagaggaggtggtagacctcaggggggagcttttcctgctccgccttaagcgctcggcgcgccaggagttcaagaacagcgagttcagtcgcatgcgcaagaggattgctcctatgctgaccgtgaaaagagagcgggaaattgaacaaggaatcaataaaagattgtctaggaagcttgataggaaatggaagcagagcattgtggtcagaccaccaccatctctgagggggaacaaagaggagtagaaagccgcaaaaagagggcaatgtgcaaaagtcgtttcatgcgagtgttgcaggaaggtcccttcatgatttcaacccttattgtgttgttatgtattccatgtttacattttgctaagcattgctaactgaatctgaatttcagttgttagtctcttctgtaaattttgacttatttaaatttacacttcta

SEQ ID NO: 128646 - DNA, 180 bp, Zea Mays
caagacacgatgtgtgtgaattgtgcgtcgataaacatcctatctatcaagattgcatgctcggatatcgacttccccatccaagtctatggcaccattgtcgccagggactgcatcgactacaagtgcgtttacctcttccaccgagataatgaccattgccaactcaacagctctaat

SEQ ID NO: 128647 - DNA, 682 bp, Zea Mays
acccatctgcccggtcgccgaaacctagctcctctcaaagtctcgattctcctcgctcctcggccctcgcccacctctcgctagtcgctccccacttcccagtctctgtggccggacgccgcggcgagatggcctcgacctgcttccgcgccgccgcccgcgtggcctccgccgccagtcgctcggcggcggcctaccgctccgctccctccgcggcacgcgccgtggcaactgccgcccaccgcatatcgtgcttctccagggtgccggtggagctcgggtgctgcgcgggattgtcactgctgccgctgcacagtgcggtggcgtcagccaggctgacgtcgcggctgagcacggcgtcgagctgccgtgctctctctcagcagatgggtcaatccgttcgaaggtgataaatggtcaaatggatggacgacctgctcatgtcatgctatcggactgaaatgatttatgtagagtagttatcgaattgaacatctggagcatgacttttcattacccgatctacaatcatggattttttttttcaaggtttgagttcgtgcctcctggtatccatgaaaaaaaaaacatgaagcacggtttgccgacgtctgggttatattcgtccagtgcaaatccgaatgctatctgtgataataacagcgaggaacaatttaaggtc

SEQ ID NO: 128648 - DNA, 509 bp, Zea Mays
ccggacgccgcggcgagatggcctcgacctgcttccgcgccgccgcccgcgtggcctccgccgccagtcgctcggcggcggcctaccgctccgctccctccgcggcacgcgccggtgccggtggagctcgggtgctgcgcgggattgtcactgctgccgctgcacagtgcggtggcgtcagccaggctgacgtcgcggctgagcacggcgtcgagctgccgtgctctctctcagcgcgctgctgcaggcacatgactttgatagttcttgaaagatattactgggagcttgctgttttgcctcatacaatcatgaagaatgagtactttaacactgaaattgtactggaagactagagttatgttatttacctagaatggctagctacctctgttgaggaataccttgatgcaataatgtggcatcctttttcaacgttttccacattaattgattgtttacttgactcaatatgtctgtttacagtgcttaaattattatttatgcaa

SEQ ID NO: 128649 - DNA, 1314 bp, Zea Mays
acacaccagtaccactgcacaaaagcacactctgttcggcttgccttgtcctttttccttgccatatggctaccaagatggtcctgtgtcgctttgtagccctcgcggctgtcgcctgcctcctccgccctggcgcgcccgtcgagctccaccgcaagctctccgggtggtccgacgacgcgggcgcgacgtggtacggcgcagccaccggcgctgggagcgacggtgagtcagatgcacggccgccggacgacgcgcgtgaattttccatgaaccatgcattttcccttacacctgcacacaaaacaaaaataaaaaataaaataaatgaataaagaatctgtaacaaatgccttccggggaccgggtatacgtgtgtacgtcggtttttccgtgcaggtggtgcatgcgggtaccagaacgccgtcgaccagccgccgttctcgtccatgatcgccgccggcagtccatccatcttccagaacggcaagggctgcggcgcctgctatcaggtgaaatgcaccgggcacgcgtcgtgctccggcagcccggtgaccgtggtcctcaccgacgagtgccccggcggcgcgtgcctggacgagcccgtgcacttcgacctgagcggcacggcgttcggagccatggcgaaggacggccaggcggaccagctccgcggcgccggacacctcaagatccagtacactcgggtgccgtgcaactggcgagggctggacatcgcgttcaaggtggacgccggctcgaacccgaactacttcgcggtgctcatcgagtacgagtccggggacggcgagctggagtccgtggagctcatgcagcgcggcggcggcggcgggggggcgtgggcgccgatgcagcagtcgtggggcgcggtgtggcggtacaactccggcgacaccctgcaggcgcccttctccgtccgcctcacctccggctccggcaggacggtcgtcgccagcaacgtcatccccgcggggtggacgcccggcgccacgtaccgctcggtcgtcaacttcgacaactaacgaggacggacggacggaccgaaataacggcacgcccgcccgcccgcccgccggccggccgccgggatggccgtgaaaggcgtggcgctatagcttttagtttatgattcgagctgtgcgcgggtgcctactatgccgacgacgctactgtactgttgcgtgcgtgacatgtgcaaatccgcgcagtcaccgtgtaccgccggaatggcgtgtgtttctttgaataaaataaaggctggaccggaagcgaacaatggcttgatttttcgct

SEQ ID NO: 128650 - DNA, 1140 bp, Zea Mays
acacaccagtaccactgcacaaaagcacactctgttcggcttgccttgtcctttttccttgccatatggctaccaagatggtcctgtgtcgctttgtagccctcgcggctgtcgcctgcctcctccgccctggcgcgcccgtcgagctccaccgcaagctctccgggtggtccgacgacgcgggcgcgacgtggtacggcgcagccaccggcgctgggagcgacggtggtgcatgcgggtaccagaacgccgtcgaccagccgccgttctcgtccatgatcgccgccggcagtccatccatcttccagaacggcaagggctgcggcgcctgctatcaggtgaaatgcaccgggcacgcgtcgtgctccggcagcccggtgaccgtggtcctcaccgacgagtgccccggcggcgcgtgcctggacgagcccgtgcacttcgacctgagcggcacggcgttcggagccatggcgaaggacggccaggcggaccagctccgcggcgccggacacctcaagatccagtacactcgggtgccgtgcaactggcgagggctggacatcgcgttcaaggtggacgccggctcgaacccgaactacttcgcggtgctcatcgagtacgagtccggggacggcgagctggagtccgtggagctcatgcagcgcggcggcggcggcgggggggcgtgggcgccgatgcagcagtcgtggggcgcggtgtggcggtacaactccggcgacaccctgcaggcgcccttctccgtccgcctcacctccggctccggcaggacggtcgtcgccagcaacgtcatccccgcggggtggacgcccggcgccacgtaccgctcggtcgtcaacttcgacaactaacgaggacggacggacggaccgaaataacggcacgcccgcccgcccgcccgccggccggccgccgggatggccgtgaaaggcgtggcgctatagcttttagtttatgattcgagctgtgcgcgggtgcctactatgccgacgacgctactgtactgttgcgtgcgtgacatgtgcaaatccgcgcagtcaccgtgtaccgccggaatggcgtgtgtttctttgaataaaataaaggctggaccggaagcgaacaatggcttgatttttcgct

SEQ ID NO: 128651 - DNA, 1634 bp, Zea Mays
atggcattctccaattgtacttcatgcatgttgcaacttaattgcattattgtatctcccggcatattatttggcaggtactgaagtatgcagagatcaataattattagttatttagttcagtctctcgtctatttctcatcgaccagcaactggtcacgttctccccaacccaaataattcgtccggtaggattcttttttttcccgtcttcctcccacgtacgttctcgcgctcccaagtcccaaccgagtcactataaataccccactcgtggcaacacctggaactcaccaaacaacccctcggtctaagctcgcctctgcctcacagccgccttccgatcgagctaccagtgcgtagctcaaaactcaaaacgagaagcaagaactcagtagcaatatatggcgaagtcttgcaccttactgttcggcacagtactggtcgtgctcttgcttctagtgagccccattgcttgctcccgcaagctcgccaagccaacaaacaagcacaggccgagacacaagccggcggcagtcagagcccgcagcaaccacactgccaccccctcggtgtccgacgcctacggctccggcggctggttgtccgccggcgcgacgtactacggcgcacccgatggagacggcagtgacggcggcgcgtgcggctaccagaccgccgtcggacagcgtcccttctcgtcgatgatcgccgccggtagcccgtcgctgttcaaggagggcaagggatgcggcgcttgctacgaggttaaatgcgacagcaacgctgcatgctccggcaagccggcgaccgtggtcatcaccgacgagtgccccggtggcgtctgcctcgccgaggcggcccacttcgacatgagcggcacctccatgggcgccatggcgaagcccggcatggccgacaggcttcgcgcctctggtatcctaaaggttcagtacaagagggtcccgtgcaagtacagcggcgtgaacatcgccttccgggtggaccagggctccaacccgttctacttcgaggtgctggtcgagttcgaggacggcgacggcgacctcagcgccgtcgacctcatggaggccgggtgcggcacatggaccccgatggtgcagaactggggcgcgctgtggcgctacaactccaactccggcaaggcgctgagcgcgcccttctcgctccggctcacctccgactccggcaaggtcctcgtcgccagcaatgtcatcccggccagctggaaggccggagggacgtaccgctccttggtgaattattacccttaaattacagctagctgggagcgtgatcgagggtgtgcttcggccttcgggaggcggcgttgcatgcatcctggcttttgcgagaggcggtgccagaagatgaggaggaggttgaggaatggaattcttccctctccctccacggtctctgcagtccctagtgatgtctgaacgtgctgttgatttctctgtaattttgtttttttctctttttttttctttgtcgtcccgtagttgcgagaggcgcgacgagactgatgtcgcatgccaatttatcaagctgtgtgtgtttgtaccacgcaatcttttcatataaatgaattgcggctgtgtgctatctcc

SEQ ID NO: 128652 - DNA, 840 bp, Zea Mays
ggaactcaccaaacaacccctcggtctaagctcgcctctgcctcacagccgccttccgatcgagctaccagtgcgtagctcaaaactcaaaacgagaagcaagaactcagtagcaatatatggcgaagtcttgcaccttactgttcggcacagtactggtcgtgctcttgcttctagtgagccccattgcttgctcccgcaagctcgccaagccaacaaacaagcacaggccgagacacaagccggcggcagtcagagcccgcagcaaccacactgccaccccctcggtgtccgacgcctacggctccggcggctggttgtccgccggcgcgacgtactacggcgcacccgatggagacggcagtgacggcggcgcgtgcggctaccagaccgccgtcggacagcgtcccttctcgtcgatgatcgccgccggtagcccgtcgctgttcaaggagggcaagggatgcggcgcttgctacgaggttaaatgcgacagcaacgctgcatgctccggcaagccggcgaccgtggtcatcaccgacgagtgccccggtggcgtctgcctcgccgaggcggcccacttcgacatgagcggcacctccatgggcgccatggcgaagcccggcatggccgacaggcttcgcgcctctggtatcctaaaggttcagtacaagaggtacggtggcggcggccggccgagcacccgacaagtggcagaattactggataactaggcgtgcgtggaatcagagagtaacgctgttttccttcgttaatttgcggcagggtcccgtgcaagtacagcggcgtgaacatcgccttccgggtggaccagggctc

SEQ ID NO: 128653 - DNA, 582 bp, Zea Mays
acattttcttcttcttctcagaaaacaaactcgagactcgttctttaaacaccacgcaccctggaaagcacttcttggccacgcataataatccagccaagcgcatgcaatggggggcggagaaccgaaccgctgccgcagttcatcaatcaggagtagttcaccaaggagcggtacgtggctccggggttccagccggcggggatgacgttgttggcaacgagcaccctgccggagtcggaggtcagccggagcgagaagggcgccttcagcgccttgccggtgttggagttgtagcgccagagcgcgccccagttctgcaccatcggggtccacgtgccgcacccggcctccatgaggtggacggcgctgaggtcgccgtcgccgtcctcgaactcgatgagcacctccaagtagaacgggttggatccctggtccacccggaaggcgatgttcacgccgctgtacttgcacggcaccctgcgacggacgagacggcagagtttaccgccgagattcacgcgccgtttgactggacaaagctctcaacgacgttccagtaagtatatagcgcatattata

SEQ ID NO: 128654 - DNA, 300 bp, Zea Mays
atggggtacggaccccgtacgtcgttcggggtgggggagacgccgggacggacgggacgtggtgggtccggaataaagctcatggctgggcccggggaacggggcgcgcgtgacgtggagccaggcaccgtcgtggccgtcagatgctcattggacgagcacagatggcgacgcgagtcatgggctttttgggccgcgttcctgtcagccgtcgagtcaccgtcatctctcatcgccgtcgtccagtcgcccccgcctgcctatgtactcgtacttccgcggttcgtcactgttccatga

SEQ ID NO: 128655 - DNA, 1648 bp, Zea Mays
aacgtaatagcaggatctctgccaatcaattaagaagaaaagaattgacccagttttaaaggaaaccggacccaaaaccaataccaggcgcacaaacaactcacacagtgcccaccctgagtcatcgttatcgagctcaacacaagtgacgagccccgactcccaagacaggcagcacaaggccaaaggaaacacgaccacgattacaaacactggcacaagagaaggaagactgcggcgtgccgtcgttgccaagccacgagacaccccactctagacagctccaattcttcaccagcgagacttccaaaaccttaatccactgccccgcctccgccaaatgcctcatcttcgaagcagaccaacccacgaagcagggggttcgccccacgtcatcgttgtcgagccacatcccctgacgtagcagcttcgacttcatgatgcaagcccccacctccacacgcaaaatgtcaccgaaagacgaaatcaaccaccacaggctacgacgtggtcgatacaaacttcagtagcgacgccttcaggaagggagtgacgtcggggacgccatcgtcgccggttcgagatggaccgggctttcgcccacgtaagacagtgctggggagctgagctgacgccctcaacaggagaagcggcgcccaggggcggcgccgtcaccaaagctttcgcccaagaaaaccccagcaaaatgaccggccaggaacccaggacaaagcaaccacctccaccgccaccgccgcccagacaacccacacagacccatccaaagggacatcgacgcgccgactgccacaacaaccgcaaagctacatcgaccaccacctctagctaggcccatggacctggtcgagcggcggcagcacctcgtgccgcacctcccatcggccatccctggcagcagccgctgcgacgcgcgagatccgctggcacgcgcaccaccgcagacgccagtagggcacgacaggttgctgcccacctgccgtcgccacacaccaccactgaggagccatatccggcgaccgcagcaccagacaaggccacgccgcccgcacgagcaggccacaggtcgctgctccaacctctgctcctcaccgaccctcacttctgcaaccaccggaagcactcaacacagtagccactcgcccacaaccgggaagcccgccaccgccgcgggaccaaaatgtagccccagcaggcagcaacagcgctgcgaccgcaccgccagatctccaccgcagtcaccagccagtggacatcctcgccgcaaccagcgcaccggcccagccgagtcgcccatgccgcggtgcgcgacccccgcacagatctgcccaccgacgcacgtgtcgacggccttcgcctcgaagaagcacagctcggcgtcgccctagtcccaccaacagcgcacggtggcgacgaccggagcagatcctcgagcgaggcacggaggcaggccacgacgtcctaacagcggcgccccgccatgcatggccgcctgggcctcagccgccatccgatgagcactgcggcgcgtgccacggcgtgccccagcacggctacggccacccataggtaccgtgccgccgcatgcttgtgccgtgccatctctcaccagatccgcgcgaaacacccc

SEQ ID NO: 128656 - DNA, 303 bp, Zea Mays
atgggccagttgttgaggcaatccctaaaaattgaggacaagatctgcaccgctgtgcgggctgtgctccgaaacatgtcggtcgccatgatgagttctccaaaccgttggtccatccaggaccaggccgaggccgaggcaggggggggcgagctcgttgcgcagcagtacacggagacattgcttcattatccactggtatccgtcagtggccgcccaaactcgggcaatcatgcttgctccgcccctcaaaagcatgctgagctcctgaagcctcgcccttgctttacacaaagcctttga

SEQ ID NO: 128657 - DNA, 90 bp, Zea Mays
ttttttctttcaagtggtctaattaatttaatgatgtatacaagattgttattttttcttttaagtggtctaattaatttaatgatgtat

SEQ ID NO: 128658 - DNA, 1362 bp, Zea Mays
catctgatcctccgattcagttcttctccccctaccaaaaggccgagcccccctcaggcctcagctccgcctccgcgctgccaaccatactcgtcaagccgtcacactttgtctctctcgtgccccgatactctttttctttttttttcttttcttttttttttttttttgcttccgggagcagcaaccgtcgccgtggccccgccttggatattccatcagttttcgggttcttggataggagaaagcggggcgctcaattccccccctcctgatccttgttccttgatcgccgccatgagcaacacgctgcttcgagtctacccttccgacctgaagatgccattcgagctcaggaagcagaactcagcgtgtcttgagctcgtcaacaagaccgaccggtgggtggctttcaaggtcaagacgacgaaccctaggaagtactcggtgcgctctgcctccggtgtcgtgccgcccaggggatcctgtggcatcacaataacgatgcaagcgcccaaggagatgcccccggactaccactgcaaggacaagtttcttgttcagagcattgctgtggaggaggggacgacgcagaaggacattgtccctgacatgttcagtaaagcaccaggtaagttagttgaggagttcaagctgagggtggtctatgtccctgccaatcctccctcaccagtgcctgaggaaacagaggaagaggatggatctcttgattcagatgtggaccatgaagtatccacgtccaactctgtacgtactaaataatcttactgcatgtgagcaaatgatgccatgttcgttcctagtgtaatatgattggtgccttcaattgtttttcaggcaacaggacaagggaatacatgtagatcacaaacatcagatgatgaggatgattctacatccaagttggaactggaaagaagatatgcagaggaaaacaagaagattcagaaagagctggatctcctccggaaaacaaaggcgtctcctcggggcttctctgcgtttgtgctgcttgtcttcttgttatcctcacttcttggatacctgatgttcggaagcagagcttagcaagttagcagctaatggctgcacatcatttgcggcaccggcagcggcacggctcttttagtacagtgtacagatatatacattaatagcgaagtagtcagtacataacagatatatagggctttcttgggtttcaagtgtccataggaatatatcttcagttttgaaatatgtgtgagtaaccgttcatgtttatactctatcatccaaatatatgatgtttactatataataaagctataaaagtgagacaaatcagtgttggagaaagac

SEQ ID NO: 128659 - DNA, 1025 bp, Zea Mays
atggaaatactgtgctctaaaaattcgcagtagtagcctaatttctttcctgctctgacgtcatcctcctctgggcgacacgggcggctccccatcgaccgcacccaccgccgccggtcttcacccccgccgtcgccggagcagctcgccggaagttcgacgagcagcgaggagggcggcggcgggactgctctctcactcatttccctcccttcttccacccactccactcctccctcttcctggaggtggccggcgacctgatccgccgctgggaaggccggatcggcgggctgactggccggatctaggggctggtcgccgtccgccgctcctccctgctggcatgggcaggtggccttgtggccgcaaccatggtggctcgtgcggctagcccgtggcggtagtgcccgcgctcgcgtggccatggccgtggctggccggcgacgttggcgcccacgcacgcggccggcccgctgcggcggcggcgtggctcgcttgtgcttgtagcgtggtgcttggatcgggggcgttggtggatctgcggctgccagcggtgccttctgcaggatgattctacatccaagttggaactggaaagaagatatgcagaggaaaacaagaagattcagaaagagctggatctcctccggaaaacaaaggcgtctcctcggggcttctctgcgtttgtgctgcttgtcttcttgttatcctcacttcttggatacctgatgttcggaagcagagcttagcaagttagcagctaatggctgcacatcatttgcggcaccggcagcggcacggctcttttagtacagtgtacagatatatacattaatagcgaagtagtcagtacataacagatatatagggctttcttgggtttcaagtgtccataggaatatatcttcagttttgaaatatgtgtgagtaaccgttcatgtttatactctatcatccaaatatatgatgtttactatataataaagctataaaagtgagacaaatcagtgttggagaaagac

SEQ ID NO: 128660 - DNA, 1520 bp, Zea Mays
aaaattcgcagtagtagcctaatttctttcctgctctgacgtcatcctcctctgggcgacacgggcggctccccatcgaccgcacccaccgccgccggtcttcacccccgccgtcgccggagcagctcgccggaagttcgacgagcagcgaggagggcggcggcgggactgctctctcactcatttccctcccttcttccacccactccactcctccctcttcctggaggtggccggcgacctgatccgccgctgggaaggccggatcggcgggctgactggccggatctaggggctggtcgccgtccgccgctcctccctgctggcatgggcaggtggccttgtggccgcaaccatggtggctcgtgcggctagcccgtggcggtagtgcccgcgctcgcgtggccatggccgtggctggccggcgacgttggcgcccacgcacgcggccggcccgctgcggcggcggcgtggctcgcttgtgcttgtagcgtggtgcttggatcgggggcgttggtggatctgcggctgccagcggtgccttctgcaggtggtgggtcatggtcgtggggctgggggccggatcttgagcctctccggctagatttatctctccgcctctcgtttcggcctgtggtgtgggcagggccggctggctccgtgcgttgcggcgtgtggtgggaggtcctgcgacgaaagccatgctcgcttgcaggcggacagcggtgacgcccgcgggcgccacccctaccctatcgagggtgccgtctttggacctctcgccccatgcgggaaccctcgccttggccttcttaggtctctcgctggtgctcgaccggcgttggggctctgagggttggggctggtgggttggtgcgtcggtggacggcagaaggtgacaacacgcgatggcttggcggggtgacatcggcgtggctgacctttcagctttcttcttggtgctggcgatctacactgctctgctaggtcttcagaggaaactttgcttggtttgtaccaggcgggcggcgacgacttttcgacgtcgtttctccttcttgaaggatgattctacatccaagttggaactggaaagaagatatgcagaggaaaacaagaagattcagaaagagctggatctcctccggaaaacaaaggcgtctcctcggggcttctctgcgtttgtgctgcttgtcttcttgttatcctcacttcttggatacctgatgttcggaagcagagcttagcaagttagcagctaatggctgcacatcatttgcggcaccggcagcggcacggctcttttagtacagtgtacagatatatacattaatagcgaagtagtcagtacataacagatatatagggctttcttgggtttcaagtgtccataggaatatatcttcagttttgaaatatgtgtgagtaaccgttcatgtttatactctatcatccaaatatatgatgtttactatataataaagctataaaagtgagacaaatcagtgttggagaaagac

SEQ ID NO: 128661 - DNA, 1584 bp, Zea Mays
gcctaatttctttcctgctctgacgtcatcctcctctgggcgacacgggcggctccccatcgaccgcacccaccgccgccggtcttcacccccgccgtcgccggagcagctcgccggaagttcgacgagcagcgaggagggcggcggcgggactgctctctcactcatttccctcccttcttccacccactccactcctccctcttcctggaggtggccggcgacctgatccgccgctgggaaggccggatcggcgggctgactggccggatctaggggctggtcgccgtccgccgctcctccctgctggcatgggcaggtggccttgtggccgcaaccatggtggctcgtgcggctagcccgtggcggtagtgcccgcgctcgcgtggccatggccgtggctggccggcgacgttggcgcccacgcacgcggccggcccgctgcggcggcggcgtggctcgcttgtgcttgtagcgtggtgcttggatcgggggcgttggtggatctgcggctgccagcggtgccttctgcaggtggtgggtcatggtcgtggggctgggggccggatcttgagcctctccggctagatttatctctccgcctctcgtttcggcctgtggtgtgggcagggccggctggctccgtgcgttgcggcgtgtggtgggaggtcctgcgacgaaagccatgctcgcttgcaggcggacagcggtgacgcccgcgggcgccacccctaccctatcgagggtgccgtctttggacctctcgccccatgcgggaaccctcgccttggccttcttaggtctctcgctggtgctcgaccggcgttggggctctgagggttggggctggtgggttggtgcgtcggtggacggcagaaggtgacaacacgcgatggcttggcggggtgacatcggcgtggctgacctttcagctttcttcttggtgctggcgatctacactgctctgctaggtcttcagaggaaactttgcttggtttgtaccaggcgggcggcgacgacttttcgacgtcgtttctccttcttgaaggtgcggcccagaagacctgcagtttgtgtgttcgttcgtgttgtggaggctcttcgtcgctccgcttggctcaatggtgtccgtgttgtggaggctcttcgtcactccgcttggctcgatggtgtccgggcctttgtcgctttaggcgtctgctcgctcccggagttcgacgttgtggatctttgctcgtggtgaagaatcggagctgcctcgtgtgggtgtgttgaggcttggcaacgatggcgcgccgcggtcttattccttgcgtcggtgtctgaatgtaagcgtcgtcgagttgctttggcagtgtgcggctcgtcttgggaagtcggagctgctcgtctcttgtgtttgagtttggcaacgatgactctagatgtgtttgtgtgtggggactgtcattgtctaagttgtttgttaggtcgttcgccggtttttctactgtgcgttctgtgtaggttttaggcccgattttccaaaaaactgggtcaattccattcttcttaattgagaggcagagctcctaccatcacgtt

SEQ ID NO: 128662 - DNA, 2013 bp, Zea Mays
ctatgtttgcccccattgctgcttcctaaacctgcaatattcatttcagcctttaattggcactcaaagttcaagatagcttgctgtagaccatcggctgcacagatgattgatgatgaggtcaactttggtaatatctttgatgcctcagaagaagttcaggttactgcaaagtttggtcccaagcaacggcccaaaacccgaaaaacagctctatcatccagatctgcagcgcctaatcctactgaagaaaccggagataggaaagtaggaaccttcagtcaagtcaattcttctaaagagcttaccagccaagaaaggacatccttgatgtgccctagtactgagtcagttgatattatcgctggttctcatagtattctcgatacaccattggaagatgcattgacagttccccagggttctctgtctggtgcttctgctgcagataggacttctcaatatggtgagcacaatgatgatccttctaagttagctacacaccaagaaaacttggtggtttcagatatcaacgtcccacctaacagttcatgtagcaaggctattgatgatatagttgaatttggggacatgtgtgatgtgcaaattgaagaggaaagagttacaaagttccaaccaaaggtgcaaacgaagctccttaaggaaatagccaaatctcggaagactaaccaaaaggtggaaacttccactgtagatgtggttacacaaaatggaaagggcaataatattcagacaaggctccatggcgatccggtacaggatcctaaaagtcatgaaagtgtgcagatcccagattctgaaggattattagcaactgataatagtaaaggttgcaatttagctaacctcaacaatctccttgaggagtcagtccaagaggaaacaatagctaagtttcgttctgatttgcaaccaaatctcgggaaggcttcatcccaggttgctgcgattaaaattaatgttgttgctgttgctccaatagttggagtttgtgacagcaacaatgacatgtacaaagaacctaaagatcaagaaaccatcactggtccagtggcttggtcaccacaggctgtgcatgctgatgttgatttagacaatcacaatgaaccaattaatcctcctattgatggtactcaatcaatgtttggcgaagtcccaggtacagcttttacaggaagagaaaagggaaaatcaaaatctgtatcttttgctctatcggatgtttctgggatagctagccctatagataccaattctgagatgggtaacatcggcgattcctgtagtgacaaattgactgatgaaaatttaagtaactcatctcgtcatatcgctgaaaagcattctattaccaaggaccaatattcaaatgagcaggaccatgagcgggagccactagatcatgctgttcaacagcaaccaaaatcggatgttggagaaagagcatcatctatgaaacgacgttgcaggaaaaaggtgcaaaaagttgggacacctaatcacactgttgatgattattttggtgaagactgtgtcgaaccttcattagctgaagaagataacgatactggtgatcattacactactggtaataagcataaggctaggaaaaagtcaaggggtggtgtagaagagtcacagcagcagaaagctcaaaaaaataaaagcaaggtgtcttcacggggccgcaaacggaccttgaaggatgaatcgacagagaagcctgagaagaagctaacccacagaatacgtcagaggataccaaaagaggttaaggctttactggaaacacctcgtgagcagataaaacccatgaagctttgtgcatcacatctcaggttgttacaagaagctagagagcgtgttgatccaaaagggattccatccgggccatcctctaatacaagaaactttcaactagatgatatggatgatttgggctacagagatgaggaagctaggttctttgacaacgatataacagaggagcat

SEQ ID NO: 128663 - DNA, 225 bp, Zea Mays
atttgcatttattcgattctttcattaatatgttatcttatgcacagaaactttcaactagatgatatggatgatttgggctacagagatgaggaagctaggttctttgacaacgatataacagaggagcatgtacaaaatgcaacaaaattgaactaccattcctacatgaacaaaccagcccggggaaaatggtcaaaatcagataccgacttgttttatgag

SEQ ID NO: 128664 - DNA, 1081 bp, Zea Mays
atttgcatttattcgattctttcattaatatgttatcttatgcacagaaactttcaactagatgatatggatgatttgggctacagagatgaggaagctaggttctttgacaacgatataacagaggagcatgtacaaaatgcaacaaaattgaactaccattcctacatggctacatgaacaaaccagcccggggaaaatggtcaaaatcagataccgaattcttttatgagggtcttcgacaatttggtagcgattttgcaatgatacaacaattattccctgataagactcgccatcaggtgcggcagaaatttaaatctgaggagagaaaaaatccattgctagtccatgatgctatagttcatcgctcaggagatagtttgtatttcaaaaaggtaattaagcagctgaacattgaagatgttgtgctgccagatattaaaagtacacaaaacaagatggtgcatcaagtgaaagaggccctggaaatgagaatgtactggatgatttaaacgaggaggaaaatagttcaaattggttgaacgaagagcatgacgtacagatggccgatgtggaagaagagcatggcgaacagatggatgatgtggaagaagagcgtgatcttggaaatgatggtggtgatgatgatcttggggatgtttttgattggtactagtttatgttaaacacggatgcgagcgtgaatatgagttggtctagctctgcataacaggggtagtttttaggaaaaaaattctttgcatccggaatgcaaagaatcccttttatgactgatttggtgactaggtatcacagagagattggagtggattgagagcctctaatctctccgtgatcctcttacagcctctaacatccaccacctcgtggtccatataagggcttattcggttattcttgtcccatgtggatttgatgagattggaaaaaatatgaaggattttaacttgttcgagatttaaatctatcaaatctcatcaaatccatatggattgagaggaaagcaaacaagccctaaatagaagaaaaacaaattactattggattaagttataaa

SEQ ID NO: 128665 - DNA, 211 bp, Zea Mays
cgtcccgaccgcaccgaccgtcggacccgggccccgcaccatccccacgatgctctggcatgacccgactgacccgctcgtggctcagctccaccttcaggctgggagtgtccagaacattcgcttcatgattcatgtcgtcctggagccagaatcgccgtgctacgcacgctggcaggacttactcctccttacccttcgctgctactga

SEQ ID NO: 128666 - DNA, 1706 bp, Zea Mays
aaattagacggataatatcgtcctccgcgggacaaggcacctcacgagcccttctcgtcctcagatctagcgccgcctccttcaccctgctgctggccgcctggccggcgagctcctcagcgtggtgagtcccctttcccctctgctctcctcttcctccatcatgctgattgctgaccggcgagctactcagagccaggtgctttccctctgctctcttctgcgcggtgcccagagttcctttcccctctgctttccctctaatcccatatgctctcttccgcgcggtgagcccggcgcggcgagatcttccccgtcgtcgccgcgggctgctgcttcggcacagatttaataaaaaaatataattctggatcaccgcgcgggagctccggtggcgccatgatgcgcgtggcctctcctcgcgtcgttggacgcccgccgatttcagcctctctctctctctctcctgtatagaaggagggtacatttcttttttgttacacgatcataggattccagcggcagtgcactcaagtttgagctatcatgtttgtgtgatgcaaaatcttttgtgcccggcgtgtgtcctctagctcgtttctagctcgcagcacagattaaaatatggctgttgcgcttgttcttacctgcgtgtctcgtagcaacttggaactgcattttgatgctagtatagtacgtagcaggcagcatttttcacaacgatatacatatatatacttgcatgatgagctagcatcacaggggaaaaaagaagtggaggtagtggaaggggaaaatagtggaaatcagtttatatgcatgtcttggagcttcacgatgaagagagggaaaaaatatctatcaagttattagccttttttcatgtcctgtactttctatgctagcaaggtataccaatctggctagtgttcgtcgacaatgagtttgctgatgaggaatatatatccaccctagcttggtgtacatagtttgaatgctgattttaatttggagttggagtactgattagaaaagagacacacactgctataatacagtatatctctctatatatctagcttgtgatgataatgccacaacatcttctacaagcaagatcaggaagaagacaaaaaacgttatagtgaagaggaggggttgattgctgcattcaaaagtgtcggggataccttatccaatgctactgagaaggttgccacaggggacactgatgtgccagatgatctttttatagtttgataaacctttcaggtgtgtgttttgtttttaacttcacatgttgtaacctgttttctattgatatgtttgtccaataaaaactattgtaacctaaaacctgaaaactattgtaaaatattttttgacaatttgctaaactttgcaggttttgagcagacccacatatctctgtatttcaattatctggtggcgcaccctcacattgctagagccttcaacaagttgtcattcgaccacaagttaatctgggctcgcaatttcgtcagtgaaaagttcctaggagtgtgagggcagttggtaggtaggcttggagggttcttttgcttgaaccacattgaacaatgaactgcgatctatgtgtaaccaggagtgtgagggcagttagtagataggcttggacggttcttttgcttgaactacatcaaacaatgaaatgtcgtctaagt

SEQ ID NO: 128667 - DNA, 870 bp, Zea Mays
aaattagacggataatatcgtcctccgcgggacaaggcacctcacgagcccttctcgtcctcagatctagcgccgcctccttcaccctgctgctggccgcctggccggcgagctcctcagcgtgcttgtgatgataatgccacaacatcttctacaagcaagatcaggaagaagacaaaaaacgttatagtgaagaggaggggttgattgctgcattcaaaagtgtcggggataccttatccaatgctactgagaaggttgccacaggggacactgatgtgccagatgatctttttatagtttgataaacctttcaggttttgagcagacccacatatctctgtatttcaattatctggtggcgcaccctcacattgctagagccttcaacaagttgtcattcgaccacaagttaatctgggctcgcaatttcgtcagtgaaaagttcctaggagtgtgagggcagttggtaggtaggcttggagggttcttttgcttgaaccacattgaacaatgaactgcgatctatgtgtaaccaggagtgtgagggcagttagtagataggcttggacggttcttttgcttgaactacatcaaacaatgaaatgtcgtctaagtatgtcagcggattttgcttgaacatgcagattttgtggaagccttaaacttgatattatgtgtaatgctaggacacattattatgtattgtgtggaattaataatatgtgtgttttgtagacttaatattagttgtaacatatcatgagatgggggcaatggctgcaaacattttttatgctctgttctcgaaccaaacagaggacaggaccaatccatccccagttataccgctaaccaaacaaaaaacaa

SEQ ID NO: 128668 - DNA, 827 bp, Zea Mays
aaattagacggataatatcgtcctccgcgggacaaggcacctcacgagcccttctcgtcctcagatctagcgccgcctccttcaccctgctgctggccgcctggccggcgagctcctcagcgtggaagaagacaaaaaacgttatagtgaagaggaggggttgattgctgcattcaaaagtgtcggggataccttatccaatgctactgagaaggttgccacaggggacactgatgtgccagatgatctttttatagtttgataaacctttcaggttttgagcagacccacatatctctgtatttcaattatctggtggcgcaccctcacattgctagagccttcaacaagttgtcattcgaccacaagttaatctgggctcgcaatttcgtcagtgaaaagttcctaggagtgtgagggcagttggtaggtaggcttggagggttcttttgcttgaaccacattgaacaatgaactgcgatctatgtgtaaccaggagtgtgagggcagttagtagataggcttggacggttcttttgcttgaactacatcaaacaatgaaatgtcgtctaagtatgtcagcggattttgcttgaacatgcagattttgtggaagccttaaacttgatattatgtgtaatgctaggacacattattatgtattgtgtggaattaataatatgtgtgttttgtagacttaatattagttgtaacatatcatgagatgggggcaatggctgcaaacattttttatgctctgttctcgaaccaaacagaggacaggaccaatccatccccagttataccgctaaccaaacaaaaaacaa

SEQ ID NO: 128669 - DNA, 928 bp, Zea Mays
tatgctagcaaggtataccaatctggctagtgttcgtcgacaatgagtttgctgatgaggaatatatatccaccctagcttggtgtacatagtttgaatgctgattttaatttggagttggagtactgattagaaaagagacacacactgctataatacagtatatctctctatatatctagcttgtgatgataatgccacaacatcttctacaagcaagatcaggaagaagacaaaaaacgttatagtgaagaggaggggttgattgctgcattcaaaagtgtcggggataccttatccaatgctactgagaaggttgccacaggggacactgatgtgccagatgatctttttatagtttgataaacctttcaggttttgagcagacccacatatctctgtatttcaattatctggtggcgcaccctcacattgctagagccttcaacaagttgtcattcgaccacaagttaatctgggctcgcaatttcgtcagtgaaaagttcctaggagtgtgagggcagttggtaggtaggcttggagggttcttttgcttgaaccacattgaacaatgaactgcgatctatgtgtaaccaggagtgtgagggcagttagtagataggcttggacggttcttttgcttgaactacatcaaacaatgaaatgtcgtctaagtatgtcagcggattttgcttgaacatgcagattttgtggaagccttaaacttgatattatgtgtaatgctaggacacattattatgtattgtgtggaattaataatatgtgtgttttgtagacttaatattagttgtaacatatcatgagatgggggcaatggctgcaaacattttttatgctctgttctcgaaccaaacagaggacaggaccaatccatccccagttataccgctaaccaaacaaaaaacaa

SEQ ID NO: 128670 - DNA, 196 bp, Zea Mays
atgttttgtttagccatatgttacacaaagtgcttgggattcatgtgtaccaaaacttcatggtttcagttttaaataccagtggtccaaaaatagcacacacacaaacacacatcagtcatcgcaaattcgacagcatattaataagtgttgcctctacataaaagtacgaagttcatttcttcggcagcaacat

SEQ ID NO: 128671 - DNA, 880 bp, Zea Mays
cctttggttcaattcttccctataaatgcccttctccccctgagcttattccactccagttgcaccagcgctcctcctatccctagcccaccagtccagtccgcaagcatccctctgctctgcgcagtgctgttgggtttttttcagcctccatggcatcgtccaaggccttcttcctcgtggccctcaacctggtcctcttcacggtggccaacgcctgcggcggcggctgcccgacgccaacgccgccaaccccgacgccgccgtcgccttcaaccggtggcaagtgccccaagcacgcgcttaagttcgctgcgtgcgccaacgtgctgggcctcgtcagcgccgaggtcggccacccgcccgccgagccgtgctgcagcatcctcggcggcctcgccgacttggaggccgccgtctgcctctgcaccgccatcaaggccaacgtgctcggcatcaccgtcgacatccctgtcaagctcagcctcattatcaactactgtggcaagaacctcccaagtggcttcatatgcgcctgatagatactctgatagatagctgcgcgtgtgacgtacttcgcatgcatgcagcccatgcattggctgtctccttctacctttttcttttgtctttgctttgtcatgttagcttggttctgaatgtagaagtactctagacaatgaagctagtgtgagtcaaatcattttcttttttgagtgaagcgtgttgcgttgcgtgcctatattatcttcttcaaggtctaggtaggcgtaggctagcgctaggtactgcatgcagtgctatttgtctatgtttcctatccaccgttgtacacttgtactcctttgattccaaggaaactgtgtgaccctgcttttat

SEQ ID NO: 128672 - DNA, 2280 bp, Zea Mays
gtcggcctgcttccagtttaccgcagcggggcgactgacgcgcctccgacgacacgccaggtccggcatccatgggcgccgcggcggccgacctcgaggcgcgtcagctccgcatcctcggccgtatttctgacctcgagctcgccgcgcagcagcaccgcctcggggcgctctccatctccaccgcgccctcagagaaaggcgaggccgacgcgggggctaccgaggttcatctcgcagccctcctggccgcgcgcggcgtgcgggacttcgccttccgtcgcgttcccgccgactactacgaccgctccctcgaggagcggcgcgacctgctccgagccgactcagtcgcccagctctgcaagagtatcgtcatggtgaacacccaagctgctgcagatgttgttgattgcagtaatccaaagaattcaaaatactatgtcgttgttgttcagtatatggcacggcttaacgctgaaaacatcaagaacttcctgtatgaactaaatgagaagcaaataccgaaaaagagatttaacatgaggttggcaccagaagaggagtcacacaagcttactgggtttgtgcataacgctgtcacttgcatcgggatggaaacaaacataccggtcatcatagatgaagctatcaccaaattggatgaggatttcttctggttgggtggcggagaagttgacctcaagctcgggatgcgaacctcacaattcttaagtgtctttagtccattcgtggtgaaatgcagctgatgatagccgtgcagcctaagagaagcttctgattcatttatttctaccgagcctccatgcatccatcacatggaggtacaccacaatactaggaggttttgcttggatctggggtttggatgtctgtcttttttggagcaggctattcctgttcagttgctcgcctcacattatttacagctgattgttgttacgactgatgtggtggaggggacattcttgggaagattgagatatttgccacaactaggcatatacaataatactctctgtagtttgtgcctaaaattagcactggttacttgtgtaatcaacgagactcttactttcatcgaaaggatgacactatgagttggtgcgattttcttttatttttttcaaacactacacaatgtcatacccttagaagggtcggtgacacatttatagccctaagagcaactccaatcatgagtcccctagttgggccctataatttaagttagctacctgttctatttgtttagggtccaaatacaattgttgattcctaccgtggaccctaaaatagcttacatttgtaatcaacccatattcccctgtacgtagatcctctgttctgtgccactccgaacgccattcctgcgcagactgttttttgcgccgccgctaattccaggtggtgttccggcgctcatccagtagaagccgccattcctgcgcagactgttttttgcatcgaccaggattgctgccttcatttcaggatggtgtatggaagtaggagatcaaaaaggcaccaagaagatgatgagattgatgatgaccttcagcacattggtttttatgctaggtgaataccggaagaggaagaatgaagatcaacgtaaaaagcgtcgaggtttggtttttggacatgaggtatatgatcgtagtagaggagagcatgatttaaaattattcaatgactactttgctgagcgtccaacatatcctgggaagtatttccgacgacgctttcggatgagtcatcctcttttcttgcggatagctgaagctgttaaacaacatgatcactattttgctcagaaaaaaaaatgctgtcggtgctcttgggttttcttgtcttcaaaaggtgactgcagcttttagacagcttgcttatggtgttccagcagattacgttgacgagtatttgtggattggagaaagcacgactatcgagagcctacgaaaatttgtcagggcagtgtgtgaggtttttggaccagagtatttgagacctccaaatgaaaatgatatagctaggttgcttactattggtgaacaacgtggatttcctggaatgattggtagtgtcgattgtatgcattggaagtggaaaaattgtcctacaacttatcaaggcatgtattgtggtcatgtgaaagaaccaactattgtactagaggctgtggcgtctaccgatttatggatatggcatgcattctttggtctaccggggtctttcaatgatattaatgtcttgcacaga

SEQ ID NO: 128673 - DNA, 805 bp, Zea Mays
gaagatcctgcctccaaatctgataataatctttctttaacattagttatgatgaattatgtccatcttttattaggtgaacacccaagctgctgcagatgttgttgattgcagtaatccaaagaattcaaaatactatgtcgttgttgttcagtatatggcacggcttaacgctgaaaacatcaagaacttcctgtatgaactaaatgagaagcaaataccgaaaaagagatttaacatgaggttggcaccagaagaggagtcacacaagcttactgggtttgtgcataacgctgtcacttgcatcgggatggaaacaaacataccggtcatcatagatgaagctatcaccaaattggatgaggatttcttctggttgggtggcggagaagttgacctcaagctcgggatgcgaacctcacaattcttaagtgtctttagtccattcgtggtgaaatgcagctgatgatagccgtgcagcctaagagaagcttctgattcatttatttctaccgagcctccatgcatccatcacatggaggtacaccacaatactaggaggttttgcttggatctggggtttggatgtctgtcttttttggagcaggctattcctgttcagttgctcgcctcacattatttacagctgattgttgttacgactgatgtggtggaggggacattcttgggaagattgagatatttgccacaactaggcatatacaataatactctctgtagtttgtgcctaaaattagcactggttacttgtgtaatcaacgagactcttactttcatcgaaagg

SEQ ID NO: 128674 - DNA, 2450 bp, Zea Mays
gcggaacggggctgcggaccccatcggaggcggaaagacgctgttctggccggaggggaaggcgaagacgctgttggagccgtggtccgtgctggactgcacgcggagccccagcaactcaacgtcgacgctgtcgtcgtccctgggcagcggcgctgaggactcgaccggcgtggcggtggtttcggacagaagcgccgccgccgaagccaccaaatggggagcccccggcgagcacggcggcggcggcgggaaggaggactgggccggcggctgtgagctgccgccgattcccaccggcctcgacatgggggtcgtggtcgccgacagctgggacgccatgctcggcaacgccgctgcggcggcgcaggaccagacgttcttgaactggttcattggggccgccggcgacttggatcagtcaggaccgccgcttcccgtgcaccaccagccgctcctcgacaatgtgggcttcgggttcccggcagcggaccctctgggtttcacgctcgatccccacctcggcggcgttgcctctgacatgtcgtcccctggtgcggtgtcgcaaactaccaacagtggcggcggtggcaacaaggcgtcctcggccttcggcctcttatccccggagtctgcttccttccagccgccgccgcttccggtgctgttccatgaaggcatcgacacaaagccccctcttgatacgcagtcgcccggcctcctccaccagtaccagcaccagccgacccccgccacaaccttcctcatgtccatcccctccttccccagctacaatcagcagtcgccactcgtccatccaccggccaaacgtcatcaatccataggaggcgacctctatctcgcccgaactcggcttctgccgccgccgccgacggggcaaggtcatgcctttccaccactaaatggtcctgctccattccagctccagccttcgccgccactgccccacggggcaatgaagaggacggctgcggaggcggcgcagcagcagttgctggacgagctggcggcggcggcaaaggccgctgaagctggcaattccattggcgcgcgagcgatattggcgcggctcaatcaccagcttcccccgctcgggaagccgttcctccgctccgcctcctacctcaaggaggccctcctcgcgctcgccgaaggccatcacggcggctgccacctcaaatcaccgctcgacgttgccctcaagctcgcggcgtacaagactttctctgatcactcgcccgtgctccagttcaccaacttcaccgcaacgcaggcacttcttgacgaaattggtggcagcacgtcgtcctgtatccatgtcatcgattttgatcttggcgttggaggccagtgggcttctttcttgcaggaacttgcacactgccgtggcgcaggtggcgcagctctgccgttcgttaagctcactgcctttgtatcagctgcttcccaccatccactggagctgtgtcttgcgcgtgacaacattgcacagtttgctgttgaccttggaattccctttgagttcagtgctatcagtgctgatatgatcaaccctgcagaattcatttctgccactgatgatgaagatgtagttgttgtcctcccgactggttgctctgctcgtgcaccaccactgccagcgatccttgggttggtgaaacagctagctcctaagattgtgatagccatagaccatggcgctgatcgcgctgatcttcccttctcacagtacttcttaaactgctttcagtcttgcatgttcctccttgattcgcttgatgctgctggcattgatgctgattctgcctgcaagattgagaagttcctgattcagccaagaattgaggattcggtgcttgggcggggcaaggtggacaatccaattgcatggagaagtgcatttgcagctgctaggttcgtgcctgttccacccagcaattgggcagaggcagaggccgattgcctcctgaaacgggtgcaggtccacggtttccatgtggagaaatgtggggtcgggctcacactatactggcagcatggcgagcttgtcactgtatcagcatggcggtgctgatcagcaatctacgcctgtgggcaccaatatttcaccaccatttgctagcagcttcaactccagtaacgtgtatttcgtcttgcaatttagtgttgcaaaggtaacaaatatattggtgttgaacccttcatgttgattatctttgcaacttattagctagaagtagaactagcggatttttagcaatgttggtgtcaatgtctctagtgtaatgatgttgctctaggtttttaccctgcttgctctcgggtcactagacattctaatgtgacttgaaacactgcttgtgaggagagggtataattaacctatcaaatgtctgtggtacagtataatacgtgtttcatgttctttt

SEQ ID NO: 128675 - DNA, 276 bp, Zea Mays
atgggcccaccctctgatttcgatcctgctcatgatgttccagttagggttaagaattcatacaaccctaaagctccaggcgcccttattactagacaaagggacatggataaggttgttctaactagcatagtgctcaagtcaaatgtcactgtgttggacattttgagcactcgaatgcttggtcagtatggttttctggcaaggcgggtgccagataagctgcaagtaactaagaaggcagtgcttcatgtcttccctgctgctcgactctag

SEQ ID NO: 128676 - DNA, 2115 bp, Zea Mays
atgccttcgtcgtctccgcctccgctgccaccagccgaggagacgaccgcctctgctgccgctctcgcccctgagggtggattctccctcaccgagccctcgttcctcgagtccctcatgccgaagaaggagatcggcgtcgaccgcttcctcgccgctcaccctgagtatgacgggcgcagcgcactcatcgctatcttcgattctggagtcgatccagctgctgctgggttacagactacttcagatggaaagcctaaaatccttgatgtacttgattgcactggtagtggtgatgttgacacgtccaaagtggtgaaagctgatgctgatggtgctattgttggtgcttcaggtgcccgtttggttataaacccctcatggaaaaacccttctcaagagtggcatgttggctgtaaattaatatatgaactgtttactgacacacttacatctcgattgaaggtaaatttcattttcagtgcctacaccccaaaattttatattgaacttgatatcttaacaagggtctacccacccacacttcagaaagaaagaaagaagaaatgggacgaggaaaaccaggaatcaatttccgatgctctgaagcagctgaatgaatttgaaaagaagcatcctaagcctgatgacaccatgctgaagaaggcacatgaagacatgcaaagcagacttgattacctgaggaaacaagctgaaggttatgacgataaggggcctgtaattgacattgttacatggaatgatggtgatgtgtggagggttgctgtcgatacccagacccttgagggtaacaatgatggtggaaaactagcagattttgttcctctgacaaactacaggcttgaacgcaaatatgcaattttcagcaaattggatgcttgctcttttgtagcaaatgtttataatgatgggaaccttgtcagtatagtaactgactgctctccccatgctactcatgtcgcgggcattgcagctgcatttcatccagatgaacctctgctgaatggagttgcacctggagcacaattgatttcctgtaagattggagacactcgcttaggatctatggagacagggacggggctggtgagggccttgatagctgcagtagagcacaaatgtgatctgattaacatgagctatggagagcctacccttcttcctgactatggcagattcattgatctttctaatgaggttgtggacaaacatcgcattatatttattagtagcgccggaaacaatggaccggctttgaacactgtgggtgctccaggtgggactagtacaagcattattggtgttggtgcttatgtttcaccagccatggctgctggagctcactgtgttgtacaaccacctgcaaagggaatggagtacacatggtctagccgcgggcctactgctgatggggatcttggcgtttccattagtgcacctggtggtgcagttgctcctgtaccaacttggacgcttcaatctcgcatgctcatgaatggcacttccatgtcatctccttctgcctgtggtggggtagctcttcttgttagtggcatgaaggctgaaggcattccattaagcccttattctgtaagaaaagcaatagagaatacagccgcatctataagtaatgcacctgaggagaaactgaccacaggaaatgggcttttgcaagttgatagggcttttgaatatgcacagcaggctaagaagttgccacttgtttcttatagaatctcaatcaatcaagtgggaaagtcagatcatccaggccccaagagtgatgagggagttcaggcctttcttaaccattccagatttccagatacagcagcggagcctggcctcacatccttcttggagtggtggaagggggctgcagaggcagtgcagggaatggtcaagaaagggctggattctctcattattttgggagcctggaagatatgtaacctccgcaatagatgtgtgtttgatggagagaaccccagcctttctcgaatcctgaagcaggctgatgaggagagaagcctttgggagctagcaggagccaagggtctctcctatttggctgctccattgtcggtagcctga

SEQ ID NO: 128677 - DNA, 2010 bp, Zea Mays
tgaaaggaggttcataaatgtaccttttggagcttcatgggcggaagttactatgcgaacatcagcttttgatactcctagaagattctttttggacactgttcagatctgtccactgaagcgacctgttaaatgggaggctgttgttactttctcttctccatcttcaaagaatttcagttttcctgtagaaggtggcttaactttggagttgtccatagcccagttctggtctagtggaattgctagccatgaacctacctgtgttgattttgagattgtgctgcatggaatatccattgatcagaaagtaagtacccttgatggtgagtcacccttgcttatagttgctagatcacttctagcgtcagagaagcttgttcctgttggcaccctgaacaagatcaggataccttatcgacccgtggagtgtaatctttcttcacttcccactgaccgtgataaattgccctctggcaagcaaattattgccctgaccttaacttacaagttcaaattagaagacaatgctgaaataaagccccatgtgccactgcttaacaacagaatatatgacaataaatttgagtctcagttttatagaatatcagattcaaacaagcgtatttactcgtccggagacgtttaccctagttatgtcagactttccaaaggagaatacacgttgcaactgtacataaggatttcgttccattgatgttctactcccaacctgatggtcctatagttggaagtggcaccttcaaatccactgttctagttccaggcgaacctgaagcattctatgtgggtcctccgtctagtgaaaaactcccaaagaatgctccacctggggctgttttggttgggtccataacctatggtactgtaagcacatttaacaagaaagatgaacaaaaccaccgtgctccagtatcttatagtatctcatataccattttgccatcaaaggttgatgataaagaaaagggggttttagttggtacaaagagcatacctgaacagttagatgaggaggttcgagacaccaagataaagtttctttccagcgttaagcaactaactgaggaggacaagtctgcctggtcagaacttgtggtttctctgaagtcagaatatccgaagtacacacctttgctttctaagattttgcaatgtgtcctccagaaaggaactgatggtgataagattagccatgaaaaagaggttattgctgcagccgatgaggttgtgggcagtattgataaagaggaactggctaagtatttatctctaaattcagatcctgaagatgaagaagcacagaaattcaagaaaaaaatagaagaaacgcgagatcagttggctgatgcactatatcaaaagtgtcttgcattggctgagattgaatcactgaagtctgatgagtcaattgaggtatctgctaaagatatttttgaggagaattacaaagaattgattaaatgggttgatgtcaaatctgcaaaatatggcacttcgactgttttgcgtgaaaaacgctgtggaagacctggtacagcattgaagattctaaatgatttgattcaaaatgaatctgaaccaaagaaaaagctttatgatttgaagatccagttgattgaggagatgggatggaaccatgtctcaacctacgaaaaacagtggatgcaagtccgctttcccccatgtctgccaccattttgattgtgaactcatttttacaatggctctatcatcctgggttcagtagttgtcattttcattgctgggtgcgtcagttcattatttcgatggcaaacagccaactaggcaagctactggatttgtgcgtttggggacacagttattccatagttattttgtggtacaatatcaggggagtcctttctccaaggagataagacggaacagagatattttgatggacttgaaggagattttatcctcttcaatccttataatgtctatcaaaccaaataaggtttataa

SEQ ID NO: 128678 - DNA, 2083 bp, Zea Mays
tgaaaggaggttcataaatgtaccttttggagcttcatgggcggaagttactatgcgaacatcagcttttgatactcctagaagattctttttggacactgttcagatctgtccactgaagcgacctgttaaatgggaggctgttgttactttctcttctccatcttcaaagaatttcagttttcctgtagaaggtggcttaactttggagttgtccatagcccagttctggtctagtggaattgctagccatgaacctacctgtgttgattttgagattgtgctgcatggaatatccattgatcagaaagtaagtacccttgatggtgagtcacccttgcttatagttgctagatcacttctagcgtcagagaagcttgttcctgttggcaccctgaacaagatcaggataccttatcgacccgtggagtgtaatctttcttcacttcccactgaccgtgataaattgccctctggcaagcaaattattgccctgaccttaacttacaagttcaaattagaagacaatgctgaaataaagccccatgtgccactgcttaacaacagaatatatgacaataaatttgagtctcagttttatagaatatcagattcaaacaagcgtatttactcgtccggagacgtttaccctagttatgtcagactttccaaaggagaatacacgttgcaactgtacataaggcatgagaatgtgcaattcttagagaaactcaaggaactggttctgtttattgagaggaaactagacaaaaaggatttcgttccattgatgttctactcccaacctgatggtcctatagttggaagtggcaccttcaaatccactgttctagttccaggcgaacctgaagcattctatgtgggtcctccgtctagtgaaaaactcccaaagaatgctccacctggggctgttttggttgggtccataacctatggtactgtaagcacatttaacaagaaagatgaacaaaaccaccgtgctccagtatcttatagtatctcatataccattttgccatcaaaggttgatgataaagaaaagggggttttagttggtacaaagagcatacctgaacagttagatgaggaggttcgagacaccaagataaagtttctttccagcgttaagcaactaactgaggaggacaagtctgcctggtcagaacttgtggtttctctgaagtcagaatatccgaagtacacacctttgctttctaagattttgcaatgtgtcctccagaaaggaactgatggtgataagattagccatgaaaaagaggttattgctgcagccgatgaggttgtgggcagtattgataaagaggaactggctaagtatttatctctaaattcagatcctgaagatgaagaagcacagaaattcaagaaaaaaatagaagaaacgcgagatcagttggctgatgcactatatcaaaagtgtcttgcattggctgagattgaatcactgaagtctgatgagtcaattgaggtatctgctaaagatatttttgaggagaattacaaagaattgattaaatgggttgatgtcaaatctgcaaaatatggcacttcgactgttttgcgtgaaaaacgctgtggaagacctggtacagcattgaagattctaaatgatttgattcaaaatgaatctgaaccaaagaaaaagctttatgatttgaagatccagttgattgaggagatgggatggaaccatgtctcaacctacgaaaaacagtggatgcaagtccgctttcccccatgtctgccaccattttgattgtgaactcatttttacaatggctctatcatcctgggttcagtagttgtcattttcattgctgggtgcgtcagttcattatttcgatggcaaacagccaactaggcaagctactggatttgtgcgtttggggacacagttattccatagttattttgtggtacaatatcaggggagtcctttctccaaggagataagacggaacagagatattttgatggacttgaaggagattttatcctcttcaatccttataatgtctatcaaaccaaataaggtttataa

SEQ ID NO: 128679 - DNA, 2552 bp, Zea Mays
ccatgccatttttaggataatcagcaatctcctcgcatgtagctggtcatcatccgtcctccttggtttagtttgttctccaatggatcctccaaatccaatgcgcttagcggcacttctctccctctgtgctgccgtcttctccttcgccttgcttctggtaagcaccgccgtcgcccacaatgacctcggcgtgcacaagaactacctcatcatcgtgcgcacgccgtacgagtatgaccggagcatgttcaaggacgtgtcgaactggcacgcgtccctgctcgcgtccgtgtgcgacatggccgaggaggagctcaacgaggatccggccgccatggcgcgcctcatctactcctaccgccacgtcgtgaacggtttctcggcccgcctcaccgttgaggaggtccgcgagatggcagacaaggactggttcgttaaggccatgccagagaagacgtacaggttgatgaccacccacacgccgcagatgctcgggctcagcggcagaggcttccacggcggtctgtgggacaagagcaacatgggcgaagggatcatcatcggcgtcctcgacgacggcatcagccccggacacccgtcgttcgacgcgacgggcgtcccgccgccgccggccaagtggaagggccggtgcgacttcaacagctccgtgtgcaacaacaaacttatcggcgcgcggtcgttctacgagtcggccaagtggaagtggcaagggattgacgatccggtgctgcccgtcagcatgggctcgcacgggacgcacacgtcgagcacggcggccggcgcgtttgtgcccggcgcgaacgtcatgggcaacgggatcgggacggctgccggcatggccccccgcgcgcacatcgcgctctaccaggtgtgcttcgaggacaagggatgcgaccgtgacgacatactggcagcactcgacgacgccgtcgatgagggcgtcgacgtgctctccctctcactcggcgacgacgaggccggtgacttcgcctacgaccccatcgcgctcgggggctacaccgccatcatgaaaggcatcttcgtcagcgccgcgggtgggaacatgggcccggactatgcaacgattgccaacgaggcgccttggctgctcacagtggcggcagcgacaactgaccggaggttcgtcgcctccgtaaggcttggcaatggagtcgagctcgacggcgagtcgttgttccagccacagggtttcctaagcgtgccgcggctgctggtaagagacctcagcgacggcacatgttccgacgagaaggtccttacgccggagcacgtcggaggaaagatagtagtctgcgacgccggtggcaacttcaccgcactcgagatgggcgccgccctacgcgcaggcggtgcagccggtatggtcgtcatcaccatcgaggaattcggctcggtggtccaacccaaggcgcacgcgctcccggcgtcgcaggtgacttacgccacagggcagcagatcagggcctacatgaactccacagacatcccgacgggcgagctgattttcaaaggaaccgtgctgggcaaccgcgactcgccagtggtggcgccgttctcgtcgcgggggccaagcaaacaaaaccaggggatcctgaagccggacatcaccggccctggagtgagcatcatcgccggcgtccccaagccggcggggctcatgacgcctcccaatccactggcggccaagttcgacgtcttgtccggcacgtccatggccacgccgcacctcagcggcatagccgcggtgctgaagaaagcgcaccctacatggacgccggcggcgatcaaatcggccattataacgacggccgacccgaagaaccgccgcggggagccgatagcagcccatgacgggtaccctgccaacctgctcacggtgggcgccgggttcgtcgaaccaatgaaggccctgacgccggggctcgtgtacaacctgacggcgttggactacatcccctacctgtgtgggctcaggtacaccgaccaagagatcaactcgatcatccacccgctgccggcggtgtcgtgcgcgcagatgggcgtcgtggagcagaaggacctcaactacccgtccatcaccgcgttcctagagcaggagccctacgtcgttaatgtcacccgcgtcgtgacgaacgttgggcgcggcacctccttgtacgtcgccagggtggagatgccgagcacggtgtcggtgacagtaactccgagagtgctcctgttcaagaaggtgaacgaggcgaaggggttcacggtcaccatcgggtctatggacacaagtatccagaaagggatcgccgaggggcacctcacgtgggtctcacccaagaacgtagtgcgcaccccgatcctcgtctcgttcaagaagttcgtcacggataactccaccacagctcatcttagacattgattgttatagttcctgaagaccagcagactactagatcccaaaggttgatgcaatgtcagcttccgacttttgctttgcatataaaatcttagcgggtggt

SEQ ID NO: 128680 - DNA, 870 bp, Zea Mays
atggaggggaaagaggaggacgtgcgcctgggcgccaacaagttctcggagcgccagcccatcgggacggcggcgcagggcgccgctgacgacaaggactacaaggagcccccgccggcgccgctgttcgagcccggggagctcaagtcctggtccttctaccgcgcgggcatcgccgagttcgtcgccaccttcctcttcctctacatcaccatcctcaccgtcatgggcgtctccaagtccacctccaagtgcgccaccgtcggcatccagggcatcgcctggtccttcggaggaatgatcttcgcgctcgtctactgcaccgccggcatctccggaggacacatcaacccagctgtgactttcgggctgttcttagccaggaagctgtccctgactagggccctcttctacatcatcatgcaatgcctgggtgccatctgtggagctggagtggtgaagggcttccagcagggactttacatgggcaacggtggtggcgccaatgttgtcgcacctggctacaccaagggtgatggccttggcgctgagattgttggcaccttcatcctagtctacaccgtcttctcagccaccgatgccaagaggaatgccagggactcccatgttcctatccttgccccactgccaattgggttcgcggtgttcctggtccaccttgccaccatccccattactggcactggcatcaacccagctaggagccttggcgctgccatcatctacaacagggatcacgcctggaacgaccattggatcttctgggtcggccccttcattggcgctgctctggctgccatctaccaccaggtgatcatcagagccatcccgttcaagagcaggtcttaa

SEQ ID NO: 128681 - DNA, 1533 bp, Zea Mays
ccgtggcggcggctcgcctcctcaaggcctccagactccagtgctcggcgtcgacgtgcgaatcagcgacctccaacacgccgccgcttcgtttctcctgtctcctgattcccgatccgctgagcgccagcgacgacctgctctgcgcgcctggccgtccccgtccttctgcgcagtgccttctctacctcttctcctcgccttccccgcaagactgccttggcgtctctgcaaaggtagttgaatggcttcaagtgcacgggacattatgtttcggcctctcaaaacattaactataagcccggcactggcatctggtgtgatcagacagcgttaccagcttcaacagcatgcaccagtgagtggcacatccaaaggaaaggctaagctcaaagcaggtcagcctttgaagcgttccaccattggagcaaagaaaggggcaccttccgctgctggtggcggcggtggtcgtggtcgtcgtgaggccattgagcgcattattcagatttccgagtcatgtctcaatgcatctactccgttgcggcacttgcccctcaaggagcgtcttcgtgaggccaaacgtgaggaactgggtcttgtctccaaggagaggcaacgagagcttgatatagccaaagccaaatctaaagccaaatctaaaggtcctggtggagatgatggagaccgtgtgcttatgggtccaccgggccttgactatatcagtcttgggctagttgatgaggaggcaatccccaagtatgaactcacagtcgaggatggtcggcgacttgctaaagaatacagtcgtgtactaatgcggcggcaccgtgcaaggcaaacagcagagtcaatgcttctaaccctaaaaaaggaggccattgatgctctccctgagaagctacgagctgctgctatggtacctgacatgacaccgttccctgcaaaccggtacatggcgacactcacaccaccaattgaaggatatattgaaaaagtgcgggaagcggccaagaagcactctgtgaaggagaaacttcgctgagaattcaagagaggaaactgtttccgtaaggtgaataaatattcaacctaatgtacaagaacagctttggcacaaactgcaattgccatatttggtgatctaatcagacatcccaatttgctgagcagccattatctagtgaaatcctttttgccatttttatgcaactctacaggattgttttttttttttgcagttgtcgctagactgtcatttcattttctgtttttgctcatttaggatgtttgctgttgagaggcatgcttggtgcaagtgcaatggtgagagctgccttactcgttatcatgtcgcagtttcgatgcacctctttgtctttgcggggaaaagacttcgatttatcccctatttacacctcatttatagtcatgtgggagcctctaggacgtttgttgttgacagcaacttccgcaataaagggttagcagtgagaccatgaaactaagaatctcccgattcctcacaaatgcccc

SEQ ID NO: 128682 - DNA, 767 bp, Zea Mays
caagagccaacagagcaacgcaggcacacacgacacgaaccaggcaaccagctgcggacggaggaaccctagcggaacactgtgccggtgacggcggcgcgctaccggtgacgggggatacggcggcatcggcccctcctccatccccggcgcggcggcgccagcagccggcctgcaggtacggtctccagtctccagatcgcccctctggcgatcaggaacgatcagccgatctgaaaacattgctgtggattcagatcctggggtggatggaatggttacttgttgattcgttacttgctgtgtcgttattttgtgtggcacttgggttggtgtgatctttacccatgctcgattgtgagccttacctgcaacccgaggtgacttgcgtttttgtcttgttttcgtatctcaagctatagtttgaacggtcggggttgtttggatctagaggtgctgatgacaatgtagtgcgcgtgtcagttgattttttgtgcccttccttgaataagtagtaatttatcaactatcatgtccgtcggaggtgccgtttggtatttcctatgagtttactcattttgttctttgttggacatagccagcacttgttttttattacatgttccatcgacgttattcagacacatcatattgtgtatttggcattcactttgctgcttaattgttttattgcactgtgtctgctcattttgataaattgtcttcataaaagatctattttttgtatgcccacaaaagaaaagaaa

SEQ ID NO: 128683 - DNA, 1480 bp, Zea Mays
caagagccaacagagcaacgcaggcacacacgacacgaaccaggcaaccagctgcggacggaggaaccctagcggaacactgtgccggtgacggcggcgcgctaccggtgacgggggatacggcggcatcggcccctcctccatccccggcgcggcggcgccagcagccggcctgcagcaaaggtagttgaatggcttcaagtgcacgggacattatgtttcggcctctcaaaacattaactataagcccggcactggcatctggtgtgatcagacagcgttaccagcttcaacagcatgcaccagtgagtggcacatccaaaggaaaggctaagctcaaagcaggtcagcctttgaagcgttccaccattggagcaaagaaaggggcaccttccgctgctggtggcggcggtggtcgtggtcgtcgtgaggccattgagcgcattattcagatttccgagtcatgtctcaatgcatctactccgttgcggcacttgcccctcaaggagcgtcttcgtgaggccaaacgtgaggaactgggtcttgtctccaaggagaggcaacgagagcttgatatagccaaagccaaatctaaagccaaatctaaaggtcctggtggagatgatggagaccgtgtgcttatgggtccaccgggccttgactatatcagtcttgggctagttgatgaggaggcaatccccaagtatgaactcacagtcgaggatggtcggcgacttgctaaagaatacagtcgtgtactaatgcggcggcaccgtgcaaggcaaacagcagagtcaatgcttctaaccctaaaaaaggaggccattgatgctctccctgagaagctacgagctgctgctatggtacctgacatgacaccgttccctgcaaaccggtacatggcgacactcacaccaccaattgaaggatatattgaaaaagtgcgggaagcggccaagaagcactctgtgaaggagaaacttcgctgagaattcaagagaggaaactgtttccgtaaggtgaataaatattcaacctaatgtacaagaacagctttggcacaaactgcaattgccatatttggtgatctaatcagacatcccaatttgctgagcagccattatctagtgaaatcctttttgccatttttatgcaactctacaggattgttttttttttttgcagttgtcgctagactgtcatttcattttctgtttttgctcatttaggatgtttgctgttgagaggcatgcttggtgcaagtgcaatggtgagagctgccttactcgttatcatgtcgcagtttcgatgcacctctttgtctttgcggggaaaagacttcgatttatcccctatttacacctcatttatagtcatgtgggagcctctaggacgtttgttgttgacagcaacttccgcaataaagggttagcagtgagaccatgaaactaagaatctcccgattcctcacaaatgcccc

SEQ ID NO: 128684 - DNA, 1478 bp, Zea Mays
caagagccaacagagcaacgcaggcacacacgacacgaaccaggcaaccagctgcggacggaggaaccctagcggaacactgtgccggtgacggcggcgcgctaccggtgacgggggatacggcggcatcggcccctcctccatccccggcgcggcggcgccagcagccggcctgcaggtagttgaatggcttcaagtgcacgggacattatgtttcggcctctcaaaacattaactataagcccggcactggcatctggtgtgatcagacagcgttaccagcttcaacagcatgcaccagtgagtggcacatccaaaggaaaggctaagctcaaagcaggtcagcctttgaagcgttccaccattggagcaaagaaaggggcaccttccgctgctggtggcggcggtggtcgtggtcgtcgtgaggccattgagcgcattattcagatttccgagtcatgtctcaatgcatctactccgttgcggcacttgcccctcaaggagcgtcttcgtgaggccaaacgtgaggaactgggtcttgtctccaaggagaggcaacgagagcttgatatagccaaagccaaatctaaagccaaatctaaaggtcctggtggagatgatggagaccgtgtgcttatgggtccaccgggccttgactatatcagtcttgggctagttgatgaggaggcaatccccaagtatgaactcacagtcgaggatggtcggcgacttgctaaagaatacagtcgtgtactaatgcggcggcaccgtgcaaggcaaacagcagagtcaatgcttctaaccctaaaaaaggaggccattgatgctctccctgagaagctacgagctgctgctatggtacctgacatgacaccgttccctgcaaaccggtacatggcgacactcacaccaccaattgaaggatatattgaaaaagtgcgggaagcggccaagaagcactctgtgaaggagaaacttcgctgagaattcaagagaggaaactgtttccgtaaggtgaataaatattcaacctaatgtacaagaacagctttggcacaaactgcaattgccatatttggtgatctaatcagacatcccaatttgctgagcagccattatctagtgaaatcctttttgccatttttatgcaactctacaggattgttttttttttttgcagttgtcgctagactgtcatttcattttctgtttttgctcatttaggatgtttgctgttgagaggcatgcttggtgcaagtgcaatggtgagagctgccttactcgttatcatgtcgcagtttcgatgcacctctttgtctttgcggggaaaagacttcgatttatcccctatttacacctcatttatagtcatgtgggagcctctaggacgtttgttgttgacagcaacttccgcaataaagggttagcagtgagaccatgaaactaagaatctcccgattcctcacaaatgccccccg

SEQ ID NO: 128685 - DNA, 1113 bp, Zea Mays
gcgtcccttgcgcccgaaagcctcagggccactccagctacagcctgtcttgacccgtgtcgaacgctcctctcgccactcaaagtatcgtgctagagctctgctcactatatagagcggccactgctatgttcgtgatgaatcgctacgagcacagctagctagctacgacgtcgatccagaactgcacgccagtctagctagtgggccaggcttcgtcctcgaccagaatttaaccgggcgggtgctgctagctggtccgatccgttggagagagacgatggcggagcccagacgcacgcggccgtcgacgttccggtgcgccgcggcgacggtgctggcgctgctggtggtcgtcgtcgtcatcgtcctcctgtggctcttcctccacccgtccaagctctacttctccgtcgaccacgccggcacgacgggcttcaacttcacggccgccggcgggctcgcgggcgccttcgacctcaccctgcgcgcctccaacccgaacgagcgcgcgagcgtgtcgtaccgctgggtcgacgtcggggtctggtacaacggcacgtacctcgcgggcgcccacgcgccgggcttcttccagcggcccggggacgagacccggctggacgtggtcgcgcgggcggcgccggacgcctgggtgctgccgcggggcgtggaggagggcatgaagaaggagcgcacggccggcaagctggcggtggacgtgcacgtcgtcgccaaggtgcggttccgctacggcgtggtgcggacgcgcaagtacaccgttcgcgccagctgccccgcggtccccgccgagtttgtgccgccgacctcgttcgaccgggtgaactgccacgtgcacatatgagttttacgaaaccctgcgtgagatggtccaagggattaagctctgggtggattgattggttggttggttggttttatcgatgccttcttttcgtgctatcttggtttgcttgttgtctgcatgcttatttaatttcttcgcttaattactctattgttttattttatgcaaactgattttcatggattggcgatgtaattatctgtaagaaaatttaatttgaaccaacgtacggaggttgcatgaga

SEQ ID NO: 128686 - DNA, 2042 bp, Zea Mays
atggcaaagcgtcgccaacactccagctgattgttcgaccctctgtttcccatcgcacggctgagatctcactcttgtagtctcgatccgacggcagccgagcccacaaggaatcatacttcgctgtcgaaagcagtgggcccggatggacagtcacacccacagtaaccaaccgagcaacaagatccccatatcctctcctccctaccgcaaagctcccacaacctgtcccatctccatcctctgcctcccgccctcccctcccctgcatctccggccgggcgggcatggccatgtccatggcgatgtcaaaggtcttcacctcgcgccattcggaacatttgcaccaccgccttgtggcggcgagctcccaggcagcggcgccgcggctgccacttctcccgcggagtccgggcctagcggcggtaacagtcgcctaccgtccgcggctgcggccggcgagccccaggtcgacatcgagtgagtcggacctttcgcctaccccgccttcggaacgtaccatgacggcctgggacctcgccagcctctgggtcgggctcgtcgtcggcgtgccgtcctactacctcgcgggcagcctcgtggacctcggcatgtccgcgctccagggcgtcgccaccgtcgcctttgccaacctcatcgtcctcgtcacgctcgtgctcacggctgcgccggcggtcacgcacggcctgccgttcccggtgctcgcgcgcgccgccttcggcgtccgcggcgcgcacgtcccggcagtcatccgcgccctcatcggctgcggctggttcggcatcgagtcctggatcgggggccgcgccatatttttgctcctcccgtcccggctcaagtcctaccagccgctgctcgcgccggtgcccggcctcggcgtggcgccgctcgagttcgcgtgcttcctcgcgttctgggccgcgcagctcggcgtcatcatgcacggcatggagggcatccgcaagctcgagaagctctcggcgccggtgctcatcgtgctcacctcagcgctgctggcctgggcctacacgtcggccggtgggtttggccgcatcctctcgctgccgccgaggctgacaggcgcagagttctggaaggtcttcttcccgtcgctcacagccaacatcagcttctgggcgacggtggccatcaacataccggacttcgcgcggtacgcgcggagccaggcggaccaggtgctcggccaggcggggctgccagttttcatgggcatgttcaccttcgccgggctcgccatcacctcggccaccgaggccatcttcggccacgtcatatccgacccaatcgagctcctcggccgcattggagggccggcgacgacgtttcttgccatcttcggcatcggcctcgcaaccatcacgaccaacatcgccgccaacgttgtcgcaccggcgaacgcgctggttagcatgagcccgcggaggttcacgttcgccaagggggcgttcgtcaccgcgttgctcggcattgccttccagccttggcggctgctcagctccagtgagagcttcgtctacacctggcttctcggttactcggcgctcatgggtcccatcggaggggttgttctcgccgaccactacattgtccggcgcaccgctttggacgtcgacgcgctctactccgaagacagcggcagcccttactacttccagggcggtttcaacgtcgcctcgatggttgcaatggcggccggagttgcgcctatcgtgccgggatttctgcacaaggttggagttctgccgagtgtgcccagtgcgtttgtcacgtcttacaacaatgcctggttcgtcagctttttcgtcgccggagccgtctactgtctgctctgcaacaggagggggaagcaagagagagaacattacagttgatactatactaggcatataagcatgtgtgtggagattgttactattcttgtactgtagaaaagattgctactattgaccgcatcctaatcttctataagttggttatattctatcgaaaggattgttact

SEQ ID NO: 128687 - DNA, 460 bp, Zea Mays
atggtgcaagtgtgggcggtgtccctggcggtggcgtcgctcgccatcggcatgctcggggtgctcggcgtctggctctgctatctcttcgacgccgtcgctcggggccgcgctccccggacgccgccgcccacgcccccagacggcggaggagaaggaggaggagaacggcggcaagaatgggctcgcggaggcagagctgatgcgcctcggtggggtcactgtgctagagtccacggacagagaagaggaggcggcggcgctctgtccgatctgcctcgagcccatggagcccggccgcgccgtgcgcgtgctccccggatgcaaccgcgccttccacaaggactgcgtcgacaaatggcttgccatctcgccccgatgccctatctgtaacatctgggctacgccaccgtcttcgcctgcggcctcgcctctggcgcccaagaccggttgggattct

SEQ ID NO: 128688 - DNA, 874 bp, Zea Mays
tccaaggtccaaaacacatctctcaatttcctccgatcctctcttggtccacaccaaaataaagagaaaactcacagggcaaaacgtacgcagaaactacatcaagaagcagccgtactgggccaggatagcccagagcagaacgagaacagcgctgtacaacaccatacatctcctagcgcgcttttagcagcagcgaggcaagtgatggatcaaaacgtatccaagccacaattagtcaagagattactgctactactactactagccatgaaagagaaggacgccatcatcatacatcatctactggtctggtagtcatcagcaaacctcctcggggatgctctgcaggccgggctcccactccccgcccgcctgcatccgccgcgcggcagcctcggccgcccgccgcacgctgcgccgccgcagcgactgcagcctctgctcggcgcccggccctgccgctgccgccgcgcgctgccggtggcgctcgctgctggccgcggccaccagaccgccgtcgccgagcgccgcgaccatctgcttgagctcgcgcttgctgacgacgatcttgacgcgcaccgcgcccccgacgtcctccctggacaggaggcgcccgccgtggtgcagccgctcgagggcctgggccgccgccgccttggactgcgggtggtcggcggccgcagcgtccctggggaagaagcacctggacgccatcgggagcgccggccggccggtgggcgaggatggaggagtctgtgctgtgcgcctgcctgcctgcccggccctctcgccgacgttccttgcaagtcacagcacaaaggcaaaagccaaggccaagtgaatgtgtgcgctgccgtctgccgagtaatgt

SEQ ID NO: 128689 - DNA, 440 bp, Zea Mays
aaacgcatgcaatctatcaccgcctcagctcgtgctctctgctctgcactatctactaccaaagaaagatgaaggacttggcggggctggggcacctgttcgtggtgtccttcctgttccacttcgcctccttcatggtgatcccggcggtcaccgacgtcaccatggaggccgcctgccccggccgcgacgagtgctccgtcgccatctacctcagcggcttccagaacgcagtgagcatcattcattcgcacgcatgcctgcctgatcactcgccaccaccagctgtgtcgacatgcatgccaggatccatgacaccccggcgctctcaacgtacgcccaatgcaggtcaccgggatgggggcgctcgtcgtcacccccatcgtcgggaacctgtcggacaggtacggccggaaggcgctcatgacgctgccggtcac

SEQ ID NO: 128690 - DNA, 1913 bp, Zea Mays
aaacgcatgcaatctatcaccgcctcagctcgtgctctctgctctgcactatctactaccaaagaaagatgaaggacttggcggggctggggcacctgttcgtggtgtccttcctgttccacttcgcctccttcatggtgatcccggcggtcaccgacgtcaccatggaggccgcctgccccggccgcgacgagtgctccgtcgccatctacctcagcggcttccagaacgcagtcaccgggatgggggcgctcgtcgtcacccccatcgtcgggaacctgtcggacaggtacggccggaaggcgctcatgacgctgccggtcaccgtagccatcgcgccgctgtttatactggcatgcggccgctcggaggtgtacttctacgtgtactacgtggccaagatcatcgccggggtcttctgcgagggcaccatgcattgtctctgccttgcctacgtggctgaccacgtgggccccaggcgtcgcgcggcggcgttcggcctcctctccggcgtgtcggcagccgggttcgtgtcggggaccttgaccgcgcgcttcctcccgaccgcatccaccttccaggtcgccgccgccgtggccgtggcggcagcgctctacctcagggccttcctccccgacgctggcggcagcgtctcctgcgccgacgaagcctgcgaccctctcctccaggattcgtcctgcgcctcttccacatcatcctccgatgaagagctctcgcctcggctgccgccgcataagggaggcctgccgtctctgtccgacatggtcgcgcttctcactggcagtctggccttgtcgggggcagcaaccatcactttcttctacagtctaggtgaacatgggcttcagactgcattgctgtactacttgaaggcacaatttggttacaacaaagatgagtttgctaatctacttctaattgtcggtgctgccgggatgctatcacagctcactgtaatgcctatcttggctccgattctgggtgaagagatgctgcttattgttgggcttctaggtggatgtactcatgttttcttgtatggcattgcatggtcatattgggtaccttattttgctgcggcatttgtaattttgagtgcttttgttcacccatctataagaaccaatgtatcaaaaaatgtcggatcaaatgagcagggaattgctcaaggatgtatatctgggattagttcttttgcaagcatattaggtcccctcatctttactcccttaaccgcgtggtttctttctgaaacagagcccttcaacttcaaaggtttcagtattttgtgtgctggcttctgcacccttattgcgtttgttatcagtttgaggatgcctggtgctcgatctagtacgtgcaagaagaccgcagttcagcatgagcaagcatgacagaatatagtatagtgccacctactcttttttattctgcccaagtgcatagacagaaaaggacaggatgggaaaaaagtgacttcgagcaaaaggaaaaggtatagtgacaggaagtgctggagaaacatgctcgatttcgtatgttcaaagagaaggggttatcctatgcaactagacatttttatccttcactggaatgttgagcattgcagaattgacaattgctatgccatcgagcaagttcagtcgtttgtaaatatgctcctagtaggaagtaactgaattattcgcaaaaaaaggaagtggctgaactattgtgccttttgcacgatgcttcgtttcaaggattagccatgaattaacgtttatgtactctaagaggaggtgatttgcatctcaactaaacatttgagtatgcagttaagttgatttgtccagttaaatatgtagaacatgttcctccttcataggtcatccttttgagttctactttgc

SEQ ID NO: 128691 - DNA, 3436 bp, Zea Mays
atgcggctgctccacgttgttccggaactttccgccccgccgtcccgcgagcagcaccgccagcgtaaaccggcgacgcgctattaatccagcccacaaccaagtcatcactgccaccaagtataccaggagcggagagggggtcgagccgtcgagcggagtggctgcggtgcccatcgatcttcggggagtgtctggggtcgccggcggcgaagccatggaccaggcgcgaagcaagagcggcctgcggtcgcacgggtccggcaaggcttcctcgcggccggggtcggggacgctgggatcgccggaggagcaaccgatgctttccgaccgccgggaagtcgtcgtgaaggtcgatgggaacgggaacgggcacgcgccgttttccttccacggcgcggacgcaggtggcgggggaaaggcggggaatgcgacctccagcacgcactccacggcgaccacgacgccggccgagagcaggccgaggtcgagcgaggcgaactcgcctcggtcgccgcccaaggtgtggcgggaggggagctacgagttctggaacaacgatggtggcggcgccggcgccgccgccaccgaggcgttcagcttcaagaaccgcccgccgccgcaggcgccgcagtcgtcgtccccttcgatgtcgccgacgcagccgccgcggccggaggggggcggcgtggaccctcccacgcggctcatcggcagcttcctccggaggcaggcggcgtccggcggcgaggtgtcgctcgacctcgacctggagatggaggagctcggcaggacggcgcagctgcgctcgcacccgtccttctccagctcgctcgagagggacggccgcgtgtcgttccaggaaccccagaagagtcactccacctcgtcctgttcctccgactctgacaccgacgacggccggaagcgccgcggcgacgacggcgaggtcgtccggtgcacgtcctcgtctaccgcagcgggaacggggccgttgctgcgagtcaagacgcgctcccggctaatggacccgccgccgcagtcgcagcccgcgccggcaccggcaccggcgccggcatcggtacctgccgcgtctcctgtcatcgacgaggagcggaaatcttcaggcttgcggacacctaccaagtccggtcgcctcttctccgggcttatgcacggcaacaagtccggccccgttggtggcaagtcaggtcccatggacgacgacgaggacgacccgttcgtggacgaggacatccccgatgacttcaagcgtgggaagtttgacgctttgaccgtcttgcagtggctcggcttgttcctcatcgtcgcggccttggcatgcagtctcagcataaagatcttgtccacgaagaaagtgctgggtctgcacctctggaagtgggagctcctcgtgttcgtgctcatctgtggccgtctcgtctccggatgggtcatcaggcttgccgtcttcggtgtcgaacgcaacttcttgctgaggaagcgcgtgctctacttcgtgtatggcgtgcgcagcgccgtgcagaacgctctctggctcggcctggtgctcgcctcgtggcacttcttgttcgacaagaacgtccagcaggagacgaactctccagtactgccctatgtgaccaagatactattttgcttccttgttgccacgctcatccgccttgtcaagacattgctgctcaaggtactggcctcgtcctttcatgtctccacgtatttcgatcggattcaagaggcattgttcaaccaatacgtcatcgagacactctctgggccgccactagtggatgaaaaccatgtgcttgcggaggttcatgagctgcaacgagcaggcgcaactataccaaaggagctgcgtgatgctgtaccaaccaagactgtgtctgggcaaaggaacattcagttatcaggggtcatgcctaagggagaaggcagcaagcagctgtcgaaggagaaaggggaggggatctctattgacgcacttcataagctcaaccagaaaaacatctcagcttggaacatgaagaggctgatgaggattgtccgctttgggacgctaacaactatggatgagcagatacaacaagcaacaggcgagggggatgaatcagcgacacagatacgaagtgaatatgaggcaaagattgctgccaagaagatctttcacaatgtagcaaagccaggttccaagtacatatacttgtcagacttgataagattcatgaggcaagaagaggctgttaaagcaatgaatctttttgaaggagcacaggagcacaacagggtcagcaagaggtctctcaagaactgggtggtgaatgcatttagagagcgcaaagctcttgcccttacactcaatgatacaaaaactgcagtaaacaagctgaaccagatggtcaatgtcgttgtggggataattgtgtttgttctctggcttcttattctgggaatagcaacaacacatttctttgtcttcctaagttcacagcttctcctggcagttttcgtatttgggaacacattgaagacagtttttgaggcaattgtcttcttgttcgtgatgcatccctttgatgttggtgaccgttgcgaaattgaaggtgttcaggcggtggttgaggaaatgaatatcatgacgacggtgtttctccgatatgataacctgaagatatattatccaaacagtgtacttgcaacaaaaccaattatgaatttttacagaagtcctgatatgggagaagcaattgacttctctattcatgtctcaactcctgtcgagaaactggccctgatgaaggaacgaatactgcgctacattgacaacaagaaggaacattggtacccgggtgcgatggttgtactccgggacgtcgatgacaccaacaaactgaaagtgtcaatatggctgcggcacacgctcaacttccaggacatgggtatgcggttcgtcaggcgagagctagtgctccaggagatgatcaaagtcctgaaggacctcgagattgagtatcggatgctgccacttgatgtgaatgttcggaatgctcctccaattcagtccacaaggatgcctacaacatggagttattcgtgaatcagtgacagggccggaccatttggccgtgacgttgcagatgcggacttgctatggatttggtggtcttaagctgcaagaactggtggtagcacaagcggattaagctgcaggtgcttggtagcaaatattagaggtagagaatagtagcatattagctagcatgtagaaagctgttagctgtgcctgcagtcgtcacttgtgcaacttgtaattactgtattctcttgcgtgatgataattttctgtacatttgatggggaaatgatggtttggaaagagaagcaattgaaggagatgacatggtaatgtgtatgc

SEQ ID NO: 128692 - DNA, 2278 bp, Zea Mays
ggcggaaactcccttcatttctttcacctccgattcgattccttgtcccctcttgatccgagccgccaccaaaccctaactatctaaaccccccgtctcgctgtccgatggccgccgcctcgccgccgccctccccaccccacgcaaagcgccccaagatgtcctcctcctccgacccggaagccgatgctgagcccacctcggcctccgccgccgttgagggcgccgatcctgcgcagcgtcgtcccaggtacaagcgccgcaaggtcgccatccttctcgggtactgcggcgcggggtatcagggcatgcagaagaatccgggcgcgcgcaccatcgagggggacctcgaggaggcgctctaccaggcgggcgccgtgcccgaggccgaccggtccgcgccgcgccgttacgattgggcacgtgctgcgcgcaccgacaagggcgtcagcgccgcggcgcaggtggtgtccgggcgcttctacgtcgacccgccgggcttcatcgatcgcttgaacgcgcagctcgcgccgcagatccgcgcttacggctacgtgcgcgttaccaactcattcaacgcgaaaaagttctgcgaccgccggaggtacctgtatctgcttcccgtatttgctcttgaccccagcgcacacccggaccgcgaggccgtcatggcgagcatggggagtgggagcgagcttaccaagtgcctggagtgctccgagagaggcaggaagattcctggtgtcatgggccgggaggggaaactgcccagccccgggcagaatggtgttgatgctcccgtggagggaagtagccatgacgaatctggaacacttggggatgcaaaatgtgaccatacaagttcagatggtaataacccatttgcccatggggaagttggatcgaacagcaaggagaagcctgatttaccggtctctggtgatagaactgaagttgcaaatgcaaagatgggatcaaatggcgacggtgctgttgtatcatcagctgatgcagatatttatattgggaacgaggagaagaaacttgagcctgcagccactgaaaataaagctcaaggtatggaatctgagaagatcaatggagaagagaaactgccaactaagagtaccttttcttacactgatgaagtgaaggagaggttcaacaggattctcaagtactatattgggacacacaatttccataacttcactacaagaaccaaagcagaggatcctgcagcaaaaagatttatcatttcctttgctgctgaccgtgttgtcagcctggatgggattgattttgtcaggtgtgaagttgttggacagagtttcatgctccatcagatccggaagatgattggtcttgctgtagctgtgatgaggaactgtgcacctgaatcaatttatgatgtcgcttttcgcaaggatgtcaatcttaatgtgcctactgcacctgaggtcggactgtacctagatgaatgtatgttcacatcatacaacaagaaatggaaggattcacatgaggcagtttccatggaaccttattctgaggaggccgaagagttcaaggtcaagtatattttcactcatattgcggcgatggaacacaaggagggagctgtagctttgtggttgcattcattgaaccacagaaattatccagatttccgttacatggaaactgccgagcacaatcctggtgctgaagttgagagtattgctgctggtgcagagcccaaggttggagctgaagttgagaatactgaagaagtacagatgccaagcgacaatctaagtgagtaataaattttgccaaggggcatgcaaaactgaagaaaatatctgtttgtcgtgttactgagagggacctcaaacatttctaatgagatatcgtaatatagagaatgaaaactcatatgttctccaatggaatatgaacatcaagaggttaatgtgcatcactttatgccatcatgatccctatgttaatcttctgaaataagaacctataggtctatattagtcttatatctgaacttcattaattgcttccagacaattgtatgacaaatggcactcggaaatgtttcagcaatgtttttgtttgctgaaattattatgggattcactattttctcttatctacaatataggtttattttcttgcacttttttcttttcttttggtaatagctgtatatcacttagactgccatagtgcgtcaaatttcattgcagcataatatctattgatattgctagtacattttttgttg

SEQ ID NO: 128693 - DNA, 2269 bp, Zea Mays
ggcggaaactcccttcatttctttcacctccgattcgattccttgtcccctcttgatccgagccgccaccaaaccctaactatctaaaccccccgtctcgctgtccgatggccgccgcctcgccgccgccctccccaccccacgcaaagcgccccaagatgtcctcctcctccgacccggaagccgatgctgagcccacctcggcctccgccgccgttgagggcgccgatcctgcgcagcgtcgtcccaggtacaagcgccgcaaggtcgccatccttctcgggtactgcggcgcggggtatcagggcatgcagaagaatccgggcgcgcgcaccatcgagggggacctcgaggaggcgctctaccaggcgggcgccgtgcccgaggccgaccggtccgcgccgcgccgttacgattgggcacgtgctgcgcgcaccgacaagggcgtcagcgccgcggcgcaggtggtgtccgggcgcttctacgtcgacccgccgggcttcatcgatcgcttgaacgcgcagctcgcgccgcagatccgcgcttacggctacgtgcgcgttaccaactcattcaacgcgaaaaagttctgcgaccgccggaggtacctgtatctgcttcccgtatttgctcttgaccccagcgcacacccggaccgcgaggccgtcatggcgagcatggggagtgggagcgagcttaccaagtgcctggagtgctccgagagaggcaggaagattcctggtgtcatgggccgggaggggaaactgcccagccccgggcagaatggtgttgatgctcccgtggagggaagtagccatgacgaatctggaacacttggggatgcaaaatgtgaccatacaagttcagatggtaataacccatttgcccatggggaagttggatcgaacagcaaggagaagcctgatttaccggtctctggtgatagaactgaagttgcaaatgcaaagatgggatcaaatggcgacggtgctgttgtatcatcagatatttatattgggaacgaggagaagaaacttgagcctgcagccactgaaaataaagctcaaggtatggaatctgagaagatcaatggagaagagaaactgccaactaagagtaccttttcttacactgatgaagtgaaggagaggttcaacaggattctcaagtactatattgggacacacaatttccataacttcactacaagaaccaaagcagaggatcctgcagcaaaaagatttatcatttcctttgctgctgaccgtgttgtcagcctggatgggattgattttgtcaggtgtgaagttgttggacagagtttcatgctccatcagatccggaagatgattggtcttgctgtagctgtgatgaggaactgtgcacctgaatcaatttatgatgtcgcttttcgcaaggatgtcaatcttaatgtgcctactgcacctgaggtcggactgtacctagatgaatgtatgttcacatcatacaacaagaaatggaaggattcacatgaggcagtttccatggaaccttattctgaggaggccgaagagttcaaggtcaagtatattttcactcatattgcggcgatggaacacaaggagggagctgtagctttgtggttgcattcattgaaccacagaaattatccagatttccgttacatggaaactgccgagcacaatcctggtgctgaagttgagagtattgctgctggtgcagagcccaaggttggagctgaagttgagaatactgaagaagtacagatgccaagcgacaatctaagtgagtaataaattttgccaaggggcatgcaaaactgaagaaaatatctgtttgtcgtgttactgagagggacctcaaacatttctaatgagatatcgtaatatagagaatgaaaactcatatgttctccaatggaatatgaacatcaagaggttaatgtgcatcactttatgccatcatgatccctatgttaatcttctgaaataagaacctataggtctatattagtcttatatctgaacttcattaattgcttccagacaattgtatgacaaatggcactcggaaatgtttcagcaatgtttttgtttgctgaaattattatgggattcactattttctcttatctacaatataggtttattttcttgcacttttttcttttcttttggtaatagctgtatatcacttagactgccatagtgcgtcaaatttcattgcagcataatatctattgatattgctagtacattttttgttg

SEQ ID NO: 128694 - DNA, 1540 bp, Zea Mays
atacattacactgaagcaagagcagctgctgtggcctgtgggttcgtgggcaagcaagcagtagtagtcatgcgtgcttatcaaaggggcgcttactgaagagttccttggcattctgtccacctcctctcgccgatcttgcagaaagtttaccagttctgttgcattttttttggaggtgggcatactgccaatggagctgtgtaggcctccctttgtaaagcccacatgacataaatacgagctatacgttggatttgatcatcgcctgtgtcagaaacgccttcattaagctttgtttgctgccttttcttgcgtgtccatttgatgggccttttggtgtcgatcgaggtgccccggccgattcttcttgttttctttgctggggttaaggttcatcatggtcatggcccgtgatatgctttgggggcaaagttttgggggaaagcttttttaggctagctcttagctacatatggtaatctgatccgctctatttccagactaatctcgtctgcttcgaggccgcgcggccatggttttgaccttttgggtgaagacaaaagattacccctctccccgcttcctcgtgcccttcttacggatccaccatttttttttttgcgcgctgccaagttcttcggaagattaaccccgcagtttaggctttctttctgatttcgcatgcaggcggcaggcctgttcctggatctctgaagagattcatctgcagatcatgaggccaggggccagtgttgagaagacagaagcacactactgcaagagtcgcagtacgaacaggaaaactgactttaatatgaagtaagcagccccggtactccgctagtaggagcaggcgcaccagtcgccccaccctgcgatcaatcacgcatagagaaatgctgagaatttggggagcaaaagatttgggcgccgtagctatcaaggtgttcaaaactgcaggctgtctctgaaaaggcaaaggcagcagcagccttcgtcaacaagcgggccggccatggatcgaacctggccctgccgcgcgcagaaatggcttgcgcgaccgcacaaagacggcgacaagggtcagctcatatcacaccaaaagatctccccgatgatggccgagggatctcgtgcccgatcgaatgaggtagtagccggctggagcacgagacagtggagcgtactgtatagcgcgacacccgacccagcgggggcggcgccggccgtgatgagcccgtgatcgatgatgccatccgggaggtgcggcggaggcggagcccagcacccgcagaccacaccgctgcatgcgtcattatgccatttgctgctcccctcgtctgctgctactgcagctcagcagctctgatagtacagtgcagtgaactacagttgcattggccttgcgcctttgctgttgaaattccgggatgtctgctgcgcaccactactatactgctgcaagattggagcttttctcggtggaaaagctgataggcatgtgtggacttttgggaaccgggacgttcttggcgaa

SEQ ID NO: 128695 - DNA, 1472 bp, Zea Mays
gaaacaaaagtatgttctgtctgccaggtaggtcccgccggaacggatcccctgcttcttctaccgaaatcgttgcttccgacgcaccagggccgcgcgccgccggcgaccttgccgtggcccttctacaaaaccgacccgcgccggagctccgccgtcggatgtggcggagacggcgtcaatggcgtcctcctctgctgccgagtccagctcccgcctctctgatcgagcgaggaggtcggcgctgggactcagattcatggtgctcctgatgcacgtgctgttcgttggcgctgtcttcatcctcgatccgaccctcgactggcgaatccacggggagccgtggtatatagggttgtatggagtgcttgttctgctcacgctagtgcaatacttctatacagctggctcatgtccagggtatgttattgatgtaatgagagctggttccatgatgcatgcaaccttcgtcaacactgctgctctttcaaagcagtcaaattcaagaaatggaaacataaattctccgacgagtcgtgctcaactacagaaacttagcacgatgactcctacatcttcatgggcacagatggttatggatctttatcctccagggtcaagcagcagggattggacttgcacttactgcaggattgttcagccacctcgcacccgacactgccatgactgtgataaatgtgtccttcaatttgatcatcactgtatatggcttggaacatgcattggcaaaaggaaccattgtcgttttttgtggtacatatttgaagaaacaatcttgtgtatctggactgctgctctctgcatcgagtcattgtgtttagatgtggacaaggcctggtggaaggactttgttggtgttatcctgttggcagcgcttatccttatcctgatattcctactactattgtggttatttcattcgtacattgctctaacaaatcaaacaacctacgaaattgccagaaggaagcgaatattctacctaaggggagtccctgaaagagttcttccattcagcaaaggcatatgcagaaatctctacgatttctgctgttctagccagaagggatatattctggaagctgtgcccccaagtgaagagctggaagctagagctgcccgttacacgtgccgagatgtcatttgctgtcgttgctgctgataggttgtaccatagcattctgcccgtatagcccagttgcgctgttctctgttcaaggttaagttaatggaagcaaattttagtgacctgcgaccgttagatgcccccagagttcattatttgtgcatagtcatttgtacatttcactcagaaaaatgtgcgctctgagatccagttgttcacattctgtatggctttgaattcaaataggttttcaggacagagaactgatctgtacttcagttttttagtcgaaatgtgtgttggtaatttattttaagattttctt

SEQ ID NO: 128696 - DNA, 3020 bp, Zea Mays
gctggcctgttcgctcctcctcggctcctctctcgcgagctcgcgtccgtccaagcacaagcggacaaaggaaagggagggttaaagaggaagggcggccttagacaacagctcttcttcccatcctcgcctcccttcacgttccccgcactcgctggaggagacgagaggggcagagagagagaccaagaccatcgtcgtcccactccaccccctgtttcgtttcgtgatttcgtctgtttcactccattccctcacccacccaccccgcaacccaacaagcgccgcctgccacaacaagcctggaaaaaagagagagagaggggctcagggccgctcgacgacgcgagtgcaaacaaacccaagagaagattctcccatcaacaacaccccggcggcgcacgatccgtctgtctgcagtgcagcccacgcgccgcatccgccgcgttataatcatccccagcagtccaccccggcaccgtttcgctctcgctcactcccggcgtcagcgtctcccttcaccgcagacccacaaccacggcgtgcctgcccaagcccttggccgagcgccatgccgcgcagcgccggcgccgcgagggtctgagcgaagctttcggcctagcgtttccgggttgagccagccagccagccaggcgatcgatggggtgcaaagggtccaagctggacgaccaggaggccgtggcgctgtgccggggccgcgccgacctgctcgcggcggccgtgcgccaccgctacgcgctcgccgacgcgcacggcgcgctggcggactcgctcgcgtccgtcgccgcggcgctccacctcctcatgaccgccccgcccgagcccccctacggtgggtacccgccgccgggatcgctgcgcctctactacgcgcgtagccgcccgcccccggcctcggtcgccatcgagcagcgcgccccgccgtcggagcgcgtgtaccacgggtccgtcgaaccggcgggtgggcacccgcagtactactcgtacgggggcgagcccgcaggcagggcggccgcgccgccgcccccgtccccgccgaggaccacctcgtgggacttcttcaatgtgttcgccgactacgacgtgtacgacaactactgctacgacgacgccggcggcgtcggggccacgtcggcggcgtacacgccgagcaggagctcgcgagaggtgcgggaggaagagggcatcccagacctcgaggaggaggacgccgtcgtcaagcaggtggccggcgagttctcggcgcccgggagtggcgcacgcagccggcgcagctcgatcggcggcgtcagcagcggcattgcccaagtcgaccaagaggacagttctgtcgtcgataagcaagtcattggcgggggtaacgtggcgccggcgcaacgtaacactgcatcctctgcgcccacaccccgtaggcccgtcgacactacagacgttgccggggagatcaaggcgcagttcgttcgagctgcagacgctgtcagggcactttcaccacttcttgagatcgggaggcggaggtaccaccaccgaagctcagtgtaccatgtttcatcaagcatggtgtcagcgattgccttgccgcattcggacgttggaggcatcgaactcctggacgttggaagtgagaaggtgttgggaggaagaagcctgtgttcgacactggagaagctctatgtctgggagaagaaattgtatgatgaggttaaggctgaagagaaaatgcgtctgctgcttacaaagaatgcaaagcggctgaagtacttggatctgaaaggtgcagaagctcagaagatcgatccgatccgaaatatggtcaggaagttgtcaacaaaattaagaatatctgtaagagtaattaccaaggtctccaaaaagataaacagagtaagggacgaagaattgtggccacaaattaatgccttaatccaagggtttgtaagaatgtggcgagacaagttggactgctaccagatacagtgtcaaatgatctcagaggcaaaaaatctggattcaattgttcctcatggaaacaatcgagacttggcattagagcttgaactagagatgatgaaatggattgtcaatttttcctcctgggtgaacgaacagaggagcttcgtcaaggcgctgaacggatggctatcactttgtcttgactacaaagttgacgagacagtcgacggagttcctccttattcacctggaagggtgggtgctccccttgtgtttgtcatctgcaacagctggtctcaagccatggatcggttctccgagaaggaagtggttacctcgatgcaagctcttgtgtccagtgtgcgcaagctgttggataaacagaatgtggagcaaatggagcagacgatcgctacacgggaaagggaaaaatggaacaaaatactggaaaagaaaactgtggagatcaacaaggaggcagatgtgttgaacaggaagttggccctgataccaggtcggcacagccggcttccaagcgcgcaaacataccaggaacatcttcttgacgcaagcagtttgcagagtagcttgcaccgtgtcgtccaagccctagaaagcttcacctccaattcgctgcaagcattcgagcagaccctgagacatgccgaagaggaaaggtcgtccagggagagcgccaaagtttcatagtgaacaagaatgtagcactatgagcatgttcttactgggaggcatcgacgccgaacatactgggcaaatgctgctcacatagaatttttggtggacaaatcctaactactgtgtttaactgaccaaggctcgtttagggctttaggcgaaggtcccatcggcgtccgtcagcgtagatatatgtagcagcaatttttttataggagaagtgcccttttcggtggtggtatgcttacgaggcgcatcgagttttgtttcattgtgtcgctatggaatgccgtttgttaaggccatgtttgctatagttttaccaacagatccagatttatttttttcct

SEQ ID NO: 128697 - DNA, 652 bp, Zea Mays
gatggtaatactctttgatagaatcctcgagtgggaagagcaaagagaaagaaagaggcagtgaaaagtgaaaagtgagaagagaaaagaagatagtgaagagaagatgagaagaaggttgtcccagaatcaaccctgtgtcagtcatttctccgcagcctgctcaagcagcaacaggagaagaaggccccgtaacacctttgttatgaggtacttcaaggagttcaaatccccaagattcaagagatctaccctcattcattttaagtggggtagtgttccaataaggttcctgtcatggagaaaaataagaaggcatgtagcaagcttgtggaggaccagatcaccaaagcttataagtttctgtatgagaagtggtcacccaagttccgttgatgaagcaccagaagaacaatcaaggaaggaatccatgtgggagttcacaagataaaggtttgtgtgttggcatctatgctccttcaataagcaagctgccaagcgaaagccagaagcctgaagatgatccttgagtagccaaaatcagcgtttgcaatcagcagccggatgctccgcaagggccagactttgttgaagtttcatctcctcgaagagttgcaaagtgaagatatgtagctgaagtaaagctataccc

SEQ ID NO: 128698 - DNA, 143 bp, Zea Mays
cctaccgttatgctgccgaaattccgatcgttcgttcgttcgatcattcgatcgttcatcgttcgttcatagttcctattcatcgttcgttcatagttcctattcatcgttcatcgttcgttcatagtccctattcatcgttc

SEQ ID NO: 128699 - DNA, 896 bp, Zea Mays
gagcccattacacgtcccggttccaaaacgttccagtccctctcacaatccaccaacagcaaccacgtgtcgtgaatgcttttcccattcacgcacatccacccgccgccacgcatcgcacaaacgcgctcccggtccgaaaggcaaaccagccaccagtcccaccaccaccaccctctgtcttcgcctccgctgccgattcgaaagcacccgtcctgtcccctcgcaaaaccctagctccagccaccatgaagggcaaggctgacacctccaagaaggacgagggcaggctccgggcgggcggcgccgccggaaagcgcaagaaggccgccgcgagcggcaagcccaagcgcccgccctccgccttcttcgtcttcatgtctgaattcaggcaggagtatcaggcgctgcaccctggcaacaagagcgttgcgaccgtgagcaaggcagcaggggaaaagtggcgtgctatgtcagatcaagagaagcaaccatatgtggaccaagctggacagaagaagcaggactatgagaagactaaggcaaactttgataagaaggagagcacaagctcaaagaaggctaagactgaggatgaggatggctcgaagtcagaggttgatgacgaggatggcagcagtgacgaggaaaacgatgacgatgagtaaacagtctccaaggtcacgaggtgtttatgaaggggatctattagtttcgcgatgtcgttagtttagtgcattagcaaagaaaaagccgaatgctgctagctgttctgttgcttttcttttgctaaccacttgtgtcacaactttctgtacctgcttcattgattaatctagtgactagtcagttattggttcaatatttggtcttggttttatatatttctgtgttgc

SEQ ID NO: 128700 - DNA, 1061 bp, Zea Mays
gagcccattacacgtcccggttccaaaacgttccagtccctctcacaatccaccaacagcaaccacgtgtcgtgaatgcttttcccattcacgcacatccacccgccgccacgcatcgcacaaacgcgctcccggtccgaaaggcaaaccagccaccagtcccaccaccaccaccctctgtcttcgcctccgctgccgattcgaaagcacccgtcctgtcccctcgcaaaaccctagctccagccaccatgaagggcaaggctgacacctccaagaaggacgagggcaggctccgggcgggcggcgccgccggaaagcgcaagaaggccgccgcgagcggcaagcccaagcgcccgccctccgccttcttcgtcttcatgtctgaattcaggcaggagtatcaggcgctgcaccctggcaacaagagcgttgcgaccgtgagcaaggcagcaggggaaaagtggcgtgctatgtcagatcaagagaagcaaccatatgtggaccaagctggacagaagaagcaggactatgagaagactaaggcaaactttgataagaaggagagcacaagctcaaagaaggctaagactgaggatgaggatggctcgaagtcagaggttgatgacgaggatggcagcagtgacgaggaaaacgatgacgatgagtaaacagtctccaaggtcacgaggtagcaaatcgagtgttaggtccccaattagcttactgttttgctgcctttaaatgttaagttgtttcaaacaggtgtttatgaaggggatctattagtttcgcgatgtcgttagtttagtgcattagcaaagaaaaagccgaatgctgctagctgttctgttgcttttcttttgctaaccacttgtgtcacaactttctgtacctgcttcattgattaatctagtgactagtcagttattggttcaatatttggtcttggttttatatatttctgtgttgcattctgtttgccctacggaagttgaggtgattcgttccttatgaatggtcaatagctgcttctgactcttcggtgaatttgtgactcggtt

SEQ ID NO: 128701 - DNA, 723 bp, Zea Mays
ccaccaccctctgtcttcgcctccgccttcttcgtcttcatgtctgaattcaggcaggagtatcaggcgctgcaccctggcaacaagagcgttgcgaccgtgagcaaggcagcaggggaaaagtggcgtgctatgtcagatcaagagaagcaaccatatgtggaccaagctggacagaagaagcaggactatgagaagactaaggcaaactttgataagaaggagagcacaagctcaaagaaggctaagactgaggatgaggatggctcgaagtcagaggttgatgacgaggatggcagcagtgacgaggaaaacgatgacgatgagtaaacagtctccaaggtcacgaggtagcaaatcgagtgttaggtccccaattagcttactgttttgctgcctttaaatgttaagttgtttcaaacaggtgtttatgaaggggatctattagtttcgcgatgtcgttagtttagtgcattagcaaagaaaaagccgaatgctgctagctgttctgttgcttttcttttgctaaccacttgtgtcacaactttctgtacctgcttcattgattaatctagtgactagtcagttattggttcaatatttggtcttggttttatatatttctgtgttgcattctgtttgccctacggaagttgaggtgattcgttccttatgaatggtcaatagctgcttctgactcttcggtgaatttgtgactcggtt

SEQ ID NO: 128702 - DNA, 2029 bp, Zea Mays
ccggcctcgcgtgccatgcgatgttgttccccaggcgcagcagcacggcagtcctccgtttcctcctcgtcgctcgccccggttgtctcctcctcgacctcccccgtcgcgacaccgcccgatctctctagcgcacggcggacggagaagaggaggagggggggacgatctcattcatcggaccggcgtgcctgtgtcgtctgctgttttcgttattttttctttactctttttttttcttcctcctttgcttgttcaattcaatcagtataataagatttctgatttgggggcggctcgccatgggattcggaatggggaataataacaacggggcgagctcctcgtcgtcgaggctggacccggcggcgccgctgctgccgcgccacggcagcagcgggggccgcgagggtggtggcctgtcgtcgcagcccaagacgttcgccaacgtcttcatcgcggtggtcggcgccggcgtgctggggctgccgtacaccttctcgcgcaccgggtgggcggcgggctcgctgctgctcttctccgtcgccgcgctcaccttctactgcatgatgctgctcgttgcgtgccgccgccgcctcgccgacgagcaccctaagatcgcctcgttcggggacctgggggacgccgtgttcggcgcgcatgggcggttcgccgtggacgtgatgctggtgctcagccaattcagcttctgcgtcggctacctcatcttcatctccaacaccatggcgcacctctatccgattaccgccgcggcctcgtcctcctccgcgctcctctcccccaaggcgctcgtcatctgggcgatgctgcctttccagctggggctcaactccatcaagacgctgacgctgctcgcgccgctcagcatcttcgccgacgtcgtcgacctcggcgccatgggcgtggtcctcggccaggacgtcgccgcctggctcgccaagcccgtgcccgtggtcgccttcggcggcgcaggcgcgcttctctacgggctcggcgtctccgtgtacgcgttcgagggcatcggcatggtgctgccgctggaggcagaggcggcgaacaagagcaagttcggcgtcacgctcgggctgtccatggcgttcatcgccgtcatgtacgggctgttcggcgtcatgggctacgtcgcgttcggcgacgccacgcgggacatcatcaccaccaacctcggagccgggtggctgtcggccgccgtgcagctggggctctgcatcaacctcttcttcaccatgccggtgatgatgaaccccgtgtacgaggtcgccgagcgcctgctccacggcaagcggtactgctggtggcttaggtggctgctggtcgtcgtcgtcggactcgccgccatgtacgtgcccaacttcacggacttcctggcgctcgtcgggagcagtgtctgcgtcctcctcgggttcgtgctgccggcctcgttccacctcaaggtattcggcgccgagatggaatggcccggagtgctgtccgatgtcctgctggtcgtgatcggcctcgcgctcgccgtgttcgggacgtacacgtcgctgctgcaaatcttccaatcgtcaagcgcttgatcgacgcgcgttccgctgcgcgtcgatcatcgcattctccagggcaactacgatacatgtgttgagtgttgttcgtgagtggcttgtattggacgggggaaatctgtacgcttttcgtaccacagatttcagttactcccggtagcagtgtatgtgtatgcgtcctagatgttcctcctgctgtgcacgatgggggatacgatgaaaggacaagattttcacttcgtggaaaaagcttattttgctgttaagtgccaacgtacttcatgcatccagtgctaatttcaattgtgaattggccccttggcccttcgagacaggccaagcagctaggacaaacggatcaattcgagtttgtacgctcgtaatttcggttcccttttcatttggaaggccaatttggatacgcaactgggacaagttgtatc

SEQ ID NO: 128703 - DNA, 1617 bp, Zea Mays
acctcccccgtcgcgacaccgcccgatctctctagcgcacggcggacggagaagaggaggagggggggacgatctcattcatcggaccggcgtgcctggaataataacaacggggcgagctcctcgtcgtcgaggctggacccggcggcgccgctgctgccgcgccacggcagcagcgggggccgcgagggtggtggcctgtcgtcgcagcccaagacgttcgccaacgtcttcatcgcggtggtcggcgccggcgtgctggggctgccgtacaccttctcgcgcaccgggtgggcggcgggctcgctgctgctcttctccgtcgccgcgctcaccttctactgcatgatgctgctcgttgcgtgccgccgccgcctcgccgacgagcaccctaagatcgcctcgttcggggacctgggggacgccgtgttcggcgcgcatgggcggttcgccgtggacgtgatgctggtgctcagccaattcagcttctgcgtcggctacctcatcttcatctccaacaccatggcgcacctctatccgattaccgccgcggcctcgtcctcctccgcgctcctctcccccaaggcgctcgtcatctgggcgatgctgcctttccagctggggctcaactccatcaagacgctgacgctgctcgcgccgctcagcatcttcgccgacgtcgtcgacctcggcgccatgggcgtggtcctcggccaggacgtcgccgcctggctcgccaagcccgtgcccgtggtcgccttcggcggcgcaggcgcgcttctctacgggctcggcgtctccgtgtacgcgttcgagggcatcggcatggtgctgccgctggaggcagaggcggcgaacaagagcaagttcggcgtcacgctcgggctgtccatggcgttcatcgccgtcatgtacgggctgttcggcgtcatgggctacgtcgcgttcggcgacgccacgcgggacatcatcaccaccaacctcggagccgggtggctgtcggccgccgtgcagctggggctctgcatcaacctcttcttcaccatgccggtgatgatgaaccccgtgtacgaggtcgccgagcgcctgctccacggcaagcggtactgctggtggcttaggtggctgctggtcgtcgtcgtcggactcgccgccatgtacgtgcccaacttcacggacttcctggcgctcgtcgggagcagtgtctgcgtcctcctcgggttcgtgctgccggcctcgttccacctcaaggtattcggcgccgagatggaatggcccggagtgctgtccgatgtcctgctggtcgtgatcggcctcgcgctcgccgtgttcgggacgtacacgtcgctgctgcaaatcttccaatcgtcaagcgcttgatcgacgcgcgttccgctgcgcgtcgatcatcgcattctccagggcaactacgatacatgtgttgagtgttgttcgtgagtggcttgtattggacgggggaaatctgtacgcttttcgtaccacagatttcagttactcccggtagcagtgtatgtgtatgcgtcctagatgttcctcctgctgtgcacgatgggggatacgatgaaaggacaagattttcacttcgtggaaaaagct

SEQ ID NO: 128704 - DNA, 1567 bp, Zea Mays
agaatctctcgtgaaactatgtttgaaaatggcttagtggcaaagctcattgccatcagccatgacgttatttgtgccaagcccgtcatgacattaataacggcaactaactcgctctaaaaaaataaagggtccttcgctccttcggtcgcagcctaggaaaaaaaaacgcataatttcagattgagatcgccatggccgccatgggatggtccgacctcccctccgagctcctcaccgacatcgccggtaggatcaacgagctcgccgacatcgcccggtttcgctccgtctgctcgtcatggcgatcggcggcgcgggacgccgtggccgccccgccgccgcagccgccgtggcttctcctcccgtcgtccccgtctcggctcttcttctgcccccgggaggaccgaatctacccaaacctccgcctgccccaccccgccgcagaggtgcaccaccgccgcccccgcccccacctgtacgcgtccccgcatggatgggcgctcgccatcgacccgacagatctggctgcttccctcgtccatcccttcaccggcgccacccgcccgctcccgccgctccccttcttcttcgcggagacggaggacctggcctgggactggtctccgcacggcgtcatggcgtccagcggcgaaggcctgctcttctgcgccgccgatccgacgacagccgcctcctggtccccgatccgtgcactgtacgattgcaacgccagcagcatcaactacgccggcggcaagttcttcgtcttcgaggaggacgtctgccgcaccaccatcgtcgacgcggtcacccttgccatcgccgccgtgatcccggcccccgccgtcgagctccccgccgaggcgcgcgtcgctgtcgccggcgacgagctcttcctcctcgtcaagtcaaagtggatgtacctcttcagcgacgacgttgacttctcgaaggccttccatgtcaaccaccgcagcgtcaattcagcctggcaggagctcacaggcatcggcgagcgtgcgctattcgtagattcccaccacgggttcgcagtgccgacggcggggtttggcaatctcgagagcaacacaatctattcagtgagcagcaagaaggtgaactacagcgtttcggcatttagcctggagacccgtacctcgaagaaacttgcgtgccgcctcaacgaccaggagatggcgatgcgtggtgagatgccatcgtggatcgtaccaagattggatgaagtctgaatctgcagggttgggagattcatcattgttgtgcaatcactgttgatatatggttctaggtaatttcttcggtatccttgcagttcgaaccagcaataatccctatataagttcactcctgtaaattcttgattctgtcgtttaaagttttcttgataatcatgcagtccagtagatttgggtcatatttgtaggaaaattgccttcaaattcagtatactgtgttgatgttctagtttaataaaggattgtatgttctgttcattctcaagcttaaataaaggtttgccatatcagagttgagcgttttaatt

SEQ ID NO: 128705 - DNA, 2634 bp, Zea Mays
cggaaagtagagaggagagagagaaaagtatgacaagaatgagaaagaaatcagacaacaaccttcttagcctcctccatatcctcctctccacttcttctccttcgccatgagttctatgctaggccagcaagaaccatagcgagagcaagcaacagctagtggcagcactcgagaacgagctaggggaggaagggagggtagagagaagatcgacagccctgctagtgtccaacaacccagaggcaagggcggctaccgaaagggaaaagattcccttgttcttgaccggcttctcagggacaaatctggaggcggcgatggcatccaattcatcagcggccgctgtggcagccatgtttggaattagggatgccgaccaccaagaccagatgaagccgctgcttgcgcagcagcaccagcaccagcaccagcaccagatgccacctgcgccgctgctcaacgccgcttcgtcgtcggcggggcccggccaggcggcaggggcaaccccgccggcagtgaagaagaagagaaacctaccagaccctgacgcggaggtgatcgcgctatcgcccaagacgctgctggcgacgaaccggttcgtgtgcgaggtgtgcaacaaggggttccagcgggagcagaacctgcagctgcaccggcgcgggcacaacctgccgtggaagctgaagcagaaggacccgtcgcaggcgcagcggcggcgcgtgtacctgtgcccggagccgacgtgcgcgcaccacgacccctcccgcgcgctcggcgacctgacggggatcaagaagcacttctgccgcaagcacggcgagaagaagtggaagtgcgacaagtgctccaagcgctacgccgtgcagtcggactggaaggcgcactccaaggtctgcggcacgcgcgagtaccgctgcgactgcggcacactcttctcgcggagggatagcttcatcacccacaggggctttctgcgacgccctcgcgcaggagagcgcccgggctgccgcccccaggcctcaccgccagccacctctacggcgccaccaacgcggccaacatggggctcagcctctcgcaggtcggttcccacctcgcatccacactcggtgcggacgctcacggccaccatcaggacctcctccggctcggtggcagcaacgccgcgagccgctttgagcatcttctggggccgtccaacgcctccgcgttccggcccctgccgcctccaccatcgtcggcatttctcatgggcgctccgcaggagtttggcgcaggcgacggcagcgggtcccacgggttcttgcagggcaagccgttccacagtctcatgcatctgccggatctccaaggcaacggcgccgggggtgcctcggcgtcgtcggctacgggtctcttcaaccttggctacatcgcaaacagtgcaaacagctcaggtacttccagccatggccatgcaagccagggacacctgacaagtgatcagttcagcgaaggaggtggcggcggcggctccgagtcatcggccgcgatgctttttagcggcggcgggaacttcgccggtggtgaccaccaagttgctcctggcgggatgtacaacaatgatccggccgtgatgctgccgcagatgtccgcgacggcgcttctgcagaaggcgtcccagatgggctccagcgcgagcgcgcacggcggcgtgtccgtgtttggggggctcgtgggctcgtcggcgccctccgctaggcacgcccgggcacccatgctcgaccagagccagatgcacctacagagcttgatgagctcgctggctgccggcggcatgttcggcggcgccaacagcggcagcatgattgacccgaggatgtatgacatgaaccaagatgtgaagtttagccagggccgtggtggcgctgagatgacgcgcgacttccttggcgtcggcggcgatggtgtcatgagaggcatgacagtggcgagagcgggggcaccaagacggtgccgatgacatgaactccttggaagccgagatgaagtcggcctcgtcgcccttcactggagacaggatgcaataagagttcccaataagagaaccttgtgtgctcgcatagtgagcgagtcctgtgcagcctgccatgcatgcacccatgggtgtactgaatccattacagcaggttgttatagcgtacactgcacaaggcatgggagtagtataaggttgctgcattccatgcaatgatgcaataaagggtaaagacaggtttgcacctaatccgaagacttgcatggtgagcaatgagtatcattcttgatttgctactaatccaaagaggctagatcaagtagaatcatgtgatctattatctattgctccatgcttggtggtttcgttcctgtgtcaaacatttgttttttctgaactatatgtaattggattaattatacctgaggagagatagtattaagcagtaatgctgtagctagctaggttagtagtactgggctactggctatatatattaggggacgatataagagttcatgcccctaaaacttcttctgtttgttgtttttccttctattgtgcttgtgcttaccgtgtactctttaatttggagcaaaaccatttttgttgct

SEQ ID NO: 128706 - DNA, 2322 bp, Zea Mays
gctagctagctagctgggttgggtggcgccaagcaaccaaccacccatattggctctagctaatcgtgcatgcatgccatgcctaacttacttaccacagtactagtgcaagattactcatatatactctatgcgacaatgcatcgatcgatcgaacatgcatgcatatgcatactctatatatatatatatgtgatcgatgatcttgatctttgtttgattcatcgtcagaccctgacgcggaggtgatcgcgctatcgcccaagacgctgctggcgacgaaccggttcgtgtgcgaggtgtgcaacaaggggttccagcgggagcagaacctgcagctgcaccggcgcgggcacaacctgccgtggaagctgaagcagaaggacccgtcgcaggcgcagcggcggcgcgtgtacctgtgcccggagccgacgtgcgcgcaccacgacccctcccgcgcgctcggcgacctgacggggatcaagaagcacttctgccgcaagcacggcgagaagaagtggaagtgcgacaagtgctccaagcgctacgccgtgcagtcggactggaaggcgcactccaaggtctgcggcacgcgcgagtaccgctgcgactgcggcacactcttctcgcggagggatagcttcatcacccacaggggctttctgcgacgccctcgcgcaggagagcgcccgggctgccgcccccaggcctcaccgccagccacctctacggcgccaccaacgcggccaacatggggctcagcctctcgcaggtcggttcccacctcgcatccacactcggtgcggacgctcacggccaccatcaggacctcctccggctcggtggcagcaacgccgcgagccgctttgagcatcttctggggccgtccaacgcctccgcgttccggcccctgccgcctccaccatcgtcggcatttctcatgggcgctccgcaggagtttggcgcaggcgacggcagcgggtcccacgggttcttgcagggcaagccgttccacagtctcatgcatctgccggatctccaaggcaacggcgccgggggtgcctcggcgtcgtcggctacgggtctcttcaaccttggctacatcgcaaacagtgcaaacagctcaggtacttccagccatggccatgcaagccagggacacctgacaagtgatcagttcagcgaaggaggtggcggcggcggctccgagtcatcggccgcgatgctttttagcggcggcgggaacttcgccggtggtgaccaccaagttgctcctggcgggatgtacaacaatgatccggccgtgatgctgccgcagatgtccgcgacggcgcttctgcagaaggcgtcccagatgggctccagcgcgagcgcgcacggcggcgtgtccgtgtttggggggctcgtgggctcgtcggcgccctccgctaggcacgcccgggcacccatgctcgaccagagccagatgcacctacagagcttgatgagctcgctggctgccggcggcatgttcggcggcgccaacagcggcagcatgattgacccgaggatgtatgacatgaaccaagatgtgaagtttagccagggccgtggtggcgctgagatgacgcgcgacttccttggcgtcggcggcgatggtgtcatgagaggcatgacagtggcgagagcgggggcaccaagacggtgccgatgacatgaactccttggaagccgagatgaagtcggcctcgtcgcccttcactggagacaggatgcaataagagttcccaataagagaaccttgtgtgctcgcatagtgagcgagtcctgtgcagcctgccatgcatgcacccatgggtgtactgaatccattacagcaggttgttatagcgtacactgcacaaggcatgggagtagtataaggttgctgcattccatgcaatgatgcaataaagggtaaagacaggtttgcacctaatccgaagacttgcatggtgagcaatgagtatcattcttgatttgctactaatccaaagaggctagatcaagtagaatcatgtgatctattatctattgctccatgcttggtggtttcgttcctgtgtcaaacatttgttttttctgaactatatgtaattggattaattatacctgaggagagatagtattaagcagtaatgctgtagctagctaggttagtagtactgggctactggctatatatattaggggacgatataagagttcatgcccctaaaacttcttctgtttgttgtttttccttctattgtgcttgtgcttaccgtgtactctttaatttggagcaaaaccatttttgttgct

SEQ ID NO: 128707 - DNA, 1734 bp, Zea Mays
catgcatatgcacacgtgattgcatgcatccatatccacgcaggagggatagcttcatcacccacaggggctttctgcgacgccctcgcgcaggagagcgcccgggctgccgcccccaggcctcaccgccagccacctctacggcgccaccaacgcggccaacatggggctcagcctctcgcaggtcggttcccacctcgcatccacactcggtgcggacgctcacggccaccatcaggacctcctccggctcggtggcagcaacgccgcgagccgctttgagcatcttctggggccgtccaacgcctccgcgttccggcccctgccgcctccaccatcgtcggcatttctcatgggcgctccgcaggagtttggcgcaggcgacggcagcgggtcccacgggttcttgcagggcaagccgttccacagtctcatgcatctgccggatctccaaggcaacggcgccgggggtgcctcggcgtcgtcggctacgggtctcttcaaccttggctacatcgcaaacagtgcaaacagctcaggtacttccagccatggccatgcaagccagggacacctgacaagtgatcagttcagcgaaggaggtggcggcggcggctccgagtcatcggccgcgatgctttttagcggcggcgggaacttcgccggtggtgaccaccaagttgctcctggcgggatgtacaacaatgatccggccgtgatgctgccgcagatgtccgcgacggcgcttctgcagaaggcgtcccagatgggctccagcgcgagcgcgcacggcggcgtgtccgtgtttggggggctcgtgggctcgtcggcgccctccgctaggcacgcccgggcacccatgctcgaccagagccagatgcacctacagagcttgatgagctcgctggctgccggcggcatgttcggcggcgccaacagcggcagcatgattgacccgaggatgtatgacatgaaccaagatgtgaagtttagccagggccgtggtggcgctgagatgacgcgcgacttccttggcgtcggcggcgatggtgtcatgagaggcatgacagtggcgagagcgggggcaccaagacggtgccgatgacatgaactccttggaagccgagatgaagtcggcctcgtcgcccttcactggagacaggatgcaataagagttcccaataagagaaccttgtgtgctcgcatagtgagcgagtcctgtgcagcctgccatgcatgcacccatgggtgtactgaatccattacagcaggttgttatagcgtacactgcacaaggcatgggagtagtataaggttgctgcattccatgcaatgatgcaataaagggtaaagacaggtttgcacctaatccgaagacttgcatggtgagcaatgagtatcattcttgatttgctactaatccaaagaggctagatcaagtagaatcatgtgatctattatctattgctccatgcttggtggtttcgttcctgtgtcaaacatttgttttttctgaactatatgtaattggattaattatacctgaggagagatagtattaagcagtaatgctgtagctagctaggttagtagtactgggctactggctatatatattaggggacgatataagagttcatgcccctaaaacttcttctgtttgttgtttttccttctattgtgcttgtgcttaccgtgtactctttaatttggagcaaaaccatttttgttgct

SEQ ID NO: 128708 - DNA, 867 bp, Zea Mays
atgctttgtatgatggcgatggttattaggtctacaaatacgaaccgtcatgctcatgcaccggtaggacaaattacctatggacctattgatgagagggataggaaaagatttgaatatcttaatgacaaaatttggaggaatgatgtcacttgtgttgacatgcttagactcaatagagggtctttcttccggttttgtaaattgtttagggaccgtggcttgttagaggacaccatacacatgtgtgttgagcagcaagtagctatgttcctacacacaattgggcacaatattaggaatagggtcattcgtaccaattttggtaggtccggagaaaccgttagtaggtatttcaacaaagtacttcacgctgttggagagctacgcacggacttcattacgccaccatcatccgctacaccggctaaaattcaagggaatcatcgttgggacccttactttaaggattgtattggggcaattgatggcactcacgtccgagcttcagttcctaaggaaatggaggccgctttccatggtaggaagagtcacactactcaaaatgtaatggcatgcgtagatttcgatctacggttcacatatgtcatagccggatgggagggaactgcccatgatgcgctgattttgagagatgctttagaacgacaaaatggtcttcgagtttccgaaggcaagttttacctagttgatgccggttatggagctaaacgaggctttctacctccttttcgtggtgtaaggtaccacttgaatgagtggggtgtgaaccctgttcaaaatgagaaagaattgttcaaccttaggcactcatcccttagaattacagtagagcgtgcatttggt

SEQ ID NO: 128709 - DNA, 1360 bp, Zea Mays
atgaaagagaccaaggccatgcagtgtagagcaggagctgtctagcaacgcatgaaggactaccaaggccacagcgctaccacaccgtgtggcagtggcactggcaccacgggagaggggcgaggcgactgactgataaggaagaagcaggtccgagctcgccagcagctagccgagcgcgcgtggccgagatgggtggcgccggcggcggcgggaggaacggggcggcgacgaggcggtacaacaggtccaaggtgccccggctcaggtggaccagcgagctccatcgcaacttcgtccgagccgtcgactgccttggcggacaggacaaagctactcctaagctaattctccagctcatggatgtcggagggcttaccattgcccatgtcaagagccaccttcagatgtacagaagctcaggacaagacattaggaggagagaggtgcaaccgcggcggctaggacatctggtggagcactactcattcgccattgatgaggagggaggccccaaagaattcgtctgctgcccacacatgaaaagggcggaggcagggccagaagctgcggccacggccacggccacgcacgaaagcgtgcaggggaacagtgacatgggggctcctggcacccggcgctgcggcgatgattacacgcgagcgattcccattcccatggggagcagcagtagcaggagcaggaggataaccgagggcctcgcatggcagtggcagagcagcggtgccgcctctgccgctcgtgctgccacggccgcttccacgctgcgcgagctgggattctgggtgcgaggaaccgagcccttcaagaccggcaggcccatggcaaatcgtctcagccctgtggcgaggcagctatcttccaagtccaaggagatcaagtgcggagacgacggacgcttcttgttcggcactgcgactagagacgaagcggccaggagacactcgccgtcgcggcggccagactccattgacccaaaggctgtggccgctgtctcttggtccagcgaaggaggcgcctgcgccctcccgccgccgctgtcgtcgaccggcttgagtgcgcgctcagggccgtcaggcagttgcgtattcgccaggcagagagttaacctggacctttccctgtccatatgtggatcatagcttaatcacccgtgctgaattttgtacattcaatgttccatgatgcattgcatgctgtcgatgtgattccgtttggatatcaatggcggcgtgcatgccagcgccacagcctgcggtgattgcccgtctagagtctagaactgtgtgttctaatgaagatctgaagaatggcagttcacatgttccgttctgtgtta

SEQ ID NO: 128710 - DNA, 2513 bp, Zea Mays
tagcccgtggggtttaccttccccttccttcgcggaccccaacttgccggaagcccgcaaccactagcttgatcgatccaaaaccctcatcgatctcgtcgcatacggccatggaagcgcagaccgactccgcccccggcggcggcgacgatcttgcgatcatgcgcgagcagtgccggacactggaggagtccatttccacccgccgtgaggcgcagctcgacctcatcggctccctgcagcacctcgtccccgacctggttccatccctcgaacaatcgctccgcctcatcgccgccttcaacggccgccccttcgtccccacgctgtaccccaacgccagcgtccacgtgcagaaccccaaccttaagccccagcaccgccgcgccctccccggcccggcccgctccacacgcctcaagacctcgccggggtcctccccagcttccgccgccgcccggtgtgcgggaaccagtggtggcatccacgccgttcgtaccatggttgccgtctgtctcctcgagctcgtcccctttgccgagatcgatgccgccgcgctcgcgcgccgcctgcagtccgaaacgtcgtctgccagcgaggccgagcgcgctgctctggccgacctcgccgcggagcttgggggctccgcccccgctgctgttgctcttgccctccgtcgcatcgcagaagacagcggcggcttgcagatcgaggaggccttcattgggggcaagcagatgactatggtctgggccatcgaccggagcaaactcctcaaagagctaccagaatccgcttctgtgctccaaatccaacctccaccaactccacaggtggttcccctcgatactgatactaacatcataccaaggcctccgccactgcagcagtcggatatgtggggtaacccaatgccaccgatgttcccacgtcccaggggcatgacaatgccaagaattccgccaggtttgatgccgctgcagcgaccattcatggcaccaggggcagttatcccaatgggtggtggtccggtgccgagttccacacagctgaagctgaggacagaggaagatgatcttaaggaccttgaactgctgctaaacaagaagacgtatagagagaagcagaatacaaagactggagaggagctgctggatctcattcaccggcctacagctaaggagactgcagtcgctgcaaagtttaaaacaaagggtggctcccagctgaaggaatattgtaccaacttaactaaagaagattgccgacgccaaacaggttcttttgtggcctgtgataaggtccactttcggcgtattatagctccacatactgatacaaatctaggagattgttctttcctagacacatgccgtcacacaaagacttgcaagtatgtccactacgagcttgatcaaacgccagatgtacctcaaatgatggcaggtgccattgcaccacctaggcaaataaagccccagagagctgaatattgttcagaaatagagcttggagaatcgcaatggataaactgtgacattcggaacttcaggatggacatcttaggacaatttggagtaattatggctgaccccccttgggatattcatatggagctaccatatggcacaatggctgatgatgaaatgaggacgcttaatgttccaactctgcaaactgatggtttgatttttttatgggtcactggtcgtgccatggagcttgggcgagaatgtctggagctctggggttacaagcgtgttgaagaaattatttgggtgaagaccaatcaacttcaacgtatcattcgaactggtcgcactggccattggttgaatcacagcaaagaacattgtcttgttggaataaaaggaaaccctttagtgaacaggaacatagataccgatgttattgttgctgaagtccgtgaaacaagcagaaaacctgatgagatgtacgcaatgctagaacgaattagcccaaggacaaggaagttggaactgtttgcaaggatgcataatacacaagctggatggctttcactgggtaaccaattaaatggagtaaggcttgttgatcaagggttgagagcaaggtacaaagctgcttaccctgatgttgaggtccagccaccatcacctcccaggacaagcacgccaatggatgttgaccaaagtagttcacagaaggttgctgcgctagatggtggcgagaggcccgcctgatgctagcaaacttacttgcgagttatcgtgtcaggacccactactgatcatataggtttcatcgcgttacccctgttgtaaaattaggcagctcagtttgtgtttggctactgaggattgtttcagtatatcatgtgaaagaaattgcactgtaacagccccagcaaatattgccgccaatgtaatcagggcccatcttgtcttattttcgaaattccaagtgcatctgtatatccaaaaaattgaaaagaaatctgcttctcttttctgggggcaataattttattc

SEQ ID NO: 128711 - DNA, 746 bp, Zea Mays
aatttatcataaatccatgacaggataaatccagatagggatgacaaggaacttacgcgcatgtatcgcccggttggatctacttccgcgtattcagcatcgaccacatcgttgtgggtcccacaaccaaacacctccattccggatcggccccgacaagcaaatgactctacgagcgagagggggggagggggagagagagagagagagagagagaggaagcaaagaggaatggagatcgccgaagatgtcggtggtccgcccgcggctcctacgcactgtgcgcggcagcagggtatgatggtgcggcgggtgccgggggttcagtgaagggctcggagaacggggcgtaagacggccgcatgcggaggcagcgtcggctgcgcagcgacgacgtcggattggcccgtcccgcgacgcccatggcccggcacccggcggaggatacgcggcagacgcagcacctcattctccatcgatcggcgtcctctcggcggcgtatgcggaacccatgggaggaaaattcctcgcggcgaacatggacggatcggaatcaggtgaggccaggctgggctaggctagggttacgacggattggcggtgcggagcggaagtcggcacgtggaggagggggaggtggtaggcgacggtgaataagcggtaggtaggtggtggggagggaaaggtgggatagggagaaccggagaagacagaagagatactagtagttgggcgttcggaatcag

SEQ ID NO: 128712 - DNA, 672 bp, Zea Mays
cccggttggatctacttccgcgtattcagcatcgaccacatcgttgtgggtcccacaaccaaacacctccattccggatcggccccgacaagcaaatgactctacgagcgagagggggggagggggagagagagagagagagagagagaggaagcaaagaggaatggagatcgccgaagatgtcggtggtccgcccgcggctcctacgcactgtgcgcggcagcagggtatgatggtgcggcgggtgccgggggttcagtgaagggctcggagaacggggcgtaagacggccgcatgcggaggcagcgtcggctgcgcagcgacgacgtcggattggcccgtcccgcgacgcccatggcccggcacccggcggaggatacgcggcagacgcagcacctcattctccatcgatcggcgtcctctcggcggcgtatgcggaacccatgggaggaaaattcctcgcggcgaacatggacggatcggaatcaggtgaggccaggctgggctaggctagggttacgacggattggcggtgcggagcggaagtcggcacgtggaggagggggaggtggtaggcgacggtgaataagcggtaggtaggtggtggggagggaaaggtgggatagggagaaccggagaagacagaagagatactagtagttgggcgttcgg

SEQ ID NO: 128713 - DNA, 195 bp, Zea Mays
atgttccgcgtggtgaggaggtgcagctccttgccggcccacacggggcagatgagcatgctgacggcgaggcacaggaagatgccgatagcgatggtggagacccgctgctgcgccagcgccgctagctcgtcgacgcggtaccccgacacggccaccaggctgtacgtcaggatgaagatggtcacgccgtag

SEQ ID NO: 128714 - DNA, 195 bp, Zea Mays
atgttccgcgtggtgaggaggtgcagctcctggccggcccacacggggcagatgagcacgctgacggcgaggcacaggaagatgccgatagcgatggtggagagccgctgctgcgccagcgccgctagctcgtcgacgcggtaccccgacacggccaccaggctgtacgtcaggatgaagatggtcacgccgtag

SEQ ID NO: 128715 - DNA, 313 bp, Zea Mays
ggcggctggctgccctgcacgacttaaaaatttacatgctgccgtacgtacgttcctgcgaggagccatggactggacaggatcagaggagaggaagtccgcggcatgcgtgatggcgacccgtacgtctctggccttcgccctcctccaggtgagtcgtccgtccgaggaggtgtagtggcggacggcgcgtgcgcacatccgttcctagtgctctgcatgctcggggtcggccggtcggggctcccgcctccgccgctccgtcctcccctccgatccttcgccgaaaacagatccttatttggatcgcagc

SEQ ID NO: 128716 - DNA, 2651 bp, Zea Mays
cgcccgatattcacgggatcctgcgactctgccccacgcctccactagctgagggcctccggaacgcctccgactgtgaatgttgcttactgtaggagaatgccactgtgaagatgaagcgagaaaagtggtcgacaagatggtcaatcaggtccatgtcgtcggagaaggccttataggaaggactctaataagtggggagcaccaatggatttctgatgacatccccttcagtttctctcagataagcgatgaagataacctaggtttatgtcagggttatacttggtggcaacatcagttcctaagtggaataaagactattgctgtagtacctatgccggcgtttggtgtggcacagttcggttccatgcaaaaggtttctgaaagcttgcagtttctggatcaagttaaaggtgcaacatttctgatggaaagtctttcatggtctccttcaacaaaagatgctcagaaagacgctttcatgtacaatccacaatttcaactcgattcttcaaccactagagagggtcttccacgcactaaggctgaaccagaaaactcaaggttggagaatgcaatatccatagattctctgaagaactttgcaattacttcaaatggtctgaatcctcacgtagtggccatgccagtgaactccaaatcgataagtactgttaaattaattcaaagtgacagcaatttgcggtacaataatatttcagagaatgctcaacaattcaaatccgccaaacaacctgattctagttgggcaagtgcagctacatgtttttcaaatttgaccaatcttcaaagaatagagcgcgggctgtcatgcacacctaacaaactacgacattgccttcaaagtgaaaaatcctcaggcttcctggattcgtactcatcaatagtttctacagatgctgagctgaaatgcactttgtttgacaatgccactccatttgttcagagtgatgtgatccaagaggttggtactagtggatctactcgtgcttgtgggctacatgaattgccaaatgaaatatgggcagaaattgcctcaggggaaatgaaaccagtcataaaagaagtcaacgaaaataatggctttctcgaaagcacagcatttgatccagtcatgaatgattggtggggtgacactgccctactagcaggaaacacttcacatctgagtgctactaccatgaactctgtttcaggacaggcaagtagtgaacaattatcaattgaagatagagggctgttttcggaatctgtctttgaggagctgcttggctttgatggtaatgtcggcccagttatggatagcaccgaaccattagctggttttgtctccggttgtcatttgccgaggtacaaccttcaaggttcactttcagtgtgcaaggcacaagtaccgccattgatactcccttccggtagctgtacatccgaaaatgttgtgatgggatcatcaaaagaagcccccgtgtcactgcagaatttatctatggatgattgtggcagtttgaacaccgcaagttccaagatcagccaggtaaagaagcctgaaggagagaaggttgttaagaaaagagctaggccaggtgaaagtacacggccaagaccaaaggaccggcagcagatacaagagcgtgtaaaggagttacgtgagatagttccaaatagtgcaaagtgtagcattgatgctttgttggatcgaacaatcaagcatatgctctttctacaaagtgtgacaaagtatgcagaaaagattaagcaagccgatgaacctaatatgataagcaaggacaatggttctgtattgaatgataactcacatggagttgtcttgaaagacaatccaagtggtggaagcaatggaggtgcgacatgggcctatgaggttgcagggcagactatggtttgtccaataattgttgaggatcttgcaccgcctggtcagatgcttgttgagatgctatgtgaggaacgcggattttttctagagatagctgacaccatacggggatttggacttacaatcttgaagggattgatggaacttcgtgatggaaaaataatggctcgatttcttgttgaggcaaacaagaacgtgacgaggatggatatatttctatcacttgttcagttactgcagcagaacagccgcaatcgatcttcggatcagctagttaaggtcatgaacaatggcattccatcttttgtggatcaccaacaatctcctgcatcaattccggtttggccttgctgagagatagtaattgccacaaacaattcttgtaggccatatttttcaacgagcgttaatgggtacggtttggagttctgattagtacttggtggtgcccgccaactgttgatagaaacgacaggtgttaaggatgtagcaaacgcacattgcggtgtcccgtgtccgaagaaaattcagttagaagatgcacagattctcatgtaacaggtttaggaacattggtgttgtcgtttgtaatttggacactggtgtagtggtgtgaggtagcctatgttgttgtgaagttggtgtgcagtcagtagcaaaattgcctgtgttgctacggtaaataacatttgaaaattaagtgtctgtgttctctttttgatctgctcta

SEQ ID NO: 128717 - DNA, 2715 bp, Zea Mays
gattttactacactagccgcttgcttcgatacgaccggtggtgtagcgtgctgactggctcgatggcggaggcgctgggagcgctgtgccgcgccgggggatggtcctacggcgcgatctggcgccctgaccggcgcgacccacggttgcttactgtaggagaatgccactgtgaagatgaagcgagaaaagtggtcgacaagatggtcaatcaggtccatgtcgtcggagaaggccttataggaaggactctaataagtggggagcaccaatggatttctgatgacatccccttcagtttctctcagataagcgatgaagataacctaggtttatgtcagggttatacttggtggcaacatcagttcctaagtggaataaagactattgctgtagtacctatgccggcgtttggtgtggcacagttcggttccatgcaaaaggtttctgaaagcttgcagtttctggatcaagttaaaggtgcaacatttctgatggaaagtctttcatggtctccttcaacaaaagatgctcagaaagacgctttcatgtacaatccacaatttcaactcgattcttcaaccactagagagggtcttccacgcactaaggctgaaccagaaaactcaaggttggagaatgcaatatccatagattctctgaagaactttgcaattacttcaaatggtctgaatcctcacgtagtggccatgccagtgaactccaaatcgataagtactgttaaattaattcaaagtgacagcaatttgcggtacaataatatttcagagaatgctcaacaattcaaatccgccaaacaacctgattctagttgggcaagtgcagctacatgtttttcaaatttgaccaatcttcaaagaatagagcgcgggctgtcatgcacacctaacaaactacgacattgccttcaaagtgaaaaatcctcaggcttcctggattcgtactcatcaatagtttctacagatgctgagctgaaatgcactttgtttgacaatgccactccatttgttcagagtgatgtgatccaagaggttggtactagtggatctactcgtgcttgtgggctacatgaattgccaaatgaaatatgggcagaaattgcctcaggggaaatgaaaccagtcataaaagaagtcaacgaaaataatggctttctcgaaagcacagcatttgatccagtcatgaatgattggtggggtgacactgccctactagcaggaaacacttcacatctgagtgctactaccatgaactctgtttcaggacaggcaagtagtgaacaattatcaattgaagatagagggctgttttcggaatctgtctttgaggagctgcttggctttgatggtaatgtcggcccagttatggatagcaccgaaccattagctggttttgtctccggttgtcatttgccgaggtacaaccttcaaggttcactttcagtgtgcaaggcacaagtaccgccattgatactcccttccggtagctgtacatccgaaaatgttgtgatgggatcatcaaaagaagcccccgtgtcactgcagaatttatctatggatgattgtggcagtttgaacaccgcaagttccaagatcagccaggtaaagaagcctgaaggagagaaggttgttaagaaaagagctaggccaggtgaaagtacacggccaagaccaaaggaccggcagcagatacaagagcgtgtaaaggagttacgtgagatagttccaaatagtgcaaagtgtagcattgatgctttgttggatcgaacaatcaagcatatgctctttctacaaagtgtgacaaagtatgcagaaaagattaagcaagccgatgaacctaatatgataagcaaggacaatggttctgtattgaatgataactcacatggagttgtcttgaaagacaatccaagtggtggaagcaatggaggtgcgacatgggcctatgaggttgcagggcagactatggtttgtccaataattgttgaggatcttgcaccgcctggtcagatgcttgttgagatgctatgtgaggaacgcggattttttctagagatagctgacaccatacggggatttggacttacaatcttgaagggattgatggaacttcgtgatggaaaaataatggctcgatttcttgttgaggcaaacaagaacgtgacgaggatggatatatttctatcacttgttcagttactgcagcagaacagccgcaatcgatcttcggatcagctagttaaggtcatgaacaatggcattccatcttttgtggatcaccaacaatctcctgcatcaattccggtttggccttgctgagagatagtaattgccacaaacaattcttgtaggccatatttttcaacgagcgttaatgggtacggtttggagttctgattagtacttggtggtgcccgccaactgttgatagaaacgacaggtgttaaggatgtagcaaacgcacattgcggtgtcccgtgtccgaagaaaattcagttagaagatgcacagattctcatgtaacaggtttaggaacattggtgttgtcgtttgtaatttggacactggtgtagtggtgtgaggtagcctatgttgttgtgaagttggtgtgcagtcagtagcaaaattgcctgtgttgctacggtaaataacatttgaaaattaagtgtctgtgttctctttttgatctgctcta

SEQ ID NO: 128718 - DNA, 1118 bp, Zea Mays
atcactcgcctccctccatctttgacccagtcctccgtgacgacgtcgtgttttcttccttccccagtcgcatcccacgcgcccgctcctcgtcgccgtcctcttcctccatctcacccgtccctcagcctcgttaatttttcgcccccatctttgaacgcagcggctcaacctccatcgttctctccctcctcctccccccgatcccgtccctataaattgcgcccccgccgccacagcggaccgcaagcacgcaatcacacagctcgctgctgctgccgtctccccgtgtcctgtcgttctcccgtcgccgggggcggaagagttcggcgggcggttggggattgctcgggagccccgtgatggcgaagctgtacgtgcaagcgttcccgcccgcggatctgaacaagaacaccgagtggtttatgtacccgggcgtctggacgacctacatcatcatcgtcttcttctcctggctcctcgtcctctccgtctttggctgcacccctggcaccgcgtggaccgtcgtcaacctcttccacttcgcgatcacataccactttttccattggaagaaaggaacaccttttgctgatgaccagggaatgtacaacacattgacttggtgggaacaaatggacaatggcaaacagcttactcgtaataggaagttcctcattgttgttcctgttgtcctgtatctgatagctttgcacaccacagactaccaacaacctatgctcttcctcaatacccttgccgtcagcgtgcttgtggtcgccaaactaccgaatatgcacaaggtcaggatttttggaataaatgctgagagctaaacagcgtcatccttcaccagacattttacctatatgctttttcagaacggtctgtatgttccccttctagtgctttagttgggctcattcatcagagtaccatagtttaaaagttgttagcagatgggccttggtcgttgtatagagagatgctcagaggctggactggacatgtcgctgctgtacatctgatgtgcacagattctgtacacccttaatgttgctatatggtttgttgcgagcatctgtcagttgctatatatgtatgtatagtatcattct

SEQ ID NO: 128719 - DNA, 1372 bp, Zea Mays
atcactcgcctccctccatctttgacccagtcctccgtgacgacgtcgtgttttcttccttccccagtcgcatcccacgcgcccgctcctcgtcgccgtcctcttcctccatctcacccgtccctcagcctcgttaatttttcgcccccatctttgaacgcagcggctcaacctccatcgttctctccctcctcctccccccgatcccgtccctataaattgcgcccccgccgccacagcggaccgcaagcacgcaatcacacagctcgctgctgctgccgtctccccgtgtcctgtcgttctcccgtcgccgggggcggaagagttcggcgggcggttggggattgctcgggagccccgtgatggcgaagctgtacgtgcaagcgttcccgcccgcggatctgaacaagaacaccgagtggtttatgtacccgggcgtctggacgacctacatcatcatcgtcttcttctcctggctcctcgtcctctccgtctttggctgcacccctggcaccgcgtggaccgtcgtcaacctcttccacttcgcggtaactgcctctttcgatttctctcaagtcccaagcctcccctccggcctcgtaaattcgtgcggggttcccatttgctgttgaaattttgacccggagtgatttcatggatctgaactcctggagaggctgcacaagcgttaatgcggcggtgctatctgcctatgaagtggcgatgctatctgcgtatgaagcttgcttcgtgctcactcaatcggactaacaggacagtcaaaatataggagttagtttagatcacataccactttttccattggaagaaaggaacaccttttgctgatgaccagggaatgtacaacacattgacttggtgggaacaaatggacaatggcaaacagcttactcgtaataggaagttcctcattgttgttcctgttgtcctgtatctgatagctttgcacaccacagactaccaacaacctatgctcttcctcaatacccttgccgtcagcgtgcttgtggtcgccaaactaccgaatatgcacaaggtcaggatttttggaataaatgctgagagctaaacagcgtcatccttcaccagacattttacctatatgctttttcagaacggtctgtatgttccccttctagtgctttagttgggctcattcatcagagtaccatagtttaaaagttgttagcagatgggccttggtcgttgtatagagagatgctcagaggctggactggacatgtcgctgctgtacatctgatgtgcacagattctgtacacccttaatgttgctatatggtttgttgcgagcatctgtcagttgctatatatgtatgtatagtatcattct

SEQ ID NO: 128720 - DNA, 477 bp, Zea Mays
atctagtgtttttgttactaactgtagcttgcattccccccatatttccttaccaggtatctgatagctttgcacaccacagactaccaacaacctatgctcttcctcaatacccttgccgtcagcgtgcttgtggtcgccaaactaccgaatatgcacaaggtcaggatttttggaataaatgctgagagctaaacagcgtcatccttcaccagacattttacctatatgctttttcagaacggtctgtatgttccccttctagtgctttagttgggctcattcatcagagtaccatagtttaaaagttgttagcagatgggccttggtcgttgtatagagagatgctcagaggctggactggacatgtcgctgctgtacatctgatgtgcacagattctgtacacccttaatgttgctatatggtttgttgcgagcatctgtcagttgctatatatgtatgtatagtatcattct

SEQ ID NO: 128721 - DNA, 676 bp, Zea Mays
agagaggaggtgacgatactcgcctagatctacgcaaagaataaaaggttcgccatggcggtatccaagaacaagaaagcctgccgcggcgaggcagatagatcatcgtgctcacacccacatacatactcctataagaaagcaagagctccaggaccaaggcgcaggccagggagaggcggagaacaagaccaccaagatccaagccggcagattatagcttacctgatgccactgcgccgcatccatgcatgcaaggatcccaattccgctcctcgccagcggttctcccgtgtggtggttgttgcctccgaggggcgaggaagaagacgtacgagctgaggacgactacgacgacgaggacgaggacgaggcgcaggaggaaggaggaggaggagcgtactggagctggatgggacgggcgagggaggaggaatgtcctgtgtagtggaattgctccccggcccccttctctagtcttctccttcatatgtcatgagacgagatagtgcgattctttttctcgcaatatttttatgcgtctagctaggctcgctcgctggaggctgctgctgctgctggtgctggagcgaagcgaagcgaggaggaagagcaaccgaaatcggtgccccggcagttttcggaaacgcgtcaaaaaatttcgtccatgtaacgc

SEQ ID NO: 128722 - DNA, 169 bp, Zea Mays
ctagtgcgggggtggggtcggtcgggggtgcggtgcggtgcgggtgggagggagggactgactggcaactgctcctgctccgtcaggctgctgctgctcccctcgcccgctcggccgcgcgcgaggccctgggccctggtgtggtgggggcgcctggccgcggccgccg

SEQ ID NO: 128723 - DNA, 1200 bp, Zea Mays
atggcgcaggttgttggcggcgagtgccgacgtgagggggaggaggccggacgtatgggaatatggcggacgcaggttgttggccgtgagcagatcacgaggtggaggaggcggttctgttgtcatcgcacaggggcagaggagcggaggttgtccttggagcgtgcggaagggggagcgggtctgttacgcagcatgcggcagggctctacagcgtcaaggcaatggctagagcagctccttggttgcgtggaggagcaggggcgcgaagtggaaagccatagtgcacctgggcaagagcgcgaggtggcaggccaaagtgcacctgggcaagagtgcgaggtggcaggccacaatgcacttgagccggagcgtgaggcaataggctcaagtggacctatgctagagcaggaccacaatgcatttgagcaagcgcgcgaggcgacataccataatgcacctaggcaggaggatgagcttgcacgccaaggttcaccgatgcgtgatgatgataactatggggaggactacgatggagaggccgatggagaggccgatgacgaggttgttacaacgacacaggcaacaaacttcaggtttcggcggtcccttagagttccagcgacacaacccttggaccaacgtagggtcataacacagtgctggtatctgcaggagagaggagctcggtggaggtggcatggagtggcaaaggaacaatttagattggacgatacagcgaacgaagaacatgcaaaacgtgtattccacaatgctgctagaaaagtaataaattgttcaatgtcagatgcacgggtcaaagctgttaccgtgtacttcaagaaagtgaagggtcaaagaatgaccaacaagcaggcatgtgaaatccacttgacagctaaggagttggggatcggtgatggggttgtgagtcgcgatagctttagtcgtcggtctgtttcctcgggtgggagtagatctcgaacttcaacttcaagggaatcagagcttgatgagcaactaagacaacaacaacaacaagtacaacaactatctcaacaagttcagatgatgcagggaatgctgatgcagtttcagattcaaactaaattgagactaattactaggcattccaggaaaaaggatgtgagaagtagcaggtatgtgaaagctgatctgctttactatcccaacttctaa

SEQ ID NO: 128724 - DNA, 1501 bp, Zea Mays
cctccgactgaccactgaccaccagttctgctcttgcgtgacatgatgatgaggggtttagtcggttgtgggcggcaaattatatgcataaaaacctctaaccagaagctaaaacccttaccccttgctaaattagtattttgtaatcaagcggccgctaagcaaataaaccatatcaaggcgtcctcccgcggcccatatatatacacacacacacatcggctttcccatctccggcctcacaccgcaaccgcaagcaagcgaagcgcagagcctgcctgaccagagctagctgagctacagccaacagcagctggtctgactgacatggcgaaggacatcgaggcatcggggcccgaggcgggcgagttctcggccaaggactacaccgaccctccgccggcgccgctgatcgacgcggaggagctcacccagtggtcactgtaccgcgcggtcatcgccgagttcatcgccacgctgctcttcctctacatcaccgtggccaccgtgatcgggtacaagcaccagacggacgcgtcggcgtcgggccccgacgcggcgtgcggcggcgtcggcatcctcggcatcgcttgggccttcggcggcatgatcttcatcctcgtctactgcaccgccggcatctcaggtgggcacatcaacccggccgtgaccttcggcctgttcctggccaggaaggtgtccctcgtccgcgcgctgctctacatcatcgcgcagtgcctgggcgccatctgcggcgtgggcctcgtcaagggcttccagagcgcctactacgtgcgctacggcggcggcgccaacgagctcagcgacggctactccaagggcaccggcctcgccgccgagatcatcggcacgttcgtgctcgtctacaccgtcttctccgccaccgaccccaagcgcagtgcccgtgactcccacgttccggtgctagctcctctcccaattgggttcgccgtgttcatggtgcacctggccaccatccccatcaccggcaccggcatcaacccggcgaggagcctgggagccgcggtcatctacaacaaggacaaggcctgggacgaccaatggatcttctgggtgggcccactgattggcgccgccatcgccgccgcctaccaccagtacgtgctgagggccagcgccaccaagctcgggtcctaccggagcaacgcctaagttccgcccggacgcgccaggagctgggcaccgttccgattctgttcctccacatgacgccctgttctgtttccgtgtggccaggactccgctcgctcgctgctgttttctacttcggaccaaagtgtgacatatctttgctttctgtatatgtatgtaggaatgcatcatgtaaggagaatttggaatacaattgcgtgagtttttatccgatcacaatctattgagtagtggaataaaaaaaaagtcatgtcctttctttaaaagaatgaacttatgaaagtaaagaaaagaacctcacgaggaa

SEQ ID NO: 128725 - DNA, 563 bp, Zea Mays
ccccctccagccatcagtagccacgggctatcctgcgcccaccacctgccctacccctcccctcccctcccctccctcctgccttcgtcctgcccgagctgcccggcgcctctgtcctcctccgggctccacaggccttgccaggcatggggttggccttgttgaaaccaccagatttgtgcctcctagaccccagttcctcggcaacaaggtaacctccgtgcccctgctccctttcctgactgctggtgatgaggatgatcctatccggtgcctcctctgtgaacgcctactcctgggcccctgcaactaagagcctccgccggagtcgccgcggagaagctgctgctcgccgtcgcagccgaggtggtaatatatgctggaagcctattgcataacttcaaccattgattccgttgaagctaatgtcatggaatagaattctcaccactttgttgtagcaatacataaatttgatgaatggattcaactagtgtcatagaatgatagaatggacccgaaatctatattttttgtattgtcacattttgtctcgatgatca

SEQ ID NO: 128726 - DNA, 1829 bp, Zea Mays
ccccctccagccatcagtagccacgggctatcctgcgcccaccacctgccctacccctcccctcccctcccctccctcctgccttcgtcctgcccgagctgcccggcgcctctgtcctcctccgggctccacaggccttgccaggcatggggttggccttgttgaaaccaccagatttgtgcctcctagaccccagttcctcggcaacaaggtaacctccgtgcccctgctccctttcctgactgctggtgatgaggatgatcctatccggtgcctcctctgtgaacgcctactcctgggcccctgcaactaagagcctccgccggagtcgccgcggagaagctgctgctcgccgtcgcagccgaggtaaacatccgtaacaaaaaaatcattgccaagcccccctccctcttcattcattttgtcgttctagtcagttctctgattcgactgctgtatattatttatctttaattggctttatttatttatttatcctactggcgcaaaggcctgcctgcttgctttgggccgttcagtgggtgagatattgttctttgttttggactcttttcggatgcggatatgtgttggtgggttcagggtgtgggttttctagctggggtccgggatttcagttccgcggcgtcacagctgattcgcgacctgacgtccccgcgctctaaatcttcacccgaaaggtgatacaccatgtaggaacagagacaaacctgtgctcaccgcgacctgaccacgtcaattagggatcgggcggtggtctccaactccggcccgtaatttgtcacacaccgaccacccttctcgctcagctatgcttcgagaacgtgcagctacgaagatcgcactcccccacttttcgtggactaagtgccgatgaacagcaccacctcaatctcaatttatttcctttgttccttaggcattaatttgtacgagagatttctttttctgtgacagtttagagagaattgagttcctgaccttatgttgtttgggccattctgaagcgatgggaaatgctagatgtgaaggctcaatcagggatcttgttccctacctataacctgaaacacaacatgcaatgaacaaactttatttttgaaaacaattaagttaccatttgctgagatgtgtcgtgatactgagatgagatgtgtgtcgtgatgctgagatgagatgtgtattagtgcttaaaagtgtcagctttgatctactctgatctaaacttgtttctttaatacttgtgtgcctacgataacaactttgtttacctcctttttctatttaattaaaataacggtctactttaggtctttgtcctgcatatgaatttgacttgaccaaaactcagcatgttcatgcttataattaattgtgcttcttacatatttcaattatcatgcttatttgttatgtgtaaattgaagttttgtgttcttggtctaactattttcttatagtcttgaaaaataactcgtacctttcataatgaaactgttgttgattggttgaattttcaggtggtaatatatgctggaagcctattgcataacttcaaccattgattccgttgaagctaatgtcatggaatagaattctcaccactttgttgtagcaatacataaatttgatgaatggattcaactagtgtcatagaatgatagaatggacccgaaatctatattttttgtattgtcacattttgtctcgatgatcatggtgtttgtcttagttctacaaatgacttgggatcttgatattttccttttttcacctactactatgttgcaattttgtttaccagtgcc

SEQ ID NO: 128727 - DNA, 704 bp, Zea Mays
atatagctagctagatcagctaataggtacatatacatccctccctatatactagcaatggactatcagctcttcttgttaattagatggttatccgtatctaatgggctaacaacgactagccagcagccctaatgataataatgtttatacatgacaatggcatacatttcttgatgtataaactatgtatcagttgggagaataaaatcagaaatatatgataacccagctggggtaaatgatcaaatatatctatatatggaaggtaaaaatactcatatcatggataaataaatatcgtccaggagctatttccggtgcacccacagcaactgccgcgtgaagaaacgggtggagcggctgtcgacggactgccgcatggtgatgaccacgtacgagggccgccacacgcactctccctgcagcgacgacgcttcctccggcgaccacaccgattgcttcagctccttttgatgaaccgtatctgttctgtcgtcccacgaccacgatagatgttgttggtgatcacggtcttcaatcttgccgaatgaatgacagagcgtgtggtcgatgaaccctagctagtcatgcatgcgtagtgtactcatcatgtaatccgatgtgatagatggtccatcgtccatcggtgtaggcggtcatgtgtagtgttgtatcaaataaagctacactgccttttgttc

SEQ ID NO: 128728 - DNA, 539 bp, Zea Mays
ccccacctgttctccaccagccccggaggtcgacacgtgcgccacaccatagggcagggcccagggagcccggcgacctccatctccatggccgagtgcgaggagctggtggagagcggcggcgccgaggaggacatgccccgcgtcgtggccgccctcgccggcatcctggagcgcgtcgcgaaccgcaacgacgcggcggcggccgcggaggtctcggccgtagccccggcgtcggcgttccgggcgacgacgaagccgggcatctcggtgcgcgcctacatggcgcgcatcgcgcggttcgctgggtgcagccccgcgtgctacgtcgtggcctacgtctacctggaccgcctcctgcgccgcggccgcctcctggcgctcgccgtcgactcctacagcgtgcaccgcctcctcattaccgccgtgctcgccgccgtcaagttcatggacgacatgtgagtcctccgatccctctctctccatgcctatgccctgtggggtatcgcgatcaaacgaaccaactgtcctgctgaatt

SEQ ID NO: 128729 - DNA, 969 bp, Zea Mays
ccccacctgttctccaccagccccggaggtcgacacgtgcgccacaccatagggcagggcccagggagcccggcgacctccatctccatggccgagtgcgaggagctggtggagagcggcggcgccgaggaggacatgccccgcgtcgtggccgccctcgccggcatcctggagcgcgtcgcgaaccgcaacgacgcggcggcggccgcggaggtctcggccgtagccccggcgtcggcgttccgggcgacgacgaagccgggcatctcggtgcgcgcctacatggcgcgcatcgcgcggttcgctgggtgcagccccgcgtgctacgtcgtggcctacgtctacctggaccgcctcctgcgccgcggccgcctcctggcgctcgccgtcgactcctacagcgtgcaccgcctcctcattaccgccgtgctcgccgccgtcaagttcatggacgacatatgctacaacaacgcctacttcgccaaggtcgggggcatcagcctggtggagatgaactacctggaggtggacttcctgttcggcgtcggcttcgacctcaacgtggcgccggagacgttcggcgactactgcgccgtgctgcggtcggagctactgtgcgcggaggctgccccccgcgccactcaggctgcagcactgctgcctgtccgaggatgacgccggggcccggatgcagcgcccagcagcagctcgctgcatgaatgaaagaaacctaagcccatcgatcgacgactcatccggtggcttgggcgcaggagttgtaagccggtgcaaatttttccaaattattagatgttttgtcttttctagattataaagctttcgatatatacacacatctatatatacagtgtgtctagaggtgtagtggtggtgtaggtcgtcgtcggttgtaccagctgctacagtagattgtgtatacagtgctggtgtctttggtgactttctgaa

SEQ ID NO: 128730 - DNA, 113 bp, Zea Mays
cttctatttaccatttggacacaatttgggaattgaagaaaactttgcaggggccaggggtcttactacctacccttccttccccctacatgttaaatttcctatccgagcaa

SEQ ID NO: 128731 - DNA, 564 bp, Zea Mays
atggtcccgccgccgggaaacctgagcctgtcgccgtcgacgcggatccagttctgcaccgccttctcgacggtgagctccttgtgcggcacgttggcgaaccaggcgacgtcgcggctggcgggccacgggaacggggcccggtacccggccggcacgggcaccaggcaccgcagccgctcccgctccgacgccgggcagtgccgctcgcggtacaccaggcggtcccgcgggaaccgcagcgacctctccacgtcctcgcacggcgtgtactccgagtacttggccgggcacgccgggtacctccgcctccgaggcgcggccgaggaggaggaggaggaggagccgccggacgaggcggtgccagcgtcgagcgccgcggccgcgtggcgcgtggagaagtcgaggggcggggggcccgagctggagctgctggcgcgggaccgggtcctcctcttcggggtggcggcggtgttcgtgcaggcgacggcggtggcgatggagacggcggttctgtcggatggggaggcgaagccgccgtgctgccagacgccgacgaggtag

SEQ ID NO: 128732 - DNA, 240 bp, Zea Mays
atgaagagagaatatgaagaattcaaagttagggtaaatggccttgttgctaaggcacagaaagttcccgaggaaggatggatcatgcaagatggcacaccatggctaggaaacaataccagggaccatcctagaatgattcaggttttccttggtcacaatggtggccttgatactgagggcaatgagttaccccgtttggtctatgtttctcgatatgccaacaggaacaccgtgtaa

SEQ ID NO: 128733 - DNA, 2099 bp, Zea Mays
gcagcaccggcggcactcactctcgccaaccacgcataaattattcggttctctttgccactaccgtcgcctccgcgacggagacagcgcgctatagcctgcgcgtttcgggactcgcgcagcggcagtcctcagctcccgagacgtccctctctccctccgagacgcaggtagagcggcgcgttcccctgcttcgggtatgtcgtactgcgccggcgccacggcggcgttccgggacgccgacggtgccggcgaggaggccctgaccgcctgtttgctccccaaaaccgaggtccggctagcggttgaggacctgccgccggtgctcacgagcaagccgccaggccggttcgcgagggcggtgaaggaagcctggtccgtctcgctgtccgtcacattccccatgatgccgtcgatgtcggccggcgcagcgggcgcggaggcgcggtccatcctgagcctcgcgctgccgatgatcctcacggggctgctgctatacctccgctccatgatctcgatgctcttcctcggtcgcctaagcgggctggcgctggccggcggctcccttgccatcggcttcgctaacatcacgggatactctgtgctgtccggcctcgccatgggcatggagccaatctgcgggcaggccttcggcgcgggccactacgagctcctcggcgtcaccacgcagcgaggcgtgctgatgctgctcgcggccgccgtgcccatcggtggtttgtgggtgcacatccggcctctgctcctgctctgcggccaggacgccggcatcgccgcggtcgccgagacatacattcttgcctccctgccggacctactcctccaggcgttcctccaccccgtccgcatctacctacggacgcagtccatcaacctgcctcttaccctgtgcgccacgctcgccattgcgctccaccttcccatcaactacgtgctcgtctctgtcctgggcctcggcatcaggggggtggcattggcctccgtactcgccaacttgaacctcctcctctttctcttcgcttacatcctcttcaagggcgtccacaagcgcaccggcggcttcgcgctgtcggccgagagcttccgcggctggggcgagctcgtcagcctcgccctgccgagctgcgtcagcgtctgcctcgagtggtggtggtacgagatcatgatcctcctgtgcggcctcctcgcgaacccgcaggcaacggtggctagcatgggcatcctcatccagaccacgtcactcatctacatcttcccttcctcgctgggcttgggcgtctcgacgcgcgtcagcaacgagctcggcgcgaaccggcccgaccacgcgggccgtgcggccacggttggcctcatgctcgggttcgcgttcggcggcgtggcgtccgcgttcgcgtacctcgtgcgcggcgcgtgggcgaccatgttcacggccgacccggcgatcgtcgcgctcaccgcggccgtgctgcccatcctgggcgcttgcgagctcggtaactgcccgcagacgaccggctgcggcgtgctgcggggcagcgcgcggcccaaggacgccgccagcatcaacctccggtccttctacctggtgggcacgcccgtggcgctcgtcctcgccttctggtaccactacgacttccagggcctgtggttgggcctcctcgcggcgcaggcgacctgcgtggtgcgcatgctgctggtgatcggggggacggattgggtcgccgaggccaagcgcgcgcagcagctcaccggagcacgcacggtggaggaaacgaaagagagcagcggcaagagcagtcacgtcgttgaagtcacagcagccggcggagacgaggagctgggcttgcctatcgacgttgtgatcgatagaccaaaggatcagtgctgacatccaacgcaagcatctgcttgccattcaacatttggagcgattttttgttatataatttttggcgggagggagaggaaccgcaagctgacagagtgacaattttgtttcgaattggttgtttgtaaatgattattttcgatggttattagaggaaatgagattattgacaggaaaacgaaacatatacttt

SEQ ID NO: 128734 - DNA, 1016 bp, Zea Mays
cgcgcaacactcgaatagctagctgacagctgctggggagggagggagggatatacctgtgcgcgtgcacgcgccatagataggtaggtgcactgactccactgctgcaggagctgaatttggcacatgtcagcaggtgcccaaacagatgggcgtgccctaacggttcatggctgagaagcagccgccggcaccccattctccttccccggcggtgcaggtgcaaccggccgggccggcagccggcggccacagccaccaccaggcggcttctgcttcggcttcgggcccagcctcgcctcattccccttctccggtggtgcagcagggcgacgggacgtcgtcggcgcgggcagctgccatcacggctccgccgatggcgacgacgaccgcgacgagctcgggggagccgtcgccgcggtcgtccgggaagcacgcattctaccgaggcatacggtgccggagcggcaagtgggtgtcggagatccgggagccccgcaaggcgcggcgcatatggctcggcacgtacccgatggcggagatggccgcggccgcctacgacgtggcggcccgcgcgctccgcggcgccgacgccgtgctcaacttccccggcgcgatcgcctcgcgcgcggccccagcgtccgcgtcccccgaggacatacgcgccgcggcggccgcggccgcggccgccgcgcagctcgagtactcgcatcagggtcgtaccgccaatcctcctcctcctcctgcttctcctccttctcctgctgctgctgctgcacaggactggcatcaacagcacgacgcggcggcgagctacacgccgcagcaggaggccggcactgacgagttcatggacgaagaggccatcttcgagatgccgcagctcctgcggaacatggcggcggggatgatgatgagcccgccgaggctcagccccgacacctccgacgagtcgcccgacccgtccgaggccggggagagcctctggagctaccgtgacccgtagattgttgcac

SEQ ID NO: 128735 - DNA, 1129 bp, Zea Mays
cggccacgtccctctccacgcgctaacctatatagcccgccacctttccctccaaattcaaatcaaatgctccgactcgttcctccccctgctcgccacgcccacggccactaccactcacacacacaggcagcagccatggacgccgccggctccttcagcgactactcctctggaaccccgtcccctgtcgccggcggcggcggcggcgacgacttcggctcctcctcctacatgacagtgtcatcggcgccgcccaagcgccgagccgggcggaccaagttcaaggagacgcggcaccccgtgtacaagggcgtgcggcggaggaaccccgggaggtgggtctgcgaggtgcgggagccgcacggcaagcagcggatatggctcgggaccttcgagaccgccgagatggcggcgcgcgcgcacgacgtcgccgcgctcgcgctgcgcggccgcgccgcctgcctcaacttcgccgactcgccgcggctcctcagggtgcccccgacgggctccgggcacgacgagatacgccgcgcggccgccgtggcggcggaccagttccgcccggcgcccgatcagggcaatgtggccgccgaggaggaggcggccgatacaccaccaccggatgccttgcccagcgtgacgatgcagagcgtcgacgacgacccgtactgcattatcgacgacaggctcgacttcgggatgcaggggtacctcgacatggcgcaagggatgctcattgatccgccaccgatggccggttcctccaccagtggcggcggcggcgacgacgatgacgacgacggtgaggtcaagctctggagctactgatggccgatcgcacgtgtgtctgaaggaagacaggttgcattgggcaaataacttccctgtacagccttgggaagaaccggtaccggtgaaatgtactggccgtggccctttcccttcggttcgtctatgctatgtaatgttatgtatcctgctcttctgatgattaagggtattcaggagaagcagaagactgggtttactcggtttgatcgtttaatttaatttggagctagagatgtacctgcatgcatatataatgcatgcacggtaactgtgatataatattcagagtgcc

SEQ ID NO: 128736 - DNA, 1374 bp, Zea Mays
gttggccgcaattttacacaccccaaggtctcgcaaatcaggttgcggtcctcgtaccaaccctggccatgttcggttcggttgcctatcgcctcctcctgctcctcttccgccgccgccgctgccgctgctccctaggtgaacccgtcgtcgcctcgcctgggcccacaacgccctcctccgcctgtgagcaaggcacccctctcagtcttgtgcagggcgagttgctgccatggcggttgttttttgcgggcacgagctctgcccgcctccagtcttggatgtcgtggccaggtgcctacttccccctccctccctccactcgagactccatgtcgccgccacacgacactacgcatccgctcttcttcctcccctcgtctcggcggctagcgtccgctccctcgacgcctccgtccatgcccggctccagcactcgctggctccccgagggagttgaatgaagaaaggaagatcaaggattgaagcagtttacgcatggccctgagattgcattaactctttctcagaatgatattgagctcctggccttcctgttggccatacgagaatgaggtgtataggtagaagtccaagagaaacatccatagccggttggggatgtccggttctgagctgccacatagctgatgggatttcaagatggcatgccagctgctcgtgcataatcagtgggttttgcatgactggggtgatggtgattgtaaagatactaaagaactgtaagaaagctatacctcccatgattgcagaaggaaagatgataattctcgatatggttgttggaggccagttgccaaacattaagtacaaagatattcatgtcttgtttgatctcttcatcatgtatgtctcatgtctgtcaatggcgctgagcgagacgaacaaaagtggaaaaacatcattttcgaagctggatttagcgactacaaaaccatactcgttctaggtgttcgattcatcattgaggatgggagagtattgaatgcttctctagatactattcttggtccatcaaatctgcttgacccaaatgcaagttttgctcaaatgtggcaaaaaatgattgtctcaccaattgtgagcacacctgttttcagcaaagttccagagaagaaaaagacggaatggaactcaaaatttggtggccgctcaagtggaattcatatatacttagttaggctcaacgttagcttaaagcttaaatagttgatgacctagtttttaactagtaattttagtttggatttagagtacacttatatatgagttatttgacaatgattatttatgatatacttaatgatacttatttatattatgttaattataatgttatcaaatatatatata

SEQ ID NO: 128737 - DNA, 462 bp, Zea Mays
atggcatgccagctgctcgtgcataatcaggtcaagccaatgggggatttattaggagtaaatcgttgtattcttgatgtcagattgttgagtgttagaggtcaatggatagggattgggttttgcatgactggggtgatggtgattgtaaagatactaaagaactgtaagaaagctatacctcccatgattgcagaaggaaagatgataattctcgatatggatgggagagtattgaatgcttctctagatactattcttggtccatcaaatctgcttgacccaaatgcaagttttgctcaaatgtggcaaaaaatgattgtctcaccaattgtgagcacacctgttttcagcaaagttccagagaagaaaaagacggaatggaactcaaaatttggtggccgctcaagtggaattcatatatacttagttaggctcaacgttagcttaaagcttaaatag

SEQ ID NO: 128738 - DNA, 2151 bp, Zea Mays
gcgtgctggggagacagcctaaacgcaaccagtagccggagtccgaagtcgggccctcccttctgcccgcgaccgcgttagctaaacccgacccagcaaccaggccaccgctcctttcctctccgatccggatctccccacccgctccggcgagccatcgccgcgtcgcctccacgcgaccgactacttctcatatcaatctatctatccggcttacccgccgccgcacgcaccaaggttgcgttcaccatattacctgtttgcttatcttctcccgagcccagcaaaccctagccgccgccacccatggacatagaggccgacggacgattcggcaacaaacgagtgcacaatcgcctaggcccgggctccggcggcgctccaccatctaccaacggaaaggtctgcaactactggcgtgccggtcggtgcaaccgctttccgtgccccttcctccacagcgagctccccgaggctgcgccgcccaagcgccccactggacccggggggaacgtatggcgcaaccccaacaccggaggacgaggaggtggccatcacaatagatgggggaagggcccaggagggggcagcgggattgcgagccacaagccgcctgagaggccctgcaagtactttctcgccggtaccgaatgtagctatggcgagaggtgccgctatccgcacagctactgcataagcgatagtatcgcgatgcttaccttgctcaagggacacgagcagggtgtcacgggcattgcactgcccgctgggtcagacaagctttattccgggagtaaggatggaactgttcgcatgtgggattgccaaactgggcagtgtgctggtgtcatcaccatgggtcgtgaggttgggtgtatgatcattgaaggtccgtggttatttgttggaatacctgatgcagtgaaggtttggaatatgcaaacagcagcggaaatgagccttactggaccaactgggcaagtctatgcactcgccgttgccagtgagttactctttgctgcaacacaagctgggaggattttagcatggagatttagtgccgcaactaactgttttgagccagctgcttctctagatggccataagcttgctgttgtttcattgatagtaggaggcatgaggctttattctgcttcaatggataaaactatcagagtatgggatttggcaactttgcagtgcatacagactctttctgatcataccgatgttgttatgtccgtgctttgctgggatcaatttctattatcttgctctttggatcaaacaataaaagttagtcgccatctacatcatcattttgttgagtttgggccgctacagagagtggaaacttagaagtaacatatacacacaaagaggatcagggtgcacttgccctcagtggtatgcctgacgcacagtcaaaacctgtgctactgtgttcattaaatgacaacactgtccgcttatatgatctgccatcgttcagtgacagaggcagattattctccaaaaaagaaattagggcaatacagatgggtcctggtggtttattttttaccggggatggaactggtgagctcaaggtttggcagtgggtagatttagcccaaacctaatgaacatagtgtgctagattagttttctctcatgtattttatgagggagttcgtacaaatacgcataatgagttcaggttgtggtcggtggccagttctttttttgtaatatgccccacatttgtcacaaatgacacgagattcggtggatctgttcggcagtaaaatcagaagcagagtatgtgttatggactgtagttttgtcctggaatggattttaagacaggagaataattggttgttgtaatatgtaaggcactggaacgagcaattctgacgactgcttggaggtggtggcagtttcaaaaggatatatgctaatatacaagggtttgttcagccgcatttgcaaatgagcaggtcttttcacggccgtaccatttttcacaactgttgaatgatcatgttttttttgtaacctcgatcagtcatttggctcggtttttggaagctgcacacagaacctgtgccgatatttatctatatttgttcctggatagcttccaggctcaggctctgatgatatttt

SEQ ID NO: 128739 - DNA, 2119 bp, Zea Mays
gcgtgctggggagacagcctaaacgcaaccagtagccggagtccgaagtcgggccctcccttctgcccgcgaccgcgttagctaaacccgacccagcaaccaggccaccgctcctttcctctccgatccggatctccccacccgctccggcgagccatcgccgcgtcgcctccacgcgaccgactacttctcatatcaatctatctatccggcttacccgccgccgcacgcaccaaggttgcgttcaccatattacctgtttgcttatcttctcccgagcccagcaaaccctagccgccgccacccatggacatagaggccgacggacgattcggcaacaaacgagtgcacaatcgcctaggcccgggctccggcggcgctccaccatctaccaacggaaaggtctgcaactactggcgtgccggtcggtgcaaccgctttccgtgccccttcctccacagcgagctccccgaggctgcgccgcccaagcgccccactggacccggggggaacgtatggcgcaaccccaacaccggaggacgaggaggtggccatcacaatagatgggggaagggcccaggagggggcagcgggattgcgagccacaagccgcctgagaggccctgcaagtactttctcgccggtaccgaatgtagctatggcgagaggtgccgctatccgcacagctactgcataagcgatagtatcgcgatgcttaccttgctcaagggacacgagcagggtgtcacgggcattgcactgcccgctgggtcagacaagctttattccgggagtaaggatggaactgttcgcatgtgggattgccaaactgggcagtgtgctggtgtcatcaccatgggtcgtgaggttgggtgtatgatcattgaaggtccgtggttatttgttggaatacctgatgcagtgaaggtttggaatatgcaaacagcagcggaaatgagccttactggaccaactgggcaagtctatgcactcgccgttgccagtgagttactctttgctgcaacacaagctgggaggattttagcatggagatttagtgccgcaactaactgttttgagccagctgcttctctagatggccataagcttgctgttgtttcattgatagtaggaggcatgaggctttattctgcttcaatggataaaactatcagagtatgggatttggcaactttgcagtgcatacagactctttctgatcataccgatgttgttatgtccgtgctttgctgggatcaatttctattatcttgctctttggatcaaacaataaaagtttgggccgctacagagagtggaaacttagaagtaacatatacacacaaagaggatcagggtgcacttgccctcagtggtatgcctgacgcacagtcaaaacctgtgctactgtgttcattaaatgacaacactgtccgcttatatgatctgccatcgttcagtgacagaggcagattattctccaaaaaagaaattagggcaatacagatgggtcctggtggtttattttttaccggggatggaactggtgagctcaaggtttggcagtgggtagatttagcccaaacctaatgaacatagtgtgctagattagttttctctcatgtattttatgagggagttcgtacaaatacgcataatgagttcaggttgtggtcggtggccagttctttttttgtaatatgccccacatttgtcacaaatgacacgagattcggtggatctgttcggcagtaaaatcagaagcagagtatgtgttatggactgtagttttgtcctggaatggattttaagacaggagaataattggttgttgtaatatgtaaggcactggaacgagcaattctgacgactgcttggaggtggtggcagtttcaaaaggatatatgctaatatacaagggtttgttcagccgcatttgcaaatgagcaggtcttttcacggccgtaccatttttcacaactgttgaatgatcatgttttttttgtaacctcgatcagtcatttggctcggtttttggaagctgcacacagaacctgtgccgatatttatctatatttgttcctggatagcttccaggctcaggctctgatgatatttt

SEQ ID NO: 128740 - DNA, 3144 bp, Zea Mays
ggagatgggggaaaggaaaaaagaaacaggagtcaggagcagaggccaggggtggcgaggcatttttggccacaggggcgcagccaaaaggcgtcgtcccatcgaatccgccacgtccgcatcggcgacccggcaggaacacggccgcgggcagagtgcctgtctccgccacaaccccggcgaggcccccctccccctccgtccacacctcctcccctccgtcctctctctctctctctctctctctccctgccgcgtcgccgctataaatacctcttgccgccgcctccttccctcccatctccaacgccaagcacatactgacacacacacacacacacaagcccattgcattcgccaaacattcgcccacgcgccattgtagcgcacgagctcccgaagccctcatcgccgtgccgttcgtctcgccggatcgatcgctccgcccctgctcctggctttggtgccgtatgcccgtccgtctccatagggcttgcattctctctgctttgatttgacggtacccagctgaagcacacaaattgcctccgtttgccggtcctgtgcgtgcgcgatcgagttttgttgatggtcatctagcaggatcgcaggagttgacgagccgcacgccctagctcgtacgtgaaaaaaacgtggccacgtttcaggtgctgaaaccaagatggttaatttcggtaagaaattgatggcagaccagttggaggagtggcgagagtactatattaattataagatgatgaagaaaaaggtaaaacagtatgtacagcagacccaaactggtggaaaaaatcgtgaccaggttcttaaggagttctcaaggatgcttgatgatcagattgaaaagattgtgctatttcttctgcaacaacaaggtcatcttgctaggaggatcgagaatttaggagaacagcgtgtcgtgcttatggaacggtctgatgtatcccaaatttgtcaaatacgccaggcttacagggaagttggatatgatcttgtgaagctacttaggtttcttgattcgaacgctactggtatccggaagatacttaagaagttcgataagcgctttggctataagtttacagattattacgtctctactcgagcaaaccatccttattctcagctccagcagatcttcaagcaagtgggagtcgtggctgttgttggtgctttgtctcgcaacctttcttatctacaagatcatcaaggaagcctagcaaatatctatgattacccatcactcatcttgaaggatcccgtcatagaacaaataaatcactcagtacagaaactcacacactccacaagctttctgcaatttctagggcagcatgcacttatcgttccgggggatatgcagagcggctcagatctcggtgatgacaaggattaccatttcctgtcactgctgctgaacctagtaaacacgtttctgtacatggttaacacatacatcatcgttccaactgccgatgactattcagtaagcctcggagctgcagcgactgtttgcggtgtgattatcggatcaatggcagttgcacaaatcttctcctcggtatatttcagtgcctggtcgaacagatcgtacttcagacccctcgtatttagctgcatcatgttgtttctggggaacctattgtatgctttggcatacgatctgaattccctaactgttcttattgctggccggctactgtgcggtttgggttcggccagagccgtgaaccgccgctacatcagcgactgtgtacccctgaaaaccaggctgcaggcgtcggctgggtttgtcagcgctagcgctcttggaatggcatgtggtcccgctcttgccggtctgctgcagacaaagtttaagatttatgggcttacattcaatcagaacaccttgcctgggtgggtcatgtgccttgcttggattgcatatttgttctggctgtggatttcattcaaagagccgggccacattgccacagagaattcagtcagcacgcaatcatctgattctggccgtcgagtaagcggtaacttggagggtggcctcggagagcctttgctcatagacgcaaaggcagggcaggatgaggacgacgaggacaatgacgaccccgaagaatctcatacacctgccacatcgcttgctgcagcatacagattgctgacaccatctgtgaaggttcagctactgatctacttcatgctcaagttcgccatggaaatcctactctcggagtcgagtgtcgtgaccacgttctatttcaagtggacaactagtaccgtggcgatctttctggcagttcttggtctgacggttctcccagttaatgtcatcgttgggagctacgtcaccaacctgttccaggacaggcaaatcctggtggcctccgagatcatggtgttgatcggcatcgtcatgagcttctgcttcacccctcactactccgtcccccagtatgtcacgtcagctctcatcacgttcgtgttcgccgaggtgctcgaaggggtgaacttgtccctcctctcccgcgtgatgtcgtcgaggctctcccgcgggacctacaacggcgggctgctctcgacggaggccggcacgctggcccgcgttgccgctgacatgaccatcacggccgctggctatctggggcagggccgcctcctgaacgccaccctcctgccgtccttggtgatctgtctagcatctatcgtcgcgacgttctgcacttacaactcactctactgattaccggtcgatgaactcctctccctcttatacaagttgccgaattgcgtcttgcagtgacgctgaaaattttcgggctgctgctgctaatgtaaactgctgcggcctgcgggtggacgagcggtccatgtgtatcgacgcctgtagtgttgcgaacttgctacggctgtaacatgacacgtgcgcgttaaataaaatgccctactgaagtaccctgtcatcgctcctcatgtgtcggcccagcccaacaattgcattaccaggaaggcaggaagagctctcgtcctcggactgcaagaatcctgtcctcacccccacatcgccttcctgctattctccccttcggttgctgacatggcaagttcaaaattgccgttagggtt

SEQ ID NO: 128741 - DNA, 1996 bp, Zea Mays
acctctgagagttgacaccatcatcacactcgaaacccaacagcttccttcctggcgatccaattaacggcttctcttctgagctcagcacgaacaatggccaccatcctcaccgtcgcaagcttcttcgcacttgtgtgcatctctcaacaagcgcgggctgcgaactacacgttcatgaaggacgcggtgcacgcgccgcggacgggcttctacgactacatcatagtcggcggcggcacggcgggctgcccgctggcggccaccctgtcggcccgcgcgcgggtgctgctgctggagcgcgggggctctccgtacgaggacgcgcgcgtcctgaacatggcccacttctcggacgtgctggcggacacgtcggcgtcgtccccgtcgcagcggttcgtgtcggaggacggcgtgatcaactcccgcccgcgcgtgctgggcggcggcagctgcatcaacgccggcttcttcacgcgcgccggcgcgggctacgtcagggccgccggctgggaccccagggaggtgcgggcggcgtaccggtgggtggaggacgtggtcgcgttccgcccggcgctgggcccgtggcaggccgccgtgcggatgggcctgctggagaccggcgtgctgccggacaacggggccacgtacgaccacatcccggggacaaaggtcggcggctccatcttcgacgccgacggccgccggcacacggcggcggacttgctccggtacgccaacccggacggcatcgacctgtacctccgggcgagagtggccaagatcttgttccgtttcaaaggaaccaagccggtggcggacggcgttgtgtactacgactcgcgaggcaacactcacgaggcgtacctcagccccggcgccgccagcgaggtcatcctgtcggcgggggcgctgggcagcccgcagcagctgatgctcagcggcatcggcccggccgaccacctccgctcgctcggcatcgacgtgatcctggacctgccgggcgtggggcagggcatgtcagataaccccatgaacgccatctacgtgccgtcgccgtcgccggtggaggtgtcgctgatccaggtggtcgggatcacccggttcggcagctacatcgagggcgccagcggggccaactggaacagccacccctcgggcacgcagcctcctcctcctcctcctcggaacttcggcatgttctctccgcagacggggcagctcgcgacggtgccgcccaaggagcggacgccggaggccatcgcgcgcgccgtggaggccatgagccaggtccccgacgcggcgctccggggcgggttcatcctggagaaggtgctgggcccgcagtccgtgggccagctggcgctccgcaacctgaaccccgacgacaacccttcggtgcggttcaactacttcgcgcacccggacgacctccgccgctgcgtcgcgggcatcgccgccatcgagcgggtgatccgctccagggccttctcgcggttcacctaccaaaacttcgcgttcccggccgcgctcaacgtcacggccgagttccccgtgaacacgctgtaccggcgcggcggcgaccccagggcgctggagcggttctgcagggacacagtgatgaccatctggcactaccacggcgggtgccaggtcggccgggtcgtggaccgcgactacagggtgctcggcgtcgacgccctccgcgtcatcgacggctccacgttcaacgcctcgccgggcaccaacccgcaggccacggtcatgatgctcggcaggtacatgggcgtcaagctcttgaaggagaggatgcttctggaaggatgaagcagaaaaaggcctagtctcactcacatctctacatctctacagggtgcgtttaaccttgaagattcttttagtggcgatcgtacaagttaattggagatgctaattgtaatggatgaattccacaccgattaatttgcacaaaatgtggatggtataattcagcaca

SEQ ID NO: 128742 - DNA, 1593 bp, Zea Mays
gtcaccgtcggtgttggggcctcgcgtgtgccacagctcgatcgctccagagtccagaccaccaggagactctctcagacagcataagctcacatcggcaataaaaaagcatccccgtctcccctgattctctccgcccagctcagctctgctccccgccgctcctctccgcgccccttcatcccggatctcggcatgggcaccgccaccaccaacggctcggcggagcaggcgtccgcgcccgtgccggcgctcaagttcctcatctacggccgcacgggctggatcggggggctgctgggcggcctctgcgccgcgcgcgggatccccttcgtctacggcgccggcaggctcgagaaccgcgcccagctcgaggccgacatcgacgccgccgcgcccacccacgtgttcaacgccgcgggcgtcacgggccgccccaacgtcgactggtgcgagacgcaccgcgccgagaccatccgcgccaacgtcgtgggcacgctcacgctcgccgacatctgccggggccgaggggtcctgctcatcaactacgccacgggctgcatcttcgagtacgacgccggccacccgctcggctccggggtcggcttcaaggaggaggacacgcccaacttcgtcggatcattctactccaaaaccaaggccatggtagaggaattgctcaagaactacgagaacgtatgcacccttcgtgtgaggatgcctatctcatcggatctctccaatcctcgcaacttcatcaccaaaatcacccggtacgataaggtcgtcaacatcccgaattcaatgacagtactggacgagctccttcccatctcgatcgaaatggcgaagagaaacctcacgggaatatggaatttcactaaccccggcgtggtgagccacaacgagatactagagatgtacagagactacatcgatccaggcttctcctggaaaaacttcaacctggaggagcaggcaaaggtcatagtcgcaccgaggagcaacaatgagcttgaccagaccaaactgaagagagagttcccggagcttttgtcgatcaaggagtcgctggtaaaatatgttttcgaaccaaactgtaaggcgtccaaggcttgacaagtggaggtgcgcacagctgtatgttgacgctatttgttccatctgaattgacattactctctccgggaactctcaataagcacaccccctgtttcgtgtgcaatgcatttgaaacggttaggtttctcataggagatgtcatgctgccatactcctttgtactttcagattattgaacggagcggggcaagcaaggtgtaatttagctcaactttcgcattggctcctggcctcctggggcgttatcataccgtgcggttggaatgaactgaggagcttcatgcctgcctgcttctgttgtgccatagaatttgtagttcgcgatgtttcatttgtaaccttttattgaatatgactttttaatgggatccttagcaatacaggacccctgtttcataaatgatgtagttctagaatactgttcagtcaactcgtttgagtaaatttataaaaaaagatacaatgtttatc

SEQ ID NO: 128743 - DNA, 105 bp, Zea Mays
aattttttatctactaacaattactcgtggacccacagcatagtgtttagggtgatgaacagtgacacgctagatctggggggagagagaagggggccggcgtgt

SEQ ID NO: 128744 - DNA, 1195 bp, Zea Mays
gtcacattttaatttaaaaataaactagctgaaatgcatgctagcttgccgcaacgactcggacacagcttttacttccacgaccacagattcccgttgttggagcgcagacgccggccgcagacacaagtttaccgagcgaccagacggcgggagccgtcacgcataaatatacccaccacttcacacttcctctgtcgagaacgaatgctgtctcttcttcccttctatcgagaagctgcccgcgcgctccctccgtagagtccaaaccgccacaggaagcgcaacagcggagtctccaaaatggccgccgaggacaaggagaccgactcgccgcagccgccggcgaagctgccccgtctctcctgcgccgacacgagcgccggagtggcggcctcgtcgcctctggttctcgggctgggcctggggctcggcgggggcggcgagcgagacgcggatgcgtccccggcaacggcgacgcccaagaggccgtcagcgctgacgttcatgcagcagcaggaactggagcaccaggtgctcatctaccgctacttcgcagcgggcgcgccggtgccggcgcaccttgtgctccctatctggaagagcgtcgccgcgtcctccttcggcccgcagcgcttcccctcgctgatgggcctggggagcctgtgcttcgactaccgcagcagcatggagccggagcccgggcggtgccggcgcacggacggcaagaagtggcggtgctcccgcgacgtggtgccgggccacaagtactgcgagcggcacgtccaccgcggccgcggccgttcaagaaagcctgtggaagccgccgccccggcgcccagcgcggcggccgccaccagcctcggcggcggccccgtccaccacacgggcggcgcgcccccgccgcacgggctcggcctctcccccaccagcgtcctcctcgcccacagcgccgcgcgtgccacatgagtagagcgctgcgggccgacatcttgggctgggcctcggaatcacgaggagaaacggaatccgcagggattacaatgtcgtgtgcgtgctgtgatttttttcactcccaaaagtcgcagcttcttaaaaaacccggtttgggacgtccgatggcatgtgtcgctggcagctggttcgctgcgtttgcttctctgttacgtgtgcattgtattgttttgcctgcctc

SEQ ID NO: 128745 - DNA, 779 bp, Zea Mays
cgccggccgcagacacaagtttaccgagcgaccagacggcgggagccgtcacgcataaatatacccaccacttcacacttcctctgtcgagaacgaatgctgtctcttcttcccttctatcgagaagctgcccgcgcgctccctccgtagagtccaaaccgccacaggaagcgcaacagcggagtctccaaaatggccgccgaggacaaggagaccgactcgccgcagccgccggcgaagctgccccgtctctcctgcgccgacacgagcgccggagtggcggcctcgtcgcctctggttctcgggctgggcctggggctcggcgggggcggcgagcgagacgcggatgcgtccccggcaacggcgacgcccaagaggccgtcagcgctgacgttcatgcagcagcaggaactggagcaccaggtgctcatctaccgctacttcgcagcgggcgcgccggtgccggcgcaccttgtgctccctatctggaagagcgtcgccgcgtcctccttcggcccgcagcgcttcccctcgcgtaagcactaagcaccgacaacagcttcagccgcccccggccgatttctatttgtttttgcgtttgtactgtcttgccgtatcgaatgaacgtgttgcagtgatgggcctggggagcctgtgcttcgactaccgcagcagcatggagccggagcccgggcggtgccggcgcacggacggcaagaagtggcggtgctcccgcgacgtggtgccgggccacaagtactgcgagcggcacgtccacc

SEQ ID NO: 128746 - DNA, 268 bp, Zea Mays
cgtaaatactgaacatctcgtgctacatgctagtgagccagcgtagacacaaaccctggtttgctacaaaataaagtgaaagacttagggatttatgatatgtgttctcaactgtaatacacatcaggctatctcagtagctacagaaatctaccaacgcgcaagacctagacagctagactgcacactagcatacgccaaagttcagcatcaaagggaactatggggaaaacatcaaaaacaagtgcaggtgtcatgagtagagatc

SEQ ID NO: 128747 - DNA, 1837 bp, Zea Mays
atggcactatccattaaccagacacagcgtccagccaggcttttgcctacaaaacaacgcaccacgccgccgccgctcgccgcccacttctctcccaccttccctccactcttttgcctgtcgcggggttagaatcccatggcgctgtcgtccgagatccgcttcggccaccagatccccctatcccactgcgacactgactcctacgaggaggaggaagaggaggaaggagaggaagaggaagacgaggaggaggagttcgagggggaggaggaggaggaggagatggatgaggtgacggtttcgtctccgctgatgcttccggcaacggaggccaggggaggggtgtccgtggtcgagatggtgacgggggcgctccggaggtcgctcatgctgtgcagcagcagcgccggcgccggcgtgcgcgagccggagcaggaggaggacggggcgactcccccgggtggtatgcagatagggggaccaacggatgtgcggcacgtctcgcacgtcaccttcgaccgcttcgttggcttcctcggcctccccgctgacctcgagcccgacgtgcctcgccccgtgccgagcgccagtgtgagcgtatttggagtttcaccaacttccatgcagtgctcgtatgatagaagaggaaacagtgtgccaactatactcttgactatgcaaaagaagttatattcacttgggggtcttcaggctgaagggatattcaggataaatgcagacaatagccaggaactatatgtgagggatcaactaaacagggggattgttccagatggtgttgatttgcactgccttgccggactgatgaaggcatggttccgggaacttccaagtggagtactggactcgttgactccagaacaagtgatgcactgcaacactgaagaagagtgtagccatcttgcaagcaccctacctcctgtcgaagcagcattgcttgaatgggccatcagtctcatggcagatgtcgtggaaaacgaaagctacaacaagatgaacgctcgcaacatcgctatggttttcgcaccgaatatgaccaagatggcggaccccttgactgctttgatacatgccgttcaagtgatgaatttcctcaagacattgatcttgagaactgtaaaagaaagggaggaggctgctaaagtagccagggcgttcccatcgagctctggttccccgagcgacaaagatgagcctcaaactgtagaacagttggacatgctcttcgtctgttcaagtcagcaaaatgtagagtatcctatggttgatgaggctaagtttgaccagttcctttttagagtggaagaagctcttcaccatgagacgcaaggcagcacagatggacccaagaatcatgacagcggtagaggtgaccagagaagtaacagtgagatcactccattggacaccggtttgaccggccaaaatgagttcagtaacaacagcgaggaaggtctctttgacaagtttaaatttaggaaaggggtagggaggctctgcaggcaccctgtgtttcagctgagtaggtccatgaagaagtcagatgaagcggagcaagcatgtgtatagggcatgcctgtgcagtggataatattgacacacctgtatttctctgcagcttgtttactgtgtaggtcttcggctattctcctagattgtgtgcctagaaggcattggccccattattagtactgatttgggtgtatatgtgactatgtcagctgttcacttattgctgtcctaattgttaagaagctatcatgcactagtgatttttcttagtttgtcagatagaatctcgtgtgtgattttc

SEQ ID NO: 128748 - DNA, 1750 bp, Zea Mays
caatgcgattactgccacaattccgacaggtggcaacaccgggccgtcggcgaaggcgcgaagcaacgaaacgtgccccccggaatcgcccgcccgtcgtggcgtcgtccaacttgaccgcgcgcgcggactactacttcccacacggccacaccgcagtgcaggttttgcaagcaaccaatggtccaatgcgcaggcgtagggttggttggcacatgcgtgacggcacctagaactgtgccatctgcattctgcaaacctgcatcagtttgcaaatagttacaaactgtgcagctcattcattagcgccttgcgttgttccattcccacaagagggaatcatcgcctcattggagagatcgaactggtggcctgccgatccgttcgattcgagatccgacggcttccgagcgtcccatccctggatgcaaaatgccggtgccatactgacggatggttggcacttggcagcaggcaagttgggttcagagacgctttataaagacgtcgcgagccgttccagccttgcaacacgaaacccagatccacgcccactgtcctctgcccaaggctacggtaccacaccacaaccacactcggtgagtgaggtagcggcacgagcacgcgccatgaagagccccgccgttccggccaagaggcgccacggcggcaacggcagcggcagcggcccggggttcgcgcttgggtgcggctgcaaggacgccaagagcgtgtcggtgtccgtgtccgcgtccgcgtccccgtcccagtcggcgacgacagggacgtcgaccgtgacgcgccgcacgagcgccggcgggctgaacccgtgggcgtcgacgacgacggacaccctgacgtcggcgtcggcgtcctcgctctgggaagacgcggtggaggggctgggctacaaggacggcggctgccggatggtgccggagagcaccgcgccgagcttctccggcctgctgcgcgagctcggcgagctggagcggagcgtcgcgtcgtggggcggcgcgcggaagggacaccgccgcgaccgcgagggcaagctctcgccgccggcgctgcggcacgagcagcagaggagggcggccaagggcgagcccagggactcggaggagaaccgcttcgtcgacgcgggcgcggggctccagggcagcgtggcggtggtgaagcagtcggacgacccgctccgcgacttccggcgctcgatgctgcagatgatcgtggagaacgggatcgtggcgggcgaggacctgcgcgagatgctccggcgcttcctcaccctcaacgcgccgcaccaccacgacgccatcctgcgcgccttcgccgagatctgggacgacgtgttcgtcgccgccgccgcgtcgctcgacgactgtgccagcccggtcggccgagcgtcctccgtctcaggccgggaaccggcggcggcgggcaggccgccagcgcccagaacgaccgcccgccaccaccgccgctcgccaccggcgtggcgcgtgtagtgggtagtaagggtaactcgtcgtacgcgtgcgttgtctttctcatttgctaccccggggtggcaatgtacgtgcgtgcgtgcgctgctgaaaaggcaaatactatacactaccgtatcagttcattcgtgttccatttccgcgtactggaaaaggcacgagaatgtggtattgccttcttctttttttgtactctactcttaccacgatctaccagtgaacatgatagatcgagtgatgct

SEQ ID NO: 128749 - DNA, 4418 bp, Zea Mays
gcggcatatttggcttcactgccaagtgccaactgccaagttcataactgcgtgactgcaccattgaggacgccaattcataacttccttccttccttccttccgagcaccggattcgagcaaaagcatccgcgcgtgcgcccactccctccgcctgccctctgatcctcctcgcctccgcccttggctccaatggcgctgtcctacctggaggccgtgctttgctttatgattctcatgttcatatttgagacgtatcttgacatccgtcagcatagggccctcaagctgccaactttgcccaaacccctgctgggagtaatcagtgatgaaaagtttgaacgctctagagcttatagccttgataaaagctacttccattttgtccatgagtttgtgactattttaatggataccacaatactgtactacagatccgttccctggttttggaagaaatctggagagttagttaccaatgttgggctgaatgctgagaatgagataatacacacccttgcattcttagctggtgccatggtttggtcaaagattacagacttgtcgttctctatttattcaacttttgttatagaggctcgacatggttttaacaagcaaactatatggctcttcatcagggatatgatcaaaggagttttactattcatgatactggggccaccaatcgtggctgctatcatctacatagtacagattggaggaccctacctggatatatatctctttggttttatgtttgcattagctcttctgatgatgacaatataccccattgtgatagctcctctgttcaacaagttcacccctcttcctgaaggagtcctcagggagaaaatagagaagctggcagcttccctcaaatttcctttgaaaaaacttttcgtggtagatgggtctaccagatcaagccacagtaatgcttacatgtatggattttttaagaataaacgcatagtactctatgacacattgattcagcagtgtaccaatgaggatgagatagtttctgttattgcacatgaacttgggcactggaaactcaatcatattgtctattcctttgtagctgtccagctgcttatgtttcttcaatttggaggatatactctactgcttatgtttcttcaatttggaggatatactctagtaaggaactccaaagatctatttcaaagttttggcttcgaggatcagccaataataactggactgatcattttccagcacaccagaatacccatccaacaccttctgagcttttgcctgaaccttgtcagcagagcatttgaatttcaggctgatgcctttgccaagaaccttggatatgcccctcagctccgagcggcccttgttaaactacatgaggagaacttgtctgcaatgaacaccgatccttggtattcggcatatcactactcccacccacctctcgtcgaaaggctgcaagctcttgaagattcagacgccaaaaaaaatgactaacgccaactgtcagagctgttgttcctgatggggcgaagccttgatccttgtacgaggtttccatgagggtacgattcattggttgagtgttgtaaaagctctgtaagcatccagcacgaagatgcttacatgcacgttgagaaatattataggttattgaggactctctctgttttttagttgtcgctggataattcaattttgtattatccagcgacaactaaaaataaacagagggagtataagcgaaccagctatgcaaaactgatgcatcttcctgtgttgaagtcacttgccactcaaagctacactacatgcacgtttcggggcttcgggcagacagtgagacgcatctgaatggaactctttcatctggatcctgtaggcagcagcacctaatccagacatgccgtgagttgctgccttgctggctccagcctccaaaaaacgagctcccctgtcccgcatgcccgtcaggtagcgatgctctcactctgcaccccttcgtcgcctccgcccccaccgtctccccacggcaccgtcataactcccacctcctccgtcgccctcctccgcggtgccgcggaacggcgcgacacggcactcacatcggcgctccacgccgccctcctcaagtccggcgcgctccgttcccggcaggcacccctcgccgcagcgaactccctcctgcatgcctacctccaatgcggcctgctctcccgcgcgctccgtttgctcgacgaaatgccccgccgcgacgcggcgacctacgcccccctcatctccgcgcactgtcgcctcggcgctcccctggacgcccttcgcgccttcctcgacatgttggcctggggttgctccgacgaggagggtgtggacgacgtcgtccgccccaacgagttcacggcggccgctgtcgtgcaggcctgcgggctggccagggacgagcggctggcgaggatggtgcacggctacctcgtggcaggcggcttctgcgacgacccgtttgtgctcggttcattggtcaacatgtacgccaaggttggggatgtggcgagcgcgcggaggctgctcctgggattaccctgcagggatgttgtttcttggacggccatcgtatcagggtgcgtgctcaatgctatgctcgaagaggccctcggggttttcctcatgatgctggaggacggcgtcctccccaacaacgtcacgatgctgagcgtcattcaggcgtgcgctttgatgggcgcctcggaattgtttggtccagtgcacgctcttgttgtgctgttggagctcgagcatgatgcctcagtggtgaactctctcatcatgatgtatgcgaaaaatggatttgttgaagaggctatccggcttttcaagggtttctacctaaaaactgggagcgtatgctctaacgaggatgttcttgcggcagttctttatggttgcaccatttcagggtccgtgaagaacggggaggggctccatgcgcacaccattaaaatgggtgctttcccaagcatcagcgttgagaactcccttatgggcatgtatgctagatttgagcaaatcgatgctgcactcttggtgttcgaaggtatggaggttaaggatattgtttcatggaacaccatcatctcatgccttgccaagactgatcgtgtgaatgaagccatggatattttcagtgttcttcatgctgctgctggtggtgggcttgcgcctgactttgtcacggtcttgagcatgctgcaggcttgctccaatgcaggattacttcatcaagggcagatgctccatggatacgtcatgaaatctggtttcgtgtacgatgtttcaatatgcaatgctctcataagcatgtatgctaagttaggaagaattgattttgctgagatgatctttgagcggatggatatcaaggaccttgtttcctggaattcaatgatcaatgcttatggtatgcatggcgatggtcattcagctctacgggttttccaccagttgaaggatgctggaacacctgcgccaaacgctatcacatttgtgagtgtgatatcagcttgcagtcactctggtttggtttcagaaggtcacaagtgctttgaaagcatgggaagagaccacggcattgaacctagcatggatcactatgcctgcgtagttgatctgcttggaaggtctgggaggtttgcagaggctgagcaattcatcagggacatgcctgtccgtcctgattcaaccatctggggacctcttttagctgcttgccagcttcatgggaatgttgatcttgcagaaaaagctgccaaagaattgtcggccttggaaccggagagtgacatatggagagtatccttgtcaaatacctatgcctcggttgggagatggagagacgctgcaaagattaggtctgaaatgaggagagttggattgagaaaagagactgggtggagttttgtagacgttggaggggttgagggttttaagtttgtgtcagcagatacaaggcatcatgatgctgaaaaaatatattcagtatggcacagtatgaacaggcacatggcagatctagctgctgatgtgcataaacttaatccaattagtgcaatttagtcgatgcacgagatgtttatagatctagctgttgatgtgtctaggtccaactagtgatgaaatggaccttttgtagttatgagcttataacttaaaattacagttgatccgttgttttgaatgctgaatatagttaacaagaagagtgaataaacagaacacacatggaactggagtaagctgcacatattgcattgacgcttgcttcaatcttgctttggaattctttgcttcctttcatgttgaaggttgaaggttgaaattatgctgtgtgcttagcaagttgatttttggcctca

SEQ ID NO: 128750 - DNA, 1833 bp, Zea Mays
taactgcgtgactgcaccattgaggacgccaattcataacttccttccttccttccttccgagcaccggattcgagcaaaagcatccgcgcgtgcgcccactccctccgcctgccctctgatcctcctcgcctccgcccttggctccaatggcgctgtcctacctggaggccgtgctttgctttatgattctcatgttcatatttgagacgtatcttgacatccgtcagcatagggccctcaagctgccaactttgcccaaacccctgctgggagtaatcagtgatgaaaagtttgaacgctctagagcttatagccttgataaaagctacttccattttgtccatgagtttgtgactattttaatggataccacaatactgtactacagatccgttccctggttttggaagaaatctggagagttagttaccaatgttgggctgaatgctgagaatgagataatacacacccttgcattcttagctggtgccatggtttggtcaaagattacagacttgtcgttctctatttattcaacttttgttatagaggctcgacatggttttaacaagcaaactatatggctcttcatcagggatatgatcaaaggagttttactattcatgatactggggccaccaatcgtggctgctatcatctacatagtacagattggaggaccctacctggatatatatctctttggttttatgtttgcattagctcttctgatgatgacaatataccccattgtgatagctcctctgttcaacaagttcacccctcttcctgaaggagtcctcagggagaaaatagagaagctggcagcttccctcaaatttcctttgaaaaaacttttcgtggtagatgggtctaccagatcaagccacagtaatgcttacatgtatggattttttaagaataaacgcatagtactctatgacacattgattcagcagtgtaccaatgaggatgagatagtttctgttattgcacatgaacttgggcactggaaactcaatcatattgtctattcctttgtagctgtccagctgcttatgtttcttcaatttggaggatatactctactgcttatgtttcttcaatttggaggatatactctagtaaggaactccaaagatctatttcaaagttttggcttcgaggatcagccaataataactggactgatcattttccagcacaccagaatacccatccaacaccttctgagcttttgcctgaaccttgtcagcagagcatttgaatttcaggctgatgcctttgccaagaaccttggatatgcccctcagctccgagcggcccttgttaaactacatgaggagaacttgtctgcaatgaacaccgatccttggtattcggcatatcactactcccacccacctctcgtcgaaaggctgcaagctcttgaagattcagacgccaaaaaaaatgactaacgccaactgtcagagctgttgttcctgatggggcgaagccttgatccttgtacgaggtttccatgagggtacgattcattggttgagtgttgtaaaagctctgtaagcatccagcacgaagatgcttacatgcacgttgagaaatattataggttattgaggactctctctgttttttagttgtcgctggataattcaattttgtattatccagcgacaactaaaaataaacagagggagtataagcgaaccagctatgcaaaactgatgcatcttcctgtgttgaagtcacttgccactcaaagctacactacatgcacgtttcggggcttcgggcagacagtgagacgcatctgaatggaactctttca

SEQ ID NO: 128751 - DNA, 2219 bp, Zea Mays
gatgctctcactctgcaccccttcgtcgcctccgcccccaccgtctccccacggcaccgtcataactcccacctcctccgtcgccctcctccgcggtgccgcggaacggcgcgacacggcactcacatcggcgctccacgccgccctcctcaagtccggcgcgctccgttcccggcaggcacccctcgccgcagcgaactccctcctgcatgcctacctccaatgcggcctgctctcccgcgcgctccgtttgctcgacgaaatgccccgccgcgacgcggcgacctacgcccccctcatctccgcgcactgtcgcctcggcgctcccctggacgcccttcgcgccttcctcgacatgttggcctggggttgctccgacgaggagggtgtggacgacgtcgtccgccccaacgagttcacggcggccgctgtcgtgcaggcctgcgggctggccagggacgagcggctggcgaggatggtgcacggctacctcgtggcaggcggcttctgcgacgacccgtttgtgctcggttcattggtcaacatgtacgccaaggttggggatgtggcgagcgcgcggaggctgctcctgggattaccctgcagggatgttgtttcttggacggccatcgtatcagggtgcgtgctcaatgctatgctcgaagaggccctcggggttttcctcatgatgctggaggacggcgtcctccccaacaacgtcacgatgctgagcgtcattcaggcgtgcgctttgatgggcgcctcggaattgtttggtccagtgcacgctcttgttgtgctgttggagctcgagcatgatgcctcagtggtgaactctctcatcatgatgtatgcgaaaaatggatttgttgaagaggctatccggcttttcaagggtttctacctaaaaactgggagcgtatgctctaacgaggatgttcttgcggcagttctttatggttgcaccatttcagggtccgtgaagaacggggaggggctccatgcgcacaccattaaaatgggtgctttcccaagcatcagcgttgagaactcccttatgggcatgtatgctagatttgagcaaatcgatgctgcactcttggtgttcgaaggtatggaggttaaggatattgtttcatggaacaccatcatctcatgccttgccaagactgatcgtgtgaatgaagccatggatattttcagtgttcttcatgctgctgctggtggtgggcttgcgcctgactttgtcacggtcttgagcatgctgcaggcttgctccaatgcaggattacttcatcaagggcagatgctccatggatacgtcatgaaatctggtttcgtgtacgatgtttcaatatgcaatgctctcataagcatgtatgctaagttaggaagaattgattttgctgagatgatctttgagcggatggatatcaaggaccttgtttcctggaattcaatgatcaatgcttatggtatgcatggcgatggtcattcagctctacgggttttccaccagttgaaggatgctggaacacctgcgccaaacgctatcacatttgtgagtgtgatatcagcttgcagtcactctggtttggtttcagaaggtcacaagtgctttgaaagcatgggaagagaccacggcattgaacctagcatggatcactatgcctgcgtagttgatctgcttggaaggtctgggaggtttgcagaggctgagcaattcatcagggacatgcctgtccgtcctgattcaaccatctggggacctcttttagctgcttgccagcttcatgggaatgttgatcttgcagaaaaagctgccaaagaattgtcggccttggaaccggagagtgacatatggagagtatccttgtcaaatacctatgcctcggttgggagatggagagacgctgcaaagattaggtctgaaatgaggagagttggattgagaaaagagactgggtggagttttgtagacgttggaggggttgagggttttaagtttgtgtcagcagatacaaggcatcatgatgctgaaaaaatatattcagtatggcacagtatgaacaggcacatggcagatctagctgctgatgtgcataaacttaatccaattagtgcaatttagtcgatgcacgagatgtttatagatctagctgttgatgtgtctaggtccaactagtgatgaaatggaccttttgtagttatgagcttat

SEQ ID NO: 128752 - DNA, 2656 bp, Zea Mays
cggcagcctggcgcatatttcaatctcagcatcagaacccacatcgatttgcaacttcagtcaccaccacggcaccaccaaccccaccccggtcagtgtgcgcgtgctgctgccccccacccacatcgaaacccaagccaagatgcggccgccggcgctcaggctgagcgcgctgctgctgttcctctgcctgtacgccgccccagcgcggtcccagaacgcgaccacggtcacggccgcgcccgcgtccgttgaggggttcaactgctccgtcaaccgcacgtacccatgccaggcgtacgcgctctaccgcgccggcttcgcgggcgtgccgctcaacctcgcagccatcggcgacctcttcgccgccagccgcttcatggtcgcgcacgccaacaacctctccaccgctgcagccccggccaccgggcagccgctgctcgtgccgctccagtgcggctgcccctccgggtcccccaactcgtacgcgccgatgcagtaccagatcgcgtcgggcgacacctactggatcatctccaccaccaagctgcagaacctcacgcagtaccaggccgtggagcgcgtcaaccccacgctggtgcccaccaacctcgacgtcggcaccatggtcacattccccatcttctgccagtgcccggccgccgccgacaacgccaccgcgctcgtcacctacgtcatgcagcccggagacacctactcgaccatcgccgccgccttctccgtcgacgcccagtcgctcgtctccctcaacgggcccgagccgaggacgcagcagttcgccgagatactcgtgccgctccgccgccaggtgccgggttggctgcccccaatcgtgctccgaaacaacgcctccgcgacgccagcggccccgccgccctcggcttctcccaacgcgaccgtcgtgagaaacgaccggaacggggtcgtcaccgggcttgccgtcgggctgggcgtcgtcggcgcgctctggctgctgcagatgctgctgctggcctgcttgtgcagacggctcagggcgaatggacgacgaggtgacgcagtgctaagcggcgacggcgtcgagggcggcgtgttcgctaagggttcgtccgccgctgctgccggcggcggggagaggttcctggtcagcgacatgtctgagtggctggacaagtacagggtgttcacggtggaggagctggagcgcggcaccggggggttcgacgacgcacacctcgtcaacggcagcgtgtacaaggccaacatcgacggcctggtgttcgccgtgaagaagatgaagtgggacgcctgcgaagagctcaagatcctgcaaaaggttaaccacagcaacctggtgaagctggaagggttctgcatcgactcggcgacgggcgactgctacctggtgtacgaatacgtggagaacggatcgcttgacctgtggctgctggaccgcgaccacgcgcggcgcctgaactggcgcgcgcgcctccacatcgcgctggacctcgcccacggcctgcagtacatccacgagcacacctggccgcgcgtggtgcacaaggacatgaagagcagcaacgtcctcctggacgcccgcatgcgcgccaagatcgccaacttcggcctcgccaagacgggccacaacgccatcaccacgcacatcgtcggcacccaggggtacatcgcccccgagtacctcgccgacggcctcgtcaccaccaagatcgacgtgttcgcctacggggtcgtcctgctggagctggtgtccgggcgcgaggccgcggacgagagcggggagccgctgtgggcggacgccgaggacagggtgttccggggccgcgacgagaggctggaggcccgcgtcgcggcgtggatggacccggcgctcgcggagcagacgtgcccgctgggaagcgtggcgaccgtggtgagcgtggcgagggcgtgcctgcacaaggacccgtccaagcgacccagcatggtggacgtagcctacacgctgtccaaggcggacgagcacttcgccgactactccggtgagagcgtgtcggttgacggcagcggcgagatcgctgctcggtgaaccaccatccttcgtttcgtcgtgtactcggtcctactcagtagtaatatggtttttagccatcagttcgcgttgtaaaggtctagcgagcggaggatgagtcagcagcagtgagtatatatagtggtattgaataataacaccggcattccgcgaggctgtgacctgtgagtgtgaggtgcatgaaatgaaatacctacaacgaggtgcctgaaagaaaaggaggttggagtttgaatggaaagtatgaatagggaggatttgggaaggggaacggttggatagcctcatagactggcgcgtgacttgacacggcctgcctgtgaggctgtgacggcgggcgtacgtcgtcctggtatctgttcctaggtcagccccagcacggacggtcacgcacaaaatccatcggatgtaatctgaccccaaacgctcctgatctttcttgctcaccagcctgatcgctgacgggtgccatccagatgaccactcaagcctttcattgagctttgagccgtcatccctttcttatgtacttcgactagtcagctagtgtagcatggggatgaaaat

SEQ ID NO: 128753 - DNA, 1467 bp, Zea Mays
cacacacacacagtgaccctgccccttttcccggccgtctcgctctccaccgatattccgctcctcctgtccagtcctcctcccccgagccggctcattatatcgtccgtcgcgcagcacaacgcaagtttgctagcggccggatcagcagccacaaaacgaggagagcaaccacgctgcacacagagacgcccgtgtgtgagatatagagcaagctcgatcgaaggaaggagggaagctagagatcgtacgtcgccatggggaggggacgagttgagctcaagcggatcgagaacaagatcaaccgccaggtcaccttctccaagcgccgcaacggcctgctcaagaaggcctacgagctctccgtgctctgcgacgccgaggtcgcgctcatcatcttctccagccgcggcaagctctacgagttcggcagcgccggcataacaaaaactttagaaaggtaccaacattgctgctacaatgctcaagattccaatggcgcactctctgaaactcagagctggtaccaggaaatgtcaaaactgagggcaaaattcgaggccttgcagcgcactcagaggcacttgcttggggaggaacttggcccactgagtgtgaaggagttgcagcagctagagaaacagctcgaatgtgctttgtcacaggcaagacagagaaagacacaacttatgatggagcaagtggaagagctccgcagaaaggagcgacacctgggagaaatgaacaggcaactcaaacacaagcttgaagctgaaggttgtagcaactacagaaccctgcagcatgcagcctggccagctcccggcagcaccatggtggagcatgacggcgccacctatcatgtgcatccaacaactgctcaatcggttgcaatggactgtgaacccactctgcaaatcgggtaccctcctcatcaccagtttctgccttccgaggcagccaataatatcccaaggagcccccctggaggcgagaacaacttcatgctgggatgggttctttgagttgctctgttaatcatccatccatcagatggatgtccaaactaataaaaggcactcagtgctaccatatgcatatccatgcttaagtgcttgatttgccacgacgtgggatatcttttaaatttatcgttctggtgtgtaataactaattaagaacggcaccttcattctatggttgtggtgtggcacttctatctatggtttttgtatttggaccacgaatgttgtaatttgtaaaaaaatttaaagatttatctatgctgccggtgctgcggtgcatagcccggtgcatagaatccaaaattatctgcaccggtgcttattatgtgctgatgcatagctgtgtaccattgttttgggtcatttttctgctctatattatttgtccctttctactggcccatgcctcttaaagcatagctacagactatcgccagttttt

SEQ ID NO: 128754 - DNA, 1272 bp, Zea Mays
aactggcacgagacatcctctcagcagatctacgagccctacgctttgcctctttcctccagcttctcgggtagtcgtcgcccgcccccacgcccgccctttcctccatcttctccgggtgtctggagtggccatctttcgtgtgttgggtgggccggggcatgcgcgtgtcagagacacgcacggtcgattgctgctgaggtagctaggggatcgatcgtacgttgtcgctggatggaggaagcataacaaaaactttagaaaggtaccaacattgctgctacaatgctcaagattccaatggcgcactctctgaaactcagagctggtaccaggaaatgtcaaaactgagggcaaaattcgaggccttgcagcgcactcagaggcacttgcttggggaggaacttggcccactgagtgtgaaggagttgcagcagctagagaaacagctcgaatgtgctttgtcacaggcaagacagagaaagacacaacttatgatggagcaagtggaagagctccgcagaaaggagcgacacctgggagaaatgaacaggcaactcaaacacaagcttgaagctgaaggttgtagcaactacagaaccctgcagcatgcagcctggccagctcccggcagcaccatggtggagcatgacggcgccacctatcatgtgcatccaacaactgctcaatcggttgcaatggactgtgaacccactctgcaaatcgggtaccctcctcatcaccagtttctgccttccgaggcagccaataatatcccaaggagcccccctggaggcgagaacaacttcatgctgggatgggttctttgagttgctctgttaatcatccatccatcagatggatgtccaaactaataaaaggcactcagtgctaccatatgcatatccatgcttaagtgcttgatttgccacgacgtgggatatcttttaaatttatcgttctggtgtgtaataactaattaagaacggcaccttcattctatggttgtggtgtggcacttctatctatggtttttgtatttggaccacgaatgttgtaatttgtaaaaaaatttaaagatttatctatgctgccggtgctgcggtgcatagcccggtgcatagaatccaaaattatctgcaccggtgcttattatgtgctgatgcatagctgtgtaccattgttttgggtcatttttctgctctatattatttgtccctttctactggcccatgcctcttaaagcatagctacagactatcgccagttttt

SEQ ID NO: 128755 - DNA, 1031 bp, Zea Mays
ccactgaagttggtttatttcggcgcctgcatcgtacactagcacaggatcaatcccctcggcgggtacagccgccgccgtctcaggcagttcccagatcaatgcttgcccgtcgtccccagccgaacagaggtgcctagtggcttgcggcgcccacgcgactgcgttggcgcacgcccggtgccggtgcagctcggccaccggcaccccgggcgcacgtatgtcgagcacgacgacggcgctgctgtccatgagcagcgcggccatatagcggaggtcagagcggttccacgccagccttagtagcggcgtgtcggggcgggggctctcgtagacgatggtggagtgctccttgtcccgaaggtcgaagacgcggacggagccgtcggccgatacggaggcgaagaccccggcctccccccaggcgatgtcgtgcacggccttgtcgtgcgcgatgagctgcgtctccacgaccccgcgatcgatgtcccagacggtgcaggtggtgtcgatggaggcggtcccgatacggcggggctcgacctcgttccaatcgaaggaggtgaggggtgcgcagaactcggaggaggccttgcggttgtcgagaacggagcggagctcgggcgcgggggcggtgtcggagaggtcgtcgagcggggtgtgccagatgcggagcgtgtcggcggaggaggcgaggagggacggcgcggcggcgcgggggttgaactggagcttggtgggtgggtaagggtggtcgaaggagagcgccgggagggcgcggaaggaggcggcggaggggcggacggggtcgaaggagagcagggagacgcggttgtggaggtcctcgaggaagctgccggaggcgaggacgggcgcgacgggggagaaggcgagcgcgtagatcgagtgcgggagctcgcaggtgaaggcgtgcgggttcggcgtctccggccccgacgacgaggcgaccgaggacggcggcttgggtgggtccattgagtggagaattcgggtcgatagatgtgggggcg

SEQ ID NO: 128756 - DNA, 1833 bp, Zea Mays
ctccttattcatgtgatcttagcgctgggaagtgaacaatgcgcggctgacaataccagtggcctcaatgtagcggtcaacacaacgtgatatgcagctgctctcgcttccactcaagcttgatcctggcttggtcacgcacttttcaaagcacttgttcccgacggtctgcaagacagatcaacaccacctgtgagcttaagaaatttcaccatatgaaatggcaggaatttcctagattcatccttttgcgctttcgtgtgtaatctttgtttatttaagtttgtagaggcaatcagcatcatcctatttgttttttaataaaaacttggcaacatgtggaaaaaagactggcaatttcctagatacatcgtgttgtcccctcagggctgtgaatcttccaaggcaactaaatagtttttaaattcgctcatgtgacccccaaagaagaactagtcaattgttcgggctcaacacattgcacgtgacccaaggcgaaaaattaatactggtggcacagaaacaaggaagaaacttccaatataattggctaattgcatgtatactgcttgttatgtcatcgtttcaggctgaaagcaccgcctcaacaaaaaaatacattttcctcaaaaaaaaatacattcactccattattaaacacagctgaagaagaatcaaccatggccaaaaggttttgtctttgccatcctgttgaactagaatttattttgacccaaatcatcacgcaggatgcattacccaaagtcaaggatggacaatccggtactatcatgacacaggacttcagatatggtggaacaaatggggtgcgtgcagtgggtgggttcatagaggtaataagggttcaggattcagaggtctgcaaagaatctaatctaagaaatgaaagtgaccaaatgttgccgttctctggaatagaaatggccaaatgttgtcgtttctctggaatggaagtggccaaatgggccaaggttcggttcaggaaaaataaggatgacaatttaaaagaaattaaattcctaacaaaccaattgttctcttgggtatcgtttcggcagaagtggaagacactgctcattatgccaccactacaatggatgaatgattttgtgttatggactccatgagactggcgaccggtcctaaacttgtttgatctgtagcaattgttggtggttagtgtggttgatgagtggacatctatgtaaatttgttcagtctttgctttatgctaatgggggcttcatgagtaggatgctaccgataagctatagttagctagtaatccaagcatgtataaaaagaatgttgtaaaactccttattggctttgaatacgaacaaagaaatatcatattccaaaaaaaacaatggcataaaaaacacagcatggagtaaaaataatgctgcaaaactctttatcggctttcaatataagcaaggataaaaaaatggaggcacacagaggtagaagcagtgttattaaaacaacgtttaaacgacaaaactttaattagagattgaattcatgttttagcgttttggcgttctaaactgtaaaacgcagtgtttcatgcgttttagaccattagctacttttgggttcagtctgttatctacttttggggtccaatccggctcatgggtgaagttttggtaagccactaacctctttgttttgatatttaacttaatgttattgtctcaaattatgatatattggtatttttcctgtgttgtttaaaactacgtttaaacattgtttaaacgtttaaaagtcaaaacttcacccatgaacgtttcaacgttttat

SEQ ID NO: 128757 - DNA, 267 bp, Zea Mays
tcaggcgctatcagctatgacttgtagattctgtaaattctggatttcacagtacatcaggatattgatgagaagaatagccttgtggttaattagggctaagaaaacaacatccgttactcttctttctttctttttcttttttctttttggttgaagagccttggttatttccttaaatgcatcaaccagcagtaagccagagagtggtgtaacctgtgaaaaatatttataactaacggttcatgttatttaagtattgaaaac

SEQ ID NO: 128758 - DNA, 626 bp, Zea Mays
gcccgtaggccgtacccaatcaattttcctaccaccgccgcaccaccggaccgttcattcccgcttttcccagccccgcgctcccgctcccgctcccgcgcccgcgcccgcgcccgcgctgctcctcctccctcgtcttgtgaggccgacagccggagaggcacagcgcaccaaatgattctggtggccatcgtggcggagctgctggaggagtacacggcgctggtggcgcgcgtgctggagcagctgctccacggcgcgcccttcccgcgccgcatgcgattcctcatgctccggagcctccccttcgccacgccgccgctcccgccgccgccgccagcgcacgcgctccacgtcggcgcgccctccccgcccctctgagtcagagtactgttcctcgacgtgtttcagcgtttggtacgtaagttctcatctcggtcatgaaagaaaagggtagcgaatgtgaatctgcgctgcctccgatcctctcctcgttgtctcgttgagaagcctcagcaagagcagtttcagtgtccacggatctgctgtgtaaattctttgcttagtttgtccgagtaatataatagcagtgattaatgagcaggtgattcggagttgttcttctt

SEQ ID NO: 128759 - DNA, 101 bp, Zea Mays
aattctccgaatactcttcgtcatcttcactaccaccgagttcccggttcaaatccaagggactgccgtctcattcttttggtgacgtgtgcgaggggatc

SEQ ID NO: 128760 - DNA, 553 bp, Zea Mays
aacaagccaaccgccaacacagccggacaccaacctgtggtcgcgacgccacccggccgtataaatccacgccgccccgtcgccgccggatcctgccagtgccagcacaccacgggtttcccctgtcggagagaggacgccttttggtgctgtccctgtacttctcctttcgaaaggatctctctgcgcgccggggcggcgatggcggcggcgccggcgcccctgccggcgcccgtcgcagactggtgggagcgcgtcaacggctcgccggcgtggcaggacgggatcttctggaccctcgccgtcctctacggtgccattgctaccgcctcattcgtaagcgtctcgtcttcttctgtgaatatggacgcctgccagtagagaaagatgcgtgctttcgtgcctctgtgctgaattatttacccagacgtgataccatcaaaggaataagcaggcgcccgttgatgccttcatcatgtcattgcatgagaataagcattagtatctttctttatacggttatacctgtggttgacatgcgatgctggctgtt

SEQ ID NO: 128761 - DNA, 1422 bp, Zea Mays
aacaagccaaccgccaacacagccggacaccaacctgtggtcgcgacgccacccggccgtataaatccacgccgccccgtcgccgccggatcctgccagtgccagcacaccacgggtttcccctgtcggagagaggacgccttttggtgctgtccctgtacttctcctttcgaaaggatctctctgcgcgccggggcggcgatggcggcggcgccggcgcccctgccggcgcccgtcgcagactggtgggagcgcgtcaacggctcgccggcgtggcaggacgggatcttctggaccctcgccgtcctctacggtgccattgctaccgcctcattcatccaagttgccaggatacagtgcagagtccctgaatatggatggacaacccaaaaggtcttccagttcctgaatttcgtggtcaatggggccaggtgctctatctttgctttccgtcgccaagtgcaacaagtgaaccctccgatctttcagcatgttattcttgatcttcctggccttgcattcttcactacctatgcactgttagcgcttttctgggccgagatactttaccaagcacgtggaataatgactgatcgacttagatcaggtttctacatcattaattgtgttgtttatgcattgcagggttttctgtggttgtggctgtggtggaatccaaatcattctatgctagtcacttctaagttattcattgcaggtctttcttttttcactgccttgggttttctgatctatggaggaaggcttttcatcatgctgaaatattttcctattgagtcaaaagggaggcaacaaaagctgagagaagtcggcagagttgccaccatatgtttctgttgtttctcggcacgatgcataatgatgtgcttcaatgcatttgacgaggaagctgacctcgatgttcttgaccatccagttctgaatttgttctattacctgcttgtggagattctcccttcatctcttgtcctgtacattctaaggaggattcctgcaaagctacggctatcccagtatcaccccgtcagcagcagctagagacgatgcattaccatctgctgagccaaaaatggtgactgctgtcaagccatgaaaaatcaactgcaatgccctctatataatatttgtattggtagcctctctgcaaaatatatatagggataagacttgcctcggttatttcttttctagaccctactcacatggaagccatccaatatttttcctagctcacctattgctaaccctgttagttcaatctgctaattttatgatttttagtgtttgagcataatgaaggaaagcaccattgtaaaaactgaactacatgaaaagttgaacatagattttttttccctggagatgagtttaacagtgagttgccctttggaatcattgaac

SEQ ID NO: 128762 - DNA, 1335 bp, Zea Mays
aacaagccaaccgccaacacagccggacaccaacctgtggtcgcgacgccacccggccgtataaatccacgccgccccgtcgccgccggatcctgccagtgccagcacaccacgggtttcccctgtcggagagaggacgccttttggtgctgtccctgtacttctcctttcgaaaggatctctctgcgcgccggggcggcgatggcggcggcgccggcgcccctgccggcgcccgtcgcagactggtgggagcgcgtcaacggctcgccggcgtggcaggacgggatcttctggaccctcgccgtcctctacggtgccattgctaccgcctcattcatccaagttgccaggatacagtgcagagtccctgaatatggatggacaacccaaaaggtcttccagttcctgaatttcgtggtcaatggggccaggtgctctatctttgctttccgtcgccaagtgcaacaagtgaaccctccgatctttcagcatgttattcttgatcttcctggccttgcattcttcactacctatgcactgttagcgcttttctgggccgagatactttaccaagcacgtggaataatgactgatcgacttagatcaggtttctacatcattaattgtgttgtttatgcattgcagggttttctgtggttgtggctgtggtggaatccaaatcattctatgctagtcacttctaagttattcattgcagggaggcaacaaaagctgagagaagtcggcagagttgccaccatatgtttctgttgtttctcggcacgatgcataatgatgtgcttcaatgcatttgacgaggaagctgacctcgatgttcttgaccatccagttctgaatttgttctattacctgcttgtggagattctcccttcatctcttgtcctgtacattctaaggaggattcctgcaaagctacggctatcccagtatcaccccgtcagcagcagctagagacgatgcattaccatctgctgagccaaaaatggtgactgctgtcaagccatgaaaaatcaactgcaatgccctctatataatatttgtattggtagcctctctgcaaaatatatatagggataagacttgcctcggttatttcttttctagaccctactcacatggaagccatccaatatttttcctagctcacctattgctaaccctgttagttcaatctgctaattttatgatttttagtgtttgagcataatgaaggaaagcaccattgtaaaaactgaactacatgaaaagttgaacatagattttttttccctggagatgagtttaacagtgagttgccctttggaatcattgaac

SEQ ID NO: 128763 - DNA, 1761 bp, Zea Mays
aacaagccaaccgccaacacagccggacaccaacctgtggtcgcgacgccacccggccgtataaatccacgccgccccgtcgccgccggatcctgccagtgccagcacaccacgggtttcccctgtcggagagaggacgccttttggtgctgtccctgtacttctcctttcgaaaggatctctctgcgcgccggggcggcgatggcggcggcgccggcgcccctgccggcgcccgtcgcagactggtgggagcgcgtcaacggctcgccggcgtggcaggacgggatcttctggaccctcgccgtcctctacggtgccattgctaccgcctcattcatccaagttgccaggatacagtgcagagtccctgaatatggatggacaacccaaaaggtcttccagttcctgaatttcgtggtcaatggggccaggtgctctatctttgctttccgtcgccaagtgcaacaagtgaaccctccggtttggacgccttaactttgtcctgtaatgtaaatgataatttcaatttgatcgtcctagcttggattgctcacgttcatttgtattccagatctttcagcatgttattcttgatcttcctggccttgcattcttcactacctatgcactgttagcgcttttctgggccgagatactttaccaagcacgtggaataatgactgatcgacttagatcaggtttctacatcattaattgtgttgtttatgcattgcagggttttctgtggttgtggctgtggtggaatccaaatcattctatgctagtcacttctaagttattcattgcaggtctttcttttttcactgccttgggttttctgatctatggaggaaggcaagatcatgaatactactcaatgcttctttaataaagtcattaacaacaatgcatggatttttttattttatctttttgttagccaattggattgactaggttgtctgcaaaacatgtaccgcagaagtataaatctaaaaagtgttacgttagtacttagtgatatgcatcaagttcagggtttgatctagctaccgcactacatacaaatatgcagtatgcacttacatttcttgtttgttcaggcttttcatcatgctgaaatattttcctattgagtcaaaagggaggcaacaaaagctgagagaagtcggcagagttgccaccatatgtttctgttgtttctcggcacgatgcataatgatgtgcttcaatgcatttgacgaggaagctgacctcgatgttcttgaccatccagttctgaatttgttctattacctgcttgtggagattctcccttcatctcttgtcctgtacattctaaggaggattcctgcaaagctacggctatcccagtatcaccccgtcagcagcagctagagacgatgcattaccatctgctgagccaaaaatggtgactgctgtcaagccatgaaaaatcaactgcaatgccctctatataatatttgtattggtagcctctctgcaaaatatatatagggataagacttgcctcggttatttcttttctagaccctactcacatggaagccatccaatatttttcctagctcacctattgctaaccctgttagttcaatctgctaattttatgatttttagtgtttgagcataatgaaggaaagcaccattgtaaaaactgaactacatgaaaagttgaacatagattttttttccctggagatgagtttaacagtgagttgccctttggaatcattgaac

SEQ ID NO: 128764 - DNA, 1090 bp, Zea Mays
aactattttcttcaccagacgtccagacctgctcacggcctcccaaactccgccgccgccctgttgcttccagtctcccctggcaatctccgtcttgcaaaccctagccgctgccatggcatatctagctcccgcgaccgccgcctcttctctccgcacccccatctacgtagccgcctcttcccggcgccgttcctttctccccgccgccgtcaaagccatcgccagttctgcacatcccatcctctcctccctccgcatggccgcctccgccgccgttctcttcgccgccacttccccggcactcgcgtgcaccccctccgttcctccgcccccgctcactcctctgacagtcacggtgtcccacgacgacgccatcccagacgcctcccgactcttcgagaagctgataatcgagactgcctgcctcgcgcgcgtcggccgcgcggacgaagcgcgctcgcgcctgtccacagccggatgtggagagagctacgcccgcctcctagccgctcaggttctgttcgtggacgggaagttggacgaggcgatcgcagcattcgaggagcttgcgcgggaggaccccgccgactatcgccctctgttctgccagggcgtgctgtacctcgcccttggaagggaggcggaatcagagtccatgctcgagcgatgccgcgaggtcggcggcgacgcgctaatcatagatccgtcagtgatgataacgccgaacgtggagacggaattcgatggggagaagccggagccggcgaaggtttgacctgtaactctgcagcggatgatctcataataaggtaacactggcattttggtaaccatagacgaataagaatgagggaaatttcagaacatgttccggtgatactaattagctagaggaaaatttgacacggaaagttccttattctgtagaatgtgcctttgtggtgagtaaagatgtccatttcatatggcctttgtgatgagtatgtctgcattgaaaagttagtgctttcattcttgataatggacacttcgatttgattcatattcacatccattgaatctttatattcggttcttgtatactcaa

SEQ ID NO: 128765 - DNA, 396 bp, Zea Mays
attgctcattaccagcacaatgaaacacattagcaagatatgagtaagtaacgaaaggaaaccacgatggattgggaggcatttttctcgccaggaagaagccgcacctcagaggcggtcgatagcggagagcacgctatggatttagttgacaaagttccttatggtgagtctaaaacgaaaataatagcgtggttgacagaggctggtgcaaagaatgccagaaatgtggggaaaattgatgaggcatcagaactgaggagaactgtgagtgatatcaagcacaatgttcaggcaccgcttagcgagaatgctaagaccaataaacgagtgactgggattcacaaagaattgcagaaactgcatagaaaagctattcagaacaccatcaattaa

SEQ ID NO: 128766 - DNA, 150 bp, Zea Mays
atgggatcgaggaacgggaacgtggtacgcggtacgctactaaaactaggatttaacactactggaatgagattgttcccatgttcccgaaatagaacgaacgttcccggaacgaggaacgtggctaagttcctagttcccggttactaa

SEQ ID NO: 128767 - DNA, 1180 bp, Zea Mays
ccgataggcccagacaccagtgctcgagggcaacgaaaaaaaaagcacactcgagaacctcccaaaaccctcgtcacccgccgccgtcgccgcaatggaccgtgccccaccgcgcggcgcgccccgcgacgccgtcggtcagcggtggctcggcgtattcgccttccaggccgcgctctcgaccgccgcctcggcgctctacctcacggtgttctcgagcggccgccgccacccgctcctcggcgtcccctccggcctcctcgtcgcgcttgctccgttcctcgcctgcgctgccacggggcctctcgcgctcgcgttcctcctctccgcgtccccgcacccgcggcctcccccactgccgcggcgcgcgctagcaacctccctcctcgccgcggccggcgcgctctccgtgggcgccgcggcggcgatgctacccgaggacgccgggtgggcggccgtcgctgggctcgggttccgaggcgccgtgcttgggaccatcttcgccgcgcactattttgtccgtcggaggtggttgctccagttccccgtcgtgcagcgacctctattctatggattaaagatgggtctcctaccatctggaaacagggctctaaagttatcaatccatgccttcttgcttttccatttcctagttttctttcttccctggcaattcagaaagggaggttctgttggaagccaaatacttactgaaatcagtattttaatagtgactgctggtgtttccttctgtttggaaataaactatcattttgtccaggttgcacatacaaggaggtgcagtttcgctccacctcagagcactgccgctgcagagacaaatcccactgaatttattctggaaactttggaacaaagtgatccacaatcattgatacaatatcttgcttaccaagatttgtgtgtggtatctgagtgtaacttggaaccgtggcgcagagctgctttctttgaggaatctggtgaaacttatagaagaattgtgacagcttgtttgaagccacttgaggagtttacttcaaaaattgctgaagcccttgaaggtttttctagtgatcagccagaattgatgctacaacagtccagactctttagtgcatttgatgattcccaggtaaagttacatcatgtatataatgacctctgttgcattttcggc

SEQ ID NO: 128768 - DNA, 1995 bp, Zea Mays
atggcggcccgtcagccgacgcgtgaaggtcagcgcccaccgatgccgcaagcacgtggtggtgggcttgctgctccgcgtgggggtagaggatctctcccaaggtccagccgtggacgggccatcttggggggtcgtgatcgcggtcatgcccgtgggagtggccgcgggtggttcaatcctggacgtgggcgtggctttgggcaggttcaggctgctgctcctcaacaacgctatgtcccggttgaccttcaggaagctagccaaggaactcaggcagaggcgccggaaccaatcaaggccaaaaagcctcgtacaccattctgttttcgctgtaagtgtcttgggcacctgcaagagaattgctcagctattcttgactgctgcatctgcaacaaaaaaaataatcatgtgccggcaaagtgtcctattctcaagatgccaaggcctactgcatctatgttggggtgtgcaaaaaatgaattgaccttttttcggatcccggagtttgacttgatggtcgaggctcctgcaccggcaccaactgctttgatatcagtatcaggtggtaaattagatgcgttggccattcaattggagcttgccaaattgtctagagtggagtggaactgggaagctctaccccatggggatgattcttttctggtagtatttccctcagaggatgaactgctccggatggctgatattgagtataaactcaagagtggaattgctattagtatcagtcaatgggaaaggactggggatgctagtccagcctattatttggatgagatttgggtgcatgttacaggtgttcctcatgactggcgtcacttcttggccttctgggcagttgggtctatgattggcactacgattgaggttgatatgttgacatacaggaagaaggggattattcgcctcctggttggtattttagacagagaacagttgcctctaacaacagatattgtcttccacaaggttggatatgatattactttcacccctgagctgccagattttgaaccggctatgccttccctggtcctggatgcttctgagaaagaggacggagacaacaaggaggatggggctccgagggttagtgaatttgatccatcaagaaagaaacaaaagaatgtactgggttccttcggtccaaattcctctagtgataggcaggactcggcccccatgcatgttgattgcagtgaggttcataggccaatgtacacaacagggtcaggagtatgtgttgtagcacctacagagaagagtgtaatcaaatcgtctttaccacctggtttcaagacaggcaaaccaaatggttcaattagtctgatgaagcctctttctccttcgaaggaaaggacaactgatcacgctaagcaggtttcagtgcatgttgtgcctggttccgctttggttgcagggacaggtgccgcaatcccagcaggtgatcttgcctcggataattgggcaccggtggtccctcaggctgggccatctttaacctccatggtcaatgggactacgatgcctctgcagtttggatctctgaacatggccaaccaaaccttggctgcttgttcacggcctgctgtggagaggaatctggtggcgactcagcaaatgaagaccacccaaggtgttgtccaggatcagagcctgcgtggcgagtctgagcccgaaaattatgcacctgctccggttatttcttatggtaatagtccatcccattttcattatattgatggtttacgccgtagcttacgatgtaatatgcaagctgctaatggctcttacctatcagatattgatatgacagaaaaggcaatgcggcgcgctgcagcacggaatcttgacgctgatttgggctccaagacggtggcttcctcacaagagatgctacattcgcctttaacgcccgtgcagcaggaaactgaggctggaagaaatttcaagaattgtatcccctcgatgtaa

SEQ ID NO: 128769 - DNA, 190 bp, Zea Mays
tttcttttttttttctctttttttgcgatttttttcaaatatttttttatatttttctcttttgcagcatcacataagaagaaaacacaccaagtttcagattttttgtgcaatgacgcgtcctctggaatttctacaagtttgccctaaaatcggaataaatgtttggaaaatgagaagtcctatttcc

SEQ ID NO: 128770 - DNA, 192 bp, Zea Mays
atggatcatccaaacaagatcccccacggcaacgacgagaagaagaaggagcacgagaagcaggtcgagcaaagcaagaccgacaggacgcgcgagaagaacccaatcaaggagccggagcccaagccgaagaacgaattcgaagtcccaaaacccatcccgagaatgagccgccaaggcatgagggagtaa

SEQ ID NO: 128771 - DNA, 243 bp, Zea Mays
gataggttgttcaacattcttggcgagaacagctcagaactcgcgctggggataggctgcaggagcgttaccaggccaccacaagttcttaaggaaggaacaatgaagacaatttttgttaattttgtggatttgtgtaaaacgatgcttaggcaacctgagcatgtgatgatatttttgcttgctgaaatgggaacaagtgggttacttgatgggcatcaaaggatcgctaacagagattag

SEQ ID NO: 128772 - DNA, 454 bp, Zea Mays
tcccggaggagctattttcagtgcttcgaacaatccagcttttgcaagggttgactgtaggcatgggccttacattctcgtgtgcccagcattggagaccgatggctgaggaggcgttgttaaaagctggaagacaaagcgcttcaaaatcaagaaaacagaagaggagttttctgaggagattgttttggtgaagtaggcatttagccgcatagcgaacatcaaaggacatggtatacgaacattcagtgatgaaacgtaagtagccaaaagcttgagccttcgatttttattgatagtatatctgtccatattcgtttaccttgggtgcgtgttattttatatatttgctcattcctttatcactatgtgttatttgggatttagtatatagttgggattgtatcggaagctgacatgtacacaagtgacatggaccaattcaaaggaaatc

SEQ ID NO: 128773 - DNA, 1664 bp, Zea Mays
agcagcatggaaccagctgctgcggcatgggtaccattcaactttcaactggcgaactggacagcattgtttcctggtgagatatatggtagctggatgcaaactcgtgcccctgataactcctccggcagcggccggcagctatttgagtactatgctgcagccacacagcattgtccaattgaggaagaagcacaagaccagtcgtttgaggtcgctttggatttgcacaatctggaaatagacaacaacgacgccatttgtgtgttcgagaaagtagctcgtaactttgaggccgatatccgtaggacgaaagagaagatccataggtaccctgaatgcattcgagatctcggtgattactatactgtgccgaggattgtggccatcggtccttaccaccacggcaaacaaccgttagggaaggcggaagaggtgaagtgggtggcggcgtatcactgtatcgtagaatcgggctgctcaccgcaggcaatgtacgatgcggtcgcctccgccgccgacaatgcccgcaccctctacgacaaggatgtgatggcaggtatcggctatgacgactttcgagttatgatgttctttgatgcttgcttcctggtgcagtacatagtctggtttacgggtttggagaatgagacagatccgtcgtcatggcacaatttccttcacctcaaccgcagcggcatcaaccatgacgtctggctgcttgagaaccagctcccctggagtgtggtggaggccgtcatgaggctccggcatgtgaacctgcggaagtacgttgaggattggagaggcactctgcaagaccgccgggatctcatagaaaagcctttcgtctgggaagacaattacgatccaccacatctccttggcctcctccggcactacgctgtaggacgaagtgaaaaaatcatcgaccgcgacctgtccaaggagttcgactcgctgtcattttcagctagtgccatggagctcgccgaaatcggcatcacctttagggccaacgaaacagcaaagctcgttgacatgggcctaaagaaagatgtcctctttgctgagctctcactagcgccgctgtctctaaaccatgcgcgcgcaagccgcctcgtcaatatggccgctttcgagatatgcactgtccctagttttattgatgctaaagttgaagactccgctgtttgctcctaccttctcctcctctgcatgttggtgcatagggaagaggacgtgcatgagctgcgacgacagggtatcctgcaaggaggagctgggctcaccgacaagcaggcactcaaattcttcgccagccttcagagcctgcccgacgggcaatgttgtaccctaaccatgctagaaatcgagaactacaggatccacaagaagatgcagacaaaggtgtacaagaagcgcaaaaccatcttcaaggttttatccatcactgttgcagctatcactatctttggtacactactcagtatctcagcacaactctcaaatgtctctaaaggctgaagtagagtttgaaaaataggtgcgctgggataggtactaggctggtgagctcactttgggctgccctttgataccttttgttctatcaatgctttgtgttactttccttatagtagctataacattccttcaatgat

SEQ ID NO: 128774 - DNA, 1603 bp, Zea Mays
ttcatcgattcggcgagttcaaccgtgtcctccgcgctccgtgcctgccagcctgccactgctcggttctagaatccactccctgacctgtgcggcgctccgtgcctggctgccagcctgccactgctcggttctagaatccactccctgacctgtgcggcgttcccgtgcccggccggagtatcgatcgcatggcctgcgccggcgccgcgcagaaggtctcagcggtgctctaccactacccgtgcccggacggcgcgttcgcagcgctcgccgctcacctctatttttccggcgccgcccacccggtccgattcttccccaataccgtctacgaccccatcaggagtgattcacttccactggaagaaataaaagatgtttaccttcttgactttgtgggacctcctggttttgttgaagatatagcccctaaagtcgaaagaataacaatcctggaccatcataagaccgcttttgaaagtttgtgtgtgaatgccacacttgggcaaaatgtgaccaaggtgatagacatgcagcgtagtggtgcgacaattgcatttgacttctttagaaacaagctcttaacagaagttagcacctcacggggtaatgaaagtggtaaagatgtagccaaggtcaaatatgtacctgacaacaaggctgaaacagtacacaagctttttaagtttattgaagacggggacttatggagatggaaaattccaaatagcaaggccttcagcagtggacttaaagatttggacattgaattcaatgtcaatgcaaataataaattgtttgatcagttgttggagttggatcctgagcatgtcatttcccatggacaagcgacattattagagaagcaaagattaatagatgattgtttggagaaatcctatgaaatttccctgggatgtggccagtttgggagttgtctggctgttgatgctgatgctatttcaaatttgagaagcgaacttggaaatcaactagctagcaagagccgtgattttaatctaaggggtattggggctgttgtatacaaagttcctgagttgaataatgaccagatactgaaagtaagtctaagaagtttagaacaagaagacacaacctgtatctctcaggaatatggtggtgggggacatcggaatgcaagctcgtttattttgagtgtgactgagtttgacaggtggaaagtcggatcttctcgaccaaaaggtgcataaccatctggctttcttcattgctctacaagattaatgaagaaacacatgcagagggaacaaaaccccaaacttggggatgtgggacatgagaaacatcatagctgcatatcagacaattctcgacacttacgcagcattctgctatcatgccatatcttaccctatggcacttattaataggctgctatttgggcacttagttttacaaaatctgctgaaatcataattggagaactctacatgtctcacgtactggcttagacactgaacatattagtccttaaatgcgtctttttacattttatttatgcaagtgctactttgattaatgtgtagttctgtaagagcatatgagcatcgtatctgtc

SEQ ID NO: 128775 - DNA, 1678 bp, Zea Mays
ttcatcgattcggcgagttcaaccgtgtcctccgcgctccgtgcctgccagcctgccactgctcggttctagaatccactccctgacctgtgcggcgctccgtgcctggctgccagcctgccactgctcggttctagaatccactccctgacctgtgcggcgttcccgtgcccggccggagtatcgatcgcatggcctgcgccggcgccgcgcagaaggtctcagcggtgctctaccactacccgtgcccggacggcgcgttcgcagcgctcgccgctcacctctatttttccggcgccgcccacccggtccgattcttccccaataccgtctacgaccccatcagatgttcaattctctaattccaaaggtgcggtgatctaagttaatggtgctgtgttaaacatacgaacatcggacagagtgattcacttccactggaagaaataaaagatgtttaccttcttgactttgtgggacctcctggttttgttgaagatatagcccctaaagtcgaaagaataacaatcctggaccatcataagaccgcttttgaaagtttgtgtgtgaatgccacacttgggcaaaatgtgaccaaggtgatagacatgcagcgtagtggtgcgacaattgcatttgacttctttagaaacaagctcttaacagaagttagcacctcacggggtaatgaaagtggtaaagatgtagccaaggtcaaatatgtacctgacaacaaggctgaaacagtacacaagctttttaagtttattgaagacggggacttatggagatggaaaattccaaatagcaaggccttcagcagtggacttaaagatttggacattgaattcaatgtcaatgcaaataataaattgtttgatcagttgttggagttggatcctgagcatgtcatttcccatggacaagcgacattattagagaagcaaagattaatagatgattgtttggagaaatcctatgaaatttccctgggatgtggccagtttgggagttgtctggctgttgatgctgatgctatttcaaatttgagaagcgaacttggaaatcaactagctagcaagagccgtgattttaatctaaggggtattggggctgttgtatacaaagttcctgagttgaataatgaccagatactgaaagtaagtctaagaagtttagaacaagaagacacaacctgtatctctcaggaatatggtggtgggggacatcggaatgcaagctcgtttattttgagtgtgactgagtttgacaggtggaaagtcggatcttctcgaccaaaaggtgcataaccatctggctttcttcattgctctacaagattaatgaagaaacacatgcagagggaacaaaaccccaaacttggggatgtgggacatgagaaacatcatagctgcatatcagacaattctcgacacttacgcagcattctgctatcatgccatatcttaccctatggcacttattaataggctgctatttgggcacttagttttacaaaatctgctgaaatcataattggagaactctacatgtctcacgtactggcttagacactgaacatattagtccttaaatgcgtctttttacattttatttatgcaagtgctactttgattaatgtgtagttctgtaagagcatatgagcatcgtatctgtc

SEQ ID NO: 128776 - DNA, 234 bp, Zea Mays
atggccgggggcttcgagtggaggacctctgcatccacgaccagaggagtggagcaggccattattaccctcaaggaaggtgcacatctcctgaaatgtgggaagagagggaaacccaaattctgcactgtcaggctatcttatctctgttgggtcatgagttgttttatgaaaagatcaagatatccaagaggaagtcgcctggtcagtcccagtgttcgaccaggcgactag

SEQ ID NO: 128777 - DNA, 2639 bp, Zea Mays
atgtcagataatggacatgtatcaggaaccaatatatcacttccaaggttattgaaatcgtcacagattcttgatgtgcagagcattgcctgtggagagaaacacgcggcaatagttactaagcagggtaaggtattctcttggggtgaggaaaatggagggagattgggacacaaaacaagtgacagtgtctctgaccctaaaatcattgactctcttgcctccacacctatgaagactattgcattgggggcaaagtacacctgtgcagtttcagtttcaggagaactttatgaatggggtgaagggattcacagcctagggttcaagaacaatcagtgtcaaagaagcccatggttcccacataaattgatcagaacttcagatggtatatctgtggcgaagattgcatgtggtcagtggcacacagctatagtatcctccacaggtaagctgttcacatatggacatgggacatttggtgttcttggacatggtgacacacgtagtgttgttcagccgaaagaagtggagtccttgagggggttaagagttaagtccgtcgcatgtggaccatggcacactgctgctattgtggaaacatcaggaacacccaagagcaatgctcctggtgggaagctattcacatggggtaacgcaagtggagagaagctgggccatactgacaaaaagtcgaagcttgtaccaactcgtgttgaatcactcattgattgtgattttactcaggtatcatgcggtgtcgtatttaccattggaagcaaggaccatggtcaattagggaatcctcgatctgatagcgcatgtatttgtatggttgaagggccacttaagactgagtttgtcaaagatatatccagcggaaattcccatgttgcagtcttgacaatgaatgggaaagtgtttacctggggcaaaggcacagaagggcaacttggtttgggggattaccttgacaggaccttcccaactctagtggaggccctggaagataaacaggtggacagtatagtttgttcttccaacttcacggctgtaatttgtgtgcatggggaaatctcaagcaaggatactgtatgcagcagttgcaggttggcattccggtttacaaggaagaagcacaactgctacaactgtggttccatgttctgcaattcttgcagcagcaacaaggttcaaagggccacccttgcaccagataagagcaaaagatgtcgtgtgtgtgatgcttgtttcaatgaactgaataaaacagctgagcatggcaaaatgagttgtgaatcaaagatccaaaaagaaccgcctttaacagaaacaagaacatatacaccaaagttatcacgaatgcttaaggaagcaaatttcatcatggaaaaaatgggttccatacgaagtcccaaccagagaaatcaggaatcagccactctgaatcaaatgcaaaaacaaaggtggggacaggtagaatgccccgatcaattcaaatgtgcaagagacaacatttcacattgtttgacatcaaagaagcagccagttgatattggtcgtatagggagaatgaatgatccagtctcacaaaagactgctgcccctttaacacgaactactgataagaggaggaaagaacaagatttgatagaaaagataatgttggaggaggtcaaacagcttcaagcacaggtaaccactctagcagaagaatgccggcataggagcctgaaagttcagttgtataaacgaaaacttgaggaaacctggttgatagcaagggacgaggccacaaagtgcaatgctgcaaaagagattataaagattttaacaaatcagaacttttctgacacagtggtgagaaatctttcctctgagccaaaggtcctatgttcgatgcagcatctctgcaaaaatgcagagagaaatgctttatcaaataaacttttagatgatttggaactagatgattccaggatcgtccctgacccacccgacaaaactcctgtcaccggcaaaattccaccgctaaacagcatcagggatcaacacaacatagaggaagtggatatgcaatctacaacgtcttctaacactgttgtggcggatgactcggctgtgcatcagaatggcagaagagcctccaatagcagcagaggttatgacgggggaacagatagcacagttgctcctactgactccagtggaatgatcgagcaaattgagcgtggggtgtacatttcagtcgttacatcccccgatggtaagaagggaatcaagagcatccggttcagccggaagcattttggggagaccgaggcacagaaatggtgggaagagaatgagagcagagtatttgcaaagtacaacagcatggaatacttggcagcacaatgtcgataaggaaaatgtacaggagaagccagttctttgtcacagtgtctgtagaacatgtacactgcaacaccatattgttcggtaaagtcgtaggatagatgagatagaaggaatgatagtatcctatctattaagcagataaaccgcagcatatccccgttctggattaaacttaggtccatggttttacttcgactcaataacaattcaattctacgcgaattggggtttgtgttcga

SEQ ID NO: 128778 - DNA, 122 bp, Zea Mays
gtaattggaggcctttcaatatagttatttgctcatatgattcttttaatattttttggccaaaaaaatagtatcttttccaactttagcaatttttcttatagacactataatttttcgat

SEQ ID NO: 128779 - DNA, 806 bp, Zea Mays
caccacaacacccctcgcactacgcgcgccgccgccgccgctagcactggtgagacgagtacggaggagcagcacagggatggacggcggcctcgaggatgagcaggaggacccaagcttcctcaaaccaccacagcacccctcgcactacgggcaccgccactgctgtcgctttcagcgtcggtaagacgagtagggaggggcaatgcagggatggacggtggcctggacggcgagttggaagacgcgggcttcctcgacgaggtattacgcgcgacggacgaggtcatcgcctcccgcaaccctaaccccgctcccgctcccgctcccatccccatgtttgactccttcgtcattgtccccgtctgagagcctcctatcttcccaccgattcgatctcccacctccccgtcgcttcgtagccccgcttcacgatcagcttctcccctccgctaatggaatgagtatttttaccggttaaagtttggttaatgaaggaatagaaaatggggttgtgcaatttcaagactcaggtgtccatggattggagaaatttccatttagatgacccatcaacatcctacattgcctggtgatcacacctgtgtcacctgtatgaatgttggtgggttcgacttgcaatgttgttacaacctgacttgactaatgctcttactcatgcttacaagtaatttgtttcattgggttttgcatgacgtctaatagaatatgttattctgtattcattgtattagtatgttgcaaggggtcataataaatcgggtagcggtaaaatattgtatgac

SEQ ID NO: 128780 - DNA, 149 bp, Zea Mays
agcctgtttgtgagcttggtattcctcctgaaaacatcactgcaaaccaattgttatttggcacattgggggagtacgccggatttgatcccacagagcccacttcacgcagtgggggtaaagcaaaagcagtgcagcaaataaaacag

SEQ ID NO: 128781 - DNA, 809 bp, Zea Mays
cagagctagcggagggaggcgggtcattcgatttgccatgcttaggattggagaatcactagagtaatagtatatacatggtggggagtgaaaccaacagaggaagaatccgttcttgatcaaaattagtcggctgcttggttcgtcgtctgcgtgttcgatcggaggttggcgacgccttggcgtggccgctttccgcaagaaagcaaggaaattgtgctgaccgccgctaatgcgctggatatttctgggagtggaaacgaaagtgtactctgaatttcaagttcctgtcaaaagtaagatcctctgacgaaggtgtggttgtgatcatgcataaactaactgttgctgccacatggatcggagagggagatcgatccacagaagatggtatcatttgtcaagtgtatgttgggacttgatgctgttgtttgggacattattgggtcgtcattgttggagaaagttgtgtatctacttacagaattggatgttaatataacatgggaagatattcttcaagataaacacaacaaaggtatatttgacatggagcttgaggatttggctgaggatgaacataaccttggccgcacaagtgtggagacttgaattcatatatacttagttaggctcaatgttagcataaacagttgatgaacaagttttcccattagtattttagtttgaatttagagtacaattatgtatgagttatttgacaatgcttatttatgagatattgaatgatatttatctatattgtattaattatagtgttattaaatatatgtgtttgtatttttctc

SEQ ID NO: 128782 - DNA, 740 bp, Zea Mays
cagagctagcggagggaggcgggtcattcgatttgccatgcttaggattggagaatcactagagtaatagtatatacatggtggggagtgaaaccaacagaggaagaatccgttcttgatcaaaattagtcggctgcttggttcgtcgtctgcgtgttcgatcggaggttggcgacgccttggcgtggccgctttccgcaagaaagcaaggaaattgtgctgaccgccgctaatgcgctggatatttctgggagtggaaacgaaagtgtactctgaatttcaagttcctgtcaaaagtaagatcctctgacgaagaagatggtatcatttgtcaagtgtatgttgggacttgatgctgttgtttgggacattattgggtcgtcattgttggagaaagttgtgtatctacttacagaattggatgttaatataacatgggaagatattcttcaagataaacacaacaaaggtatatttgacatggagcttgaggatttggctgaggatgaacataaccttggccgcacaagtgtggagacttgaattcatatatacttagttaggctcaatgttagcataaacagttgatgaacaagttttcccattagtattttagtttgaatttagagtacaattatgtatgagttatttgacaatgcttatttatgagatattgaatgatatttatctatattgtattaattatagtgttattaaatatatgtgtttgtatttttctc

SEQ ID NO: 128783 - DNA, 402 bp, Zea Mays
atggccccacgtgtcaccgccctggccttcctcctcttctccgccgcctcgtccgccgccatctgcgcgctcctgcactcgtcgctgcagaacgccgtgtcgcccctgttcgacggcacgcacgcgcgcatcatgcgtggctgcctcggattctctttggcctgcgaatctccagaacctgccgaagaattgaagagctcgatcgctcaacagattcatcaacttgctcgagaatttttcgggacgacatctggcggcacgaccgcacaacgcttgagcgagaagagatgcacagcacagcatagcacagcacagattcgccggcgttcggtgcgacaaggaccgcaaagtcttcaggcttggagagttggagtcagtggagaggggcattttcccgggtag

SEQ ID NO: 128784 - DNA, 410 bp, Zea Mays
tcccaacggcctgtacagtggctgcccggcatcgcctccttcaatggctgataaagttgtgccagtacaggctctggagatgcgccgcgcccgtcgagacggcgagctggtgtacgagccatgccactacgattttatatggagtggcgtagaaaaggagagggcggcatgtgtccgtgcggtggttgtggcggtgcggtgcggtgccgaactgccgagtgcttgccgacgcgaggtgcgatcctagaggcaggctcgtagccgtagccgtagccacgggaggaggcgccactcccgctgccgcctcccgccacagtgacagtctgacagccctccacccaccccaccttgcccggccgttcctcgtggcaggctggctgactgacagacaggcagatcacgcgcccgct

SEQ ID NO: 128785 - DNA, 901 bp, Zea Mays
catcttcctgctggcagcttccctctccctccgctgctgagcaagctgatccaccgccatggggctggcgatggggaggcttcttgggtggaagaaggaggcgcagatcgcgctgttgggcctcggcggcgctggcaagacggccattctgcacaaactcaagctcggccacgcaatcaccaccggaccaacgatagggttcaacagcgagacgcttgaatacaatggcatcagcttcagggtctgggacgtgggtggtcaaggcgaggtagctcatgtatcagcagctgtattgttcttgcattcaagtacgtctgtgtgcagcacctactgtgcgtggcactctgattaccattttgatttgcagctccggcccttgctaaggcactacctctatggcgtccagggcgtggtattcgtcgtcgacagcagcgaccgggagtggattcttcgagccaaagatctgctgaacatcattctggacgaggaccagttcaggaatagggatctcgcgctgcttgtgtttgcaaacaagcaggaccggccgaacgtcatgagcgcagcagagatagcggacgagtttgggcttccgtcacggctttgcaaccgtagatggcacattcaaagtagttctgcgatctctggagaaggcctccacgaggggatggcttggctctgcaccaacattcgataggaccaagatcctcctccttcacaaaagactacagtacaaaaggggggcatgctgtttatgtttttgcaggcctaaggaattgtaccagcagatgagatacatgattatgattgctggacaaggatagtttgcagtgtgatgtagaacctgttaggatttatgggctaggcccaattgagaaattcgaataaatcgcaggaaaatcac

SEQ ID NO: 128786 - DNA, 2502 bp, Zea Mays
cagccagtacgcaccgaggcggggcaactgctccacactccacagaccacagtcgccgccggctcatctcctccgtgcccggcacacgaactccggcgccgccgacccacaatggaatcccccgacggcagtcatggcacgaatactcggcccactctgcagcggcccaacaaagtgaggaaacaccaagacccatacaacgcgacgtcgcgatcccattgcccatccccagatctcaacccgaacctcccagccgcgccgccctgatggcctacaccacctcgccgtcgacatcgacgtcgacggcagcggcggtggcctgggccttcgctgccgccacctgcgtgaaactcctcctcgtccccacctaccgttccaccgacttcgacgttcaccggtactggctcgccctcacgcacgcgctccccgtgcggcagtggtacaccgacacctcctctcagtggacgctcgattacccgcccttcttcgcttacttctcccgcctcctctccctccctgcgccgctcgtcgacgccaccctcgtttcaatccccgtgcgtgacgcgacgcccttcgcgcatctcatctacctccgcctcactgttgctttctccgacctcctcctcctcggatccgtcctcttactggcgagggacgcgcagcggaaacagcggccgttcctcgctctcgctcttgtcgtatggtcgccggcgctgttagctgtcgaccacgtccactttcagtacaatggattcctcattgggttgctgctgctttcgctgcacttcctcgagcaggggtgggatcttattgggggagtcgtgttcgcatgcttgctgtgctcgaagcacctgttcctcgtggcagcgccggtgtactttatgtatttgttccggcattattgctgtggccggggtgtcgtgaaggggctgggaaggctcgtgctcatgggttctggagtggctgctgtttttgccgcagcatttgtgcccttcgtgtactatggtcagatgcaacaactaattagccgattgtttccctttgggcgaggcctatgccatgcttactgggcgccaaacttttgggtattctatattatacttgacaagattcttgcatttcttcttagaagactaggctttaatattgccatacctgaagcttcgtttactgggggacttgttggtgattcgtctccttttgctgttcttccaaaggttctttcttccaccatccattctgcctgttcctttttgtttattccaatgaaacatgatgggtttatgatttcacatttgtgaacttaatggattgcaggtcaccccaattgctacattcttattggtcattcttgccatggctccttgccttatcaaagcattctctaatcctcaaccaaagcatattattagatgggtctcgtatgcatgcacatgtgggtttatgtttggatggcatgtacatgagaaggcatcacttcatttcactatcccacttgccctaatcgccatggatagcttgaacgatgccaggcattactttttgttgtccatagtttcatgctactctctattcccgttgctgtttgagaaccaagagtacctgataaaggtgctgctgctgctgacctacgctgccctcatgtgggtaggctttacggtccattttgctgcaaagtctgacctggaaggaaagaaaataagtcggtcaggcagcacagtgaagaagaatggcatcattggatggattggtttaagctatcttttgggaattgcaggcatagaattatggtctcaagtatttcaccatcatgtattcggcgataggctccccttcctacctcttataatggtgtcattctattgtggccttggaatgatgtactcctgggtgtggcagcttgtacatatagtccgacacacatgatttgattaccggtcatcagtggaagcattctcttgcctttcttgggttgaggctaatcgcgatgacaatgctgcctggaccgatgcagcggccaacacagtcatgtctgggcacagcattttctttttagctgtcgaagtcattgtctgtgtgcaagaaatttttagagatgtgtgaccgtgttatgatgtaattaatgtcagtttatataagtaacagaaaatctgcttgtatcaacccgcgcttcatgcgtgccgctcttttccccatctcaataacatctggcttctgcatcgagtaactgagtgtgtgtatgatatatgaacgattctattttctaggaaggaaagacatcaaatgtgatgtataatctgcttgttatctttctgcgtacatgcctattacgtctggcagatgatgcgaatatatcaacgattctattttcgactcgcctgctgatgatgctgatggcgcacgacaaatggggctcgtagttgcggccagccagcaagtttagaattgactgaattgaaatggaaaggaaaaccagggacgccgggacagaaaggaattggg

SEQ ID NO: 128787 - DNA, 1565 bp, Zea Mays
cgtaagctctgtcgctgactgctggtgctggcggccccgtcctccgtccaccacgccacgaactccaaaacccataaataaaaggcgcgaggtcacagacgcaggccgccttaaacacaccaccgctctcgtggggctgcggctgccgctgctctcctgatggacgccctcccgccgcccgccgccgtccacccgttcgcggctacgctcccgccctcattgtcgccgccgtcctcgtcgtcgtccctcaacctctccccctcgctgctcatcatcgccgcgctgctcgcgttcgtcttcttcgcctccgtgtcgatccacttcctcctccgctgcctcgcccgctcgtcggcgtcgtcgtcgtcgcatcggggcccaagcccgctgccaaccagggcccgccgcgcgtcggaggaggaggcggaggcggaggaggtggtagggtccacgaggaggagcgccgcggcggtggggccggaagaggcgcatgctgcggaggtggacgacgagaaggagcgcctgatcgcatctctgccgctgttcacgatggcgtcggcgctggcggcgcttccaaagagctcccccgactgcgccgtctgtctctcgcccttctcccccgacgccgacctgcggctgctcccggcgtgccggcacgccttccacgccgcctgcgtcgacgcctggctgcgcactacgccgtcgtgcccgctatgccgcgccgccgtctcgctcccgcacccgccgctccccaccgcgccaccgctcgccgcggggagcgcccaggaggcgctcgactcgcgggtcagcagcagcagcaactcgaggagtttccgcgtcgagatcggcagcgtcagcaaccgccgctcctctgccgcgggcgacgaccgccgcacctactcgctcggctccttcgactaccgcgtcgacgaggaggtggaggccgtcgtgtcccgcatcacccgccccgcggtgtcggcggcggccaagtcggagacacaggcggcgcccggagaggcgctagcggaggcagccgggtcccgcggctggctgcgcgagtacgtggaccgcctcgcgtcctcggcctcctccctctccgggcggtggagcgcgcggtggagccagggacaccacagcgcgcggtggagccagggacaccacagccgcagccatagcaaccggcaggaagactcgttgtggtgggacccggaggcggcggcgggcgcggcgatgcaccgcgcgccggacgaggaggagccggggttcgtcgccctgtaccgttggatcgtcggggtgtagccaggcaactgtaattacgggaccgcacgagggtgtttttgtgaacatcttatgccttcagtttttttaaaaaatctaggactcccatttcattgtaaaaatacaaaaaaacaatcagctccagacaccagaggtgagttcagcgtctccgaagcttcttcagttgatcgatttgttcttttccggaggccggagctgcaatgcgatgcaatttggggatttgaggagaccggattcctagctggttgggtcgttctctccactgaccg

SEQ ID NO: 128788 - DNA, 779 bp, Zea Mays
tccccgccctcgccaccaccatttcctaagaggaaacgccctgcacagtctagactcctccccatctgccgctacctttctacctacccatctagcacccctcgctcgcaaatcgcaatggcgctggccaccaactccgccgcagcagccgcggccgtgtccggtggcgcggcatcgcagtcgcgtcgcgcggtcgcgttcctcccgctgaagaggcgtaccatctccgccatccacgcagccgacccgtccaagaacaacgggcccgtggtccccgcggccgcaggcgccaagtcgtcctcctcggcggtggccacgccggagaagaagccggcggcgctcgggaattgggcggtcgacagctggaggtcgaagaaggcgttgcagctccccgagtactcgaacgcggaggagctggacgcggtgctgaagaccatcgagacgttcccgccggtggtgttcgccggagaggcgcgccacctcgaggagcgcatggccgaggccgccatgggccgcgcctttgtcctccagggcagcgactgcgccgagagtttcaaggagttccacgccaacaacatctgtgacaccttccgcatcctgctccagatgggcgtcgtgctcatgttcggtggccaggtgccggtcgtcaaggtacccaccgacacatcaaatccaccacctaattccggtcaccaggtgtgccgattcgctagatctgacccgactttgctgtgtgtggtaggtggggaggatggctggccagttcgccaagtgaaagg

SEQ ID NO: 128789 - DNA, 1381 bp, Zea Mays
aaagtttagcacgtcaaacggccacgaatatctcggtcgccaattgctgtatactcttaccttcgccttcgccgccgccgccgtacagtctagagagaaccggcacagccgccgcagtccgcagatgtcgatcgtggtggcatcggaggtcgcgaccgctctcgcgagccgcggcgcggtcgtcgccctcgagtccaccatcatctgccacggtatgccgtacccgaagaatctccagatggccatggaggtggaggccatcatcagggacaacggggctatccctgcaaccatagccgtcctggacggagtccctcacgtcggccttaacaacgaacaattgaagagattggctataagtggaaggcaatttcagaagacggctagaagggatattgtccatgtcatcgcatctggtggcaacggcgcaacaacagtttcggccactatgttctttgctcacaaggttggcataccagtttttgttactgggggcattggaggtgtgcatagacatggtgaacaaactatggatgtctcctcagacttaactgaacttggaaagactcctgtagctgttgtatcggcaggtgtgaagtccattttggacataccgcggacacttgaatacctggaaactgaaggggtgactgttgctgcttacagaaccaatgaatttcccgcgttcttcacagaaattagtggatgccaggtgccatgtcgtgttgattctccagaagagtgtgccaaaataatatatgcaaacaagaacctacgtcttggttctgggattcttattgcagtaccgatccccaagcagcatgcaacttcagggaaaattatagagtctgcaatacagacagctctaaaagaggcaggggataaaaggataataggaaatgcgatcactcccttcatgcttgaaagagtaaaagaactaactggaggatcttccttggaagctaatattgcacttgttaagaacaatgctcttattggtgcgaacattgctgttgccctttctaaccttcagcagagagaaataagcagaatgggaagatccgcgttgtagggttacgctcgcggatggagtagcacaggaagcaaaccatttacgaggatggaagctagctgcaggttgggaactggatgtgattgagatgtgtctgagtctgacaagaataggttgcctgccactttggcaccgtaatgagatgtaggccatcaatgtactataattagatgttttttgggatgtaatctgaatttggatggttctctatactgaaatcatctgctttgtgagcggaattatggaatggttttggcacttccatttgatacatgtagtatgtgcatgcaaagcaacctgttttggcac

SEQ ID NO: 128790 - DNA, 1737 bp, Zea Mays
cagtagatgcttacacgaagtttcttgtgttgtttgacaattgagtcaatatgtggtgcttaatacgagagtaatattgtagaaattcgtttgtgtttctgcaagatcctgtgtaagttataatgctttgctcatgttcagtcacgtgatcttattagtctattgcatgacaggaaactgaaggggtgactgttgctgcttacagaaccaatgaatttcccgcgttcttcacagaaattagtggatgccaggtgccatgtcgtgttgattctccagaagagtgtgccaaaataatatatgcaaacaagaacctacgtcttggttctgggattcttattgcagtaccgatccccaagcagcatgcaacttcagggaaaattatagagtctgcaatacagacagctctaaaagaggcagggtacagtcaacatctgcacttctggtaatgatatataaaactgatagctgatgttgccctttttttctcagggataaaaggataataggaaatgcgatcactcccttcatgcttgaaagagtaaaagaactaactggaggatcttccttggaagctagtatcctatagcattattatctgtatatagtttcattcagtggcatattattaagatggttgcataacgtgcaccaataattttaagcctacttgctgcattccacagatatgaaatccaatgcatcttcaaattcttattagacaatccatattggatttttgtgggaaacaaaggttcactgggcataattacaaaatcccatatcagttgtgtgctcttttagttcccttcatccaaagacagttctccttattgatgtttagatattgcacttgttaagaacaatgctcttattggtgcgaacattgctgttgccctttctaaccttcagcagagagaaataagcagtaagctactgtcactttaatagaagggcaggcctggtgaaatggtgagagctatctcaccgagtcactaggtcgtggattcgaagcaccctctccgcttttgtggggcaaagggtggcattagtttatctctttcctagactactcatgtctgagcatttggtaccgagtctgccctttactatcaataataagttttcattttgccatatgtagtgcttatgatatcacactactacttaatttactagtgttcttctaacacctctttctttctcttgtttataaaaataaaataaaagagagatatggtattaacttgtattgaatgtggcgttaagctactctttttatctccaacattgtgaatcaatcttgattcgtgtggttatggcttgatgaaatgtgattgtttgaatgacaggaatgggaagatccgcgttgtagggttacgctcgcggatggagtagcacaggaagcaaaccatttacgaggatggaagctagctgcaggttgggaactggatgtgattgagatgtgtctgagtctgacaagaataggttgcctgccactttggcaccgtaatgagatgtaggccatcaatgtactataattagatgttttttgggatgtaatctgaatttggatggttctctatactgaaatcatctgctttgtgagcggaattatggaatggttttggcacttccatttgatacatgtagtatgtgcatgcaaagcaacctgttttggcacttccatttgacctaccgtaggggtggttacattagctagagactcttttgcttaca

SEQ ID NO: 128791 - DNA, 258 bp, Zea Mays
atggcgtccagcagtgatagtctcagaaatggagctaagtatggcagtgtgccgcggcgggatccggcagccgctataccggaggcagcacgcactggcgcagtgccgggagccgtccggcggtgctgccgcgagtgggtgtgggcagacggcttcagttcggcggtggtcggcgccgaacttgcgttaggaccgcacaacccagtgggcacaggtggccgtgcagccctggacggatgcactggcggcggcgggtga

SEQ ID NO: 128792 - DNA, 405 bp, Zea Mays
tcgccacgtgtgccaatggacgccgtcgcgttcccgctgtcgcccgcaccgttcctcgacgacgacctcgatttcggggacttcacctttgcctccgtgccgcagccgcccaccgcggccttcgactggggcgactttgtggcaagtgggctcggatccgacgcgggcacatctgccccaacggccacgccagtcgccgctccctcctcgccttgggagaagccgcggggcccgctgcccctctccctgttcggcgccgatgccgacgacgacggccaggaggaggaggaagggccgaccgggccgccgccgatggccacggcgccccagtgcgctctgtccgtcccatccaatgggtcgcgccccgcggatctgaaggacctcatcttcgccgccacgacataa

SEQ ID NO: 128793 - DNA, 853 bp, Zea Mays
ggattaccaatttcatccctaattacgagtctcatagttttgaatttttgatggtcttcaatcaacacttgaaatgcagcctacgattgatggcctcaccttcaccaaccgagttcagtagggaagcagctcgtcagtctctcatcgcaatctcccagaccattccggagacaccttcacccgagactgtgaaggcaccgatctccattgcagaaaacgggaagctgggcgatggggcggataagttcagatcaaagctgatgtccatcacagacctgtcttctgatgcccaacctgcgcagtgccctcccgaggatattgctgcttgatcgtgtgattttcctgctcgacttgcggacataatgtatcagtgcttgctgatgctctgggcatttaactgtcgtgcattaaactgaagtccttgtgttactagtcgtttttctttgttaaaatattcagggaaaccggtggaaatatattgtgcaagtttccttaccgttgataaggaactaattagggggtgtttggtttctaggactaatttttagtccctcaattttattccattttagtccctaatttactaaatatagaaactaaaactctattttagtttccctatttaacaatttataaactaaaatggaataaagtggagggactaatgtttagtccctataaaccaaacacccacttaatctgaacatccagtcatacactcatgcccggaaaacctctttgtttgacaatggactctaaattttacactacaaaatataaggatcggattggactctatttttattaatttttaaactaaaaataatttaaatccctagcaatttatgaaaaa

SEQ ID NO: 128794 - DNA, 1493 bp, Zea Mays
accattctgttgtagttgacaatcatgatatttgaaaaacgagctcacaactatatttcacacaattgatgctccaaattatttttctgtaattgaaacctaatgtaggaatgtgtaggatatttgatttgcctattagagaaagatttgataggatgtttgctttgcttggtagggaaatatttgataggatgtttgctttgactgataggaaaataccaacattctcatcttcttatggccctgtgcttttacttcatgtgctatctgaatatagagtataatgtaaagctatttttgcagattggaactgcagagtggtcgggttctcagatgtaagctgcacaacattaagctatctccccatcgatattgcacactttaacttgttaccatatttagttcttttgtatgcctttatagtggcttgttaatttacactgctggttcctgcaaccttttacaaattggtaaaaatgaaaattgagagaggaaaatttgtgctgaagctttattcgtcctttggttaagtgattactgaatgaaaacaaatttaaaaatagtaataaggtttttgttctatcaaacacaatcaagatttgttagcttgcttgctgctgcttagatcaatattggtttctcacatcaactatgctaatgttgaggtgataatcagtctttcactagcataatgatgtatatgcagactaatttttgtctccgttgcatggcatttgtgttgttgtatactgctcaagtactgcttatgagattgcttgaactttatcctagagcctcaagagttgtcgttggccaaagctacatctatctttctttcagtgttttgctggaactgataacgtttcgagtctgcagaagaatgaatcatagaaagttaatgtgtgcatccatggttgtggtcttgacacggcggagcggacctcgctcgggaagctgctgcagccggtagactattgattggaacttttaggtacataagttctccacatgtagatgagcgttatcatcatagatatggggtcaatccctgttttgttcccatgcttgaaattgatggtcttcattttgttggttgtgacaaaagtcaaaaccggatggagttgtggagcagattgcgggttttgaatttcttttccaaatgtcgtcttcacgcccaccgcggaggggtggtgaccgaagagatagtggcaaaggcgtcccttgtgggctctgctcctatctcgcggtatgaagcctttaacttatgagatgagataggagtctgtgttcttatcccaatataaggtctacaatggcacaatgcttgtaccatctgtttttgcggtaacttatttttatcatgcagtgcatgtgatttgaaactttgtgttagcctttattgctttctaccttatggcacctgtagtagtgaactgatgatattattgtggactctgaagctttgtttgcttagaatggtaattttgttgtat

SEQ ID NO: 128795 - DNA, 640 bp, Zea Mays
agttcatcttgctccagtccagccataggcccatagccctggggcctgggctaggtcctctatctgcttgcattggacttgagaaaatatattgccattgcagaacttttagcctctactcccatgttgctctattctatattaatatatggttatcttaatccagggacatggcgactaacagaagtccaagattcctttctcatggatggatggtcccaattgagttggacgttttcggtgggaagcggacaaaccaaagcaggttcccgtttgacacctaaactttcttatacaaaattacttcttgcaagaccttttccaacataacacttacatataaatctgcatccttctaaccctaacgctttctagttgtctgaattgtgcccatattttgaagcacatgaaagtctattccttgtcatgggagcaatcaagagattgcttagatcactagctcactgttgaacgttgattggttggcgcgagctttgcttcgatcgtgaggagtgggtgatttgatccattcatcgcttgttctgagcattcggggactaggttgtggcaagacaaaatctgattggaagtattgatacaggttgtggcaagacatttttttagttttataatccctttc

SEQ ID NO: 128796 - DNA, 2774 bp, Zea Mays
atgggcagcggcgcgtcgcggctgctcaccgcgtgcgcgtgctcgcggccgccgccggcgccagcggacgacgggccgtgcctggacgacgcgctcggccactccttctgctacgccgccagctccgccgccgccgccgccgcgggccattcgtcatccttccgccacgccatctccggcgccgcgctctccgccaactcctcagtgcccgtgccgatctaccaatcctccgtcgccggcggcatgccgccgcagtaccactccgcgttccacacttcctcgtcgttctcctccgcgccgctgcagctatccaacctctcctcggggccgctcttcctctccgggcccatcgaccgcggcgcccagctctccggcccgctcgaccaggccgtgcccttctcgggcccgctccccgcgaagcccaccaagcccgctcgcccctcgtcgtcgcgagggttctcgaggaggttcaggaaaccctcgttcggcagcctgcggcggagcatctcggagaagaaccgaccatgcgtcgtgccgctccgccgggaggacggcgttcagtgggcgcacggccgcgccggggaggacagggtccacgtggttgtctccgaggatcagcgctggcttttcgtcggcatctatgacggcttcaacggccccgaggccccggacttcctggtcgctaatctctaccgcttcctgctgcgcgagctccgtgggatcttctacaaagaggccgatccggaatccaagcgactgtggcagttcctggcggatggcgaggacgaggatagcgaactcgacttctcgggctccggccggttcgcgctatcgcttgccaggctcaaggagcagaggcatcccttgtgggcccatgcggccgccgctggcgatggtcaaagcggcagggagtggggagttaagaggttgacggccgcaccggcggtgagggatcacagggcggtactgagcgcactggcccgggcgctagctacgacggagtcggcgtacctggacatgaccagtcagtcaatgggatcccacccagagctggcagtgaccggagcttgcctgctcgtggtcctgttgagggatgacgacgtgtatgtaatgaaccttggggatagccgtgccattgtggcgcagcgacgggacgacgaagattgcttgattgggagcattccggtggaggacattggtgtgggcttggagatcgagacaaggatccctgggtattcggcaattgggctcgaggcattgcagctgtcgactgatcatagcacgagcgttgaagagtatgtggactggcctgttcaacagcatggttttacaatcggcagaccatttttcttttggagttatgaatttatatatcgtgggatagaagtgcagaggatcagacgcgaacatccagatgatgatcagtgtgttgttaatgatagagtgaaaggtcgtctaacagttacccgtgcatttggtgctgggtatctcaaacaggcaaggttcaatgatgggttgctagagatgtttcgcaatgagtatataggtgataccccatatatatcatgcacacctactctttgccatcataagctctccatcagggatcagtttcttgttctttcgtctgatggcttatatcagtacctaagcaatgaggaggtagtgctgcatgttgagaattttatggagcggtttcctgagggtgatcctgcacagagtttaattgaggagctactctcccgtgctgcaaagaaagctgtctctagatcaattagtggttcttcaagatttctcttccatgagcaatactccactactaacctggagtctgccttttcaggcatggacttctatgaactattagatatacctcaaggggaccgcagaaaataccatgatgacgtcaccattatggttatttctcttgaggggagaatatggaaatcctctggaacatatgtgtgatgttcagctgatatactgtccgtgtcagtatttattccgatgcaatattcagctgaaatgaacttcagccggtcagcactcccaggcgattgcacatatgctcaccaagaggggaaaagtctggcatgacatacagctatgtagtccatacacttgtcgaagtggagttctccagctggggatcatcgctgatccttcacatcagctttgtcacagctcatgctcataggttaactcgggcagattaaagttgcagaaaaatgacagcctggtagggaggaattcctggaaaagcagagccaattttgttctgtttgccactacagctttgtttggttacatactcaccactgacaattttttccacctcacactgagttgtcatagagttgggtgcttattttatccttggaaatagaaaacttttaggtatatgcagctttttctcattcatgtgaggattgagcctgtattatattggaaactagaactgatcatgtcagaaaaatggatgattggcacctcattttgtcctgactcctgaaggtggttctccttcgagtctttgagccgttagtggcatccgtgaaagaaaattttacatttcgcctccactggaaaaacaaagctagtgcctcctagcccttggcaagttatttggttggtcctcagaaaagctaagagctgaaagatattttggaggcaatccatcagtcgttggcgatatttttcatgtgcatggtatatctgtttgtcgatcctgacgatatttaactctcaacatgatgaagaaatttcggttaggc

SEQ ID NO: 128797 - DNA, 1412 bp, Zea Mays
ctcgctgcatcggcatcgcgatctgtggtggtggcggcggctgtgcgccagccagccatggaggaggagcctcctcacctgttcctttgccccatctccatggaactcatggacgaccccgtcacggtctccaccggggtcacctacgaccgccgcagcatcgagcggtggatcttcgggtgcggcaggaccacctgccccgccaccatgcagtcgctggccaaccttgatctcacccccaaccacaccctcaagcgcgtcatcggctcctggctcgaccgcggctcgccgtccacgtcggcgtcggcgtcaccgtccgcgtcgtcactgtcgagcccggcccacgagctggccacaccgctgtcgcggatcctggaggcggagcggctgcgttcggcgctggccggcctcgacgagacgccgttcaaggtgacggcgctcaagaacatgcgcgcatgcatggccggcgacgtggccatgcagtgcgagttcgtgtcctcgggcgggatccaggcggccggccgggtcatggcgcaggcgctcgcggagagcggcgctggcggcgacttctccgcgttcacggcgtgcgaggaggccgccgccgtgctcgccctcctcccgctcgcggacgcggcgtcggtagggctcctcctcgcgcctgagcacatgaggccgctgatggcactgctccagcgcggcagcgccgaggcgaggctccatgccatggacatcgtgaccaagatctccaatgccggcgccggagactggaccgcccgcgtcgaggtcgacgacgtgctcaagtccctcctcgagctcctggccgacgaggtctcagcgaggctcagctcccgcgcgctcgacgtgctcctggacgtcgtcgagctgtcccgggtcggtcccaccaaggccgtggaggtcggcgcggtgcacgtcctcgtcgagctcctcgcgaatgctgacgaccgccacgacgccgagcggatactgctgcttctcaagcgcctgtgcaagtgtcccgagggccgcacggccttcgcggaacacgacctgtcggtggcggccgtggcgaagacgatgctgcgggtgtcggagctggccacccagctggccgtcaaggttctctggctcgtatccgtggtcgcgccctcggagaaggtcctagaggacatggtgctgaccggcgcagtggcgaagcttctgggcttgctgcacgtcgagagcccgccagcgacgaagcagaagacggtgcggatggtgaggatcaatggcgtgttctggcggcagtacccttgcttcccgactgatctcagggattacctgcggcttcttgactgactcttggattggtttaaccagactgtatttactaattataagcaaaaaattaaaaggcagaaaagtatgtattggac

SEQ ID NO: 128798 - DNA, 2011 bp, Zea Mays
tctattctgcaaaaaagaacacaccgtaagctcccgtcccggacggggaagacctcgtgctgccgccagatctaaccaaaccccgcgccctcctcaccgtccggcgagctacggactcagcagatcaccgtcgctcgagttgtacctgaaggcgcgcccgtggaaccggccgcgagataagggcggcgggaaggcgggcgacgatgccggtggcagcgtcggccatctacttcctcaaccttcgcggggacgtcctcatcaaccgcctctaccgtgatgatgttgggggaaatatggttgatgcgttcagaatgcatatcatgcaaacaaaagaacttggcacatgccctgttcgtcaaataggaggctgctccttcctttatatgaggatcagtaatgtttacattgtgatcgtagttagcagcaatgctaatgttgcatgtgctttcaaatttgttgtcgaggcggtggctctcttcaagtcctacttcggtggagcttttgatgaagacgctatcaggaataactttgttttgatatatgaacttcttgatgagatcatggattttggttatcctcaaaacctgtcacctgaaattttgaagttgtatataactcaagaaggtgttcggtcaccattttcctcaaagccctcagagaagcctgttccaaatgcgactctttcaagtcactggcgctgttggttggagaagagagggacttgtgtacaagaagaatgaggttttcttggacatagttgagagtgtaaaccttcttatgtcttcgaaagggagtgttctaagatgtgatgtgacgggaaagattcttatgaaatgcttcctttctggaatgcctgatctgaagctgggattaaatgacaagattggacttgaaaaagaggcccaactaaagtccagaccagcaaagagtgggaagactatagaacttgatgatgtcacattccaccagtgtgtcaacttaacaagatttaactcagaaaagacagtcagtttcgtgccacctgacggtgaatttgagttgatgaagtatcgaatcacagagggtgtaaaccttccattccgtgttctgccgacaatcaaggaattgggccgaacacgcatggagatcaacgtgaaagtcaagagtgttttcggtgctaagatgtttgcacttggtgtcgttgttaaggttccagttccgaagcagacagctaagactagtttccaaacaacatcaggcaaagcaaaatacaatgcttcgattgattcactggtgtggaagatcaggaaattccctgggcagactgaggcaactatgagcgcagaggtggagttgatttctactatgggtgaaaagaagtcatggaacagaccacctatccagatggaattccaggttccaatgttcactgcttctggtttacgtgttcgcttccttaaggtttgggagaagagtggttataacactgttgagtgggttcgctacatcacaagggctggatcatatgagataaggtgttagcaacaaatccatacaagatcaagatattattgacaaatgatattcattggtctccattgagcagctatccacagagatcaatctgtggcatcatgcatgatcataaagcgcatatattgtgacacaagtatctgaaactttgtacttcaacagagggtggggcagggcagatcagacaattttctgtgtttcttatttccattgtagtctgggatctctgttcttccctccatgccctgtttgtagtagggattattttttgctcgtatatttggctgtagctttccttgtttgttgatcaatacacctgttcagtttgtattgttttctccctcaaatggatgtatggattcacttgcataacagtgtgaacaaacattcgctgccaaagatctggtacgttgttagtgtttgacaattgtagtgtctgataggaaggtacattgtgcccttaaatattgctgtatataaagtttatttgattgtgatg

SEQ ID NO: 128799 - DNA, 1897 bp, Zea Mays
cgcagtcacgccctccgcaaaactcccccactccacgcccggccgcacctctcctatcttgctccaagcagcaagttccaactcgagtagattcacttcgccactccgttgccctctcctccgccgcccgatcctttccccgtctgagatggcatctccggcatcggcgtcgcttaaggaagccgtgggcagcctcgaccgcgacggctttgttggtctcctctccaacctcatcggcgagaccgcacacctgcagaacgacccgccgacctacaggcctcaggaggagcgcgtggcgcagcacgtagtcgacgtgctccgcccggtgtccgcggacaccgggggcggccccctccttgtgcggaagataagctacgccgagggcaggagcaacgtcatcgttgaataccccggcaccgtcccaggccgcgttgtctccttcgtcggcatgcacatggacgtcgtccctgccaacggcagcgagtgggactttgatcctttctcactaacctttgatagcgaggataaggacaaacttcggggacgtgggacaaccgactgtcttggacatgtcgcactggtggctcagctaatgcggcggcttggtgaggtcaagccacccctgaaacattctgtcattgctgtgttcattgccaatgaggagaactcatctgtcactggcattggtgttgatggcctcgtgaaggatggattacttgacaagctcaaaacaggacccttgttttggatagatacagctgataagcagccatgcattggcactggtggaatgattccatggcatctcaaggcaacagggaagctgttccacagtggccttgcacataaggccataaatgcaatggagatgaacatggaagcactaaaggtaatccaaaaacggttttacactgacttccctccacatgagaaagagaaggtctataaatttgctactccatctacaatgaagccaactaaatggagctatcctggcggggggcttaatcaaattccgggagaatgcacaatttcaggggatgtaaggttgactcctttctatagcacttcgcatgtcatggagaagttgaaggaatatgtagaggacatcaatgagagatttgaaacagtacttgatactcgtggtcctgtgtccaaatatattcttcctgatgaaaatctacaaggaaggcttgaaatcacttttgatggagatgtgatgaatggggtggcttgcaatctggagtctcgaggctatcatgcattatgcaaagcaaccaaggaaatagttggccacgtggagccatattccatcaccgggagtctacctctaatccgggaattacaggacgagggatttgatgttcaaacagctggatatggcttactgaagacgtaccatgcgaagaacgagtactgtctgttttcagacatggcccagggctttcaggtgtttctgagcatcatttcacagctggaagaagaggtctgagccttcttgatgggatagaccaatactccctccgtttcgttttagttgtcgctggatagtgcaaaattgaactatccagcgacaactaaaaagaaacggagggagtacctccaatttacattactcgttgctcagtgatctgtttaatacctccaatttacatcactggttgctcagttgtctgtttacaactcttttcaagattccgggacacggacatctaacaagccttcgaggttgtctgtcacccgttgaaaacggagccatttcaccgcagtgttctcgtgggcataaaacctttgtgctacaacttggcataaaatctttgtgctacaactctacgtaggcattacaactcgttgtatgaacttgaaattaatatatctcccatttccaaaaaaaaaa

SEQ ID NO: 128800 - DNA, 1801 bp, Zea Mays
cgcagtcacgccctccgcaaaactcccccactccacgcccggccgcacctctcctatcttgctccaagcagcaagttccaactcgagtagattcacttcgccactccgttgccctctcctccgccgcccgatcctttccccgtctgagatggcatctccggcatcggcgtcgcttaaggaagccgtgggcagcctcgaccgcgacggctttgttggtctcctctccaacctcatcggcgagaccgcacacctgcagaacgacccgccgacctacaggcctcaggaggagcgcgtggcgcagcacgtagtcgacgtgctccgcccggtgtccgcggacaccgggggcggccccctccttgtgcggaagataagctacgccgagggcaggagcaacgtcatcgttgaataccccggcaccgtcccaggccgcgttgtctccttcgtcggcatgcacatggacgtcgtccctgccaacggcagcgagtgggactttgatcctttctcactaacctttgatagcgaggataaggacaaacttcggggacgtgggacaaccgactgtcttggacatgtcgcactggtggctcagctaatgcggcggcttggtgaggatggattacttgacaagctcaaaacaggacccttgttttggatagatacagctgataagcagccatgcattggcactggtggaatgattccatggcatctcaaggcaacagggaagctgttccacagtggccttgcacataaggccataaatgcaatggagatgaacatggaagcactaaaggtaatccaaaaacggttttacactgacttccctccacatgagaaagagaaggtctataaatttgctactccatctacaatgaagccaactaaatggagctatcctggcggggggcttaatcaaattccgggagaatgcacaatttcaggggatgtaaggttgactcctttctatagcacttcgcatgtcatggagaagttgaaggaatatgtagaggacatcaatgagagatttgaaacagtacttgatactcgtggtcctgtgtccaaatatattcttcctgatgaaaatctacaaggaaggcttgaaatcacttttgatggagatgtgatgaatggggtggcttgcaatctggagtctcgaggctatcatgcattatgcaaagcaaccaaggaaatagttggccacgtggagccatattccatcaccgggagtctacctctaatccgggaattacaggacgagggatttgatgttcaaacagctggatatggcttactgaagacgtaccatgcgaagaacgagtactgtctgttttcagacatggcccagggctttcaggtgtttctgagcatcatttcacagctggaagaagaggtctgagccttcttgatgggatagaccaatactccctccgtttcgttttagttgtcgctggatagtgcaaaattgaactatccagcgacaactaaaaagaaacggagggagtacctccaatttacattactcgttgctcagtgatctgtttaatacctccaatttacatcactggttgctcagttgtctgtttacaactcttttcaagattccgggacacggacatctaacaagccttcgaggttgtctgtcacccgttgaaaacggagccatttcaccgcagtgttctcgtgggcataaaacctttgtgctacaacttggcataaaatctttgtgctacaactctacgtaggcattacaactcgttgtatgaacttgaaattaatatatctcccatttccaaaaaaaaaa

SEQ ID NO: 128801 - DNA, 1255 bp, Zea Mays
gttaaactgcaggagtaggacggtttatgttgttgctcttcaaccacagaagatccccgcgcaactgctggccacctttgccaatggcactcccgtagatagcttgtaagttgacgcccgctttccccgctccgaaactacacgccgttcagccccttatcacaggctccgacgctccgtgccgttgccccgctctttttcaacagcgacgctggtaacgcactaacgcccgtcccctcacccacccgcgcagaccgcagagagaagagagcgaggcagcctaggaggagcaaccgcgtgagtcgatgaaggcagcggtggccgcggtcgtcgtcggcggcggaggaggcgacgaatggaggtgccggaagcaccctgccgcgagatccggcggcggggtgtgcccccactgcctccgggaccgcctcctccggctctgccccaactgcgcgcacgtgcggccctgcgcctgcgccgcggcgtgcgcctcgccgtcctcctcctcctcggcctccggcgacgcggtcggccgcgtccacagcctcatcgagcgggagcaccggatcgcgcgctccaggtccgtggccacgggctcctccgccgcgctcgccgccccctcggcggcgaccgcgtccgggggcggcaggcggaaggcgcgggtctgggggtggccgccgttctggaagcccgcggcgcgggaggggggcgcggagccaggggaggaggaggacgacgacgaggggatggggctgccgcgctcgagctccgtgtccgccacagcggtggaggccaagagcgcggccgcggcggcgcgggcgcggtgggggtggcacttcccgagcccgctgaaggcgttccggcaccgcaggttgtcggcgagcgtggcggggcgggcgtgagcgaggtgcctcacctccagatgcccggaaagtggttagtgtgggggtcatgtggccgggatcattacctattaatcactagttaactatatcaaggcggtggattagaggaggagcgttcgtgctcctttttctgcttttgcgatcgcgtcgcgtgccgctaattccatgattaagttagacgaaacctggaaagcctgtgatctgggcgtaatgtgtgcatattcgctgctagtgggtgggtgaacccctcatggtctcttggcttttgtagcgtgcttgtactccactctgtagcaacaaattggatgttttgagctctccaatttgatcttatcttgtgttgctgtactacc

SEQ ID NO: 128802 - DNA, 1120 bp, Zea Mays
taatattgccttgctcatcaaacctgccgtacggcgcgagcccacggcgccgtctcatcataccgcacgtccgtttcgatgccctacgaaaaccatgggccacggagcgggacagcgggtacacttgcttgccatgagatctggaatcaaatccattccacgggatagctgcgagcctagcctacatggaacactaatcgtggtgcacgttctgccgcatccagagcatccaaaccgcatccaacgcccctgccgcatcccgcgtccctcccgcactcgtccctgccgcagcccccgcgatccccttcccacgcatggcgttcctgccgcagcccccgcgatccccttcccacgcacgcatggcgttcctgccgcagcccccgcaacccccgcgatcccgcctgccaagcatggcgtcgccgcggccgttgcccccgcgacccccttcctcaattccgcgcgtctatggccgtctctctcgccctcgctctcctctctgctgtctgcacccacgcgacatggaaggagatcgtcttcgctgcgccaaatcgagaaatccgcgtccgctatggaagggatcgacatcagtatccgcgtccgcagcgccaaattgaggaacccgcgccccaaatcgagaaatccgcctccgctatggaaggagatcgcctcggctgcgcctcgactctcgatcggcatcatcgcccgcgtccgctgtgcccctactttaattctgtctcctgtcctcctgccgtgcctgtttcctcacttgtgcgccaccaaccaggaggacgctcgccgttgtctccggcgcggtgcttgccggtggagctctggcgtacgcccgctcaagccagagccgccagcggaggaggcgagtcgcagcggcggagccggtgcattggccgccaatggggatggtttcagccagaacggtgccggcggtggattggctgcagcggaccagaggggagccctctacctatttatttattgtatatctataaaaatgaagaaagttacatatgtacaaaattataacagaggaagatacaagagtagtgtctctccaaagggtgaggggatctcttctactctgattcgcttcgacgcaccaagctaa

SEQ ID NO: 128803 - DNA, 168 bp, Zea Mays
cattaagtaacatggaacaaccagataatgagataaatgtaccattggttgaatcacccacgacatttgattatgagatctaatgacacaattcgatcatgcaacatttgtattcggattcacagtccagaccaaaacaacgctggacaagacgcgttacctcaatct

SEQ ID NO: 128804 - DNA, 471 bp, Zea Mays
tgataatgctgtaaataacacatggcaatcttgtgcagggagattgtaacttcatttgttgttgacttcagggctttcgtgaagatgctggttgccaagttctggagcaaagaggaccattgcaatccgagatggaccagatgtcaggaatcaaacaccctcttggcaacacaaagtaataaacggataatcagcggtgataataccagatgtcatgtctaatcttagttgtgatgacaatttctcgtcttttactttcctttttttctcttggaggagtttattgaaacaaccgctgttgttgtacacttctgatacgggtacataagttctcaaatagttgtagtcacgtcacattcgttgtaaagaagaggggaaaggagaaactggtaacgttgggagtgttgtgcaatgttgaaatgatcgtgttgaattaactgaagctgatcttttttggtttgtacaaaagca

SEQ ID NO: 128805 - DNA, 1398 bp, Zea Mays
tacggcggtctccactgtcctgtctcctcccctacctcttgttcccccctctcctctggcggtcggagccggttcctctgacgtactgcaggggcagtagggtcactgcgcgcgggccctgtcgcacgcgggggccacgcggcagtgaccacccccacgtcagaggatctcgttccctggcggtctggcctgtagttctagctcgttccccccgcaagctcgcgacctcgcctagcggccaaaccacgctagagttcgcagttggaagaggggaggaggaagaggacgagatggcgagggatgacgggttcccggtgtgggaagcggcgctgctcgctggcgtggctgccgtcttcgctgcggggctggctggcgtctacatctccatgcctcgctccgactacagcttcctcaagctcccccgcaacctccaggagctccaagtcctcactgtccatctggagggctacagcagtgactacaccatccaggtgctggtgggctactgtgccgtgtacatattcatgcagacgttcatgatcccagggaccattttcatgtccctgcttgccggggccctctttgggcagctcggtggtctagccctggtgatctttgctgccactgccggtgcttcttcctgttatttcctgtccaagctagtagggaaaccactggtcttctcgttgtggccagacaagctcacgttcttccaaaagcaggttgcaaaaagaagagagaagctgctgaattacatgcttttcctgagagtcactccaacactgcccaatactttcatcaatttttcttcacctatagtgggtgtgccataccatactttcttctttgcgacggccattggcctcgtcccagctgcctatgtgactgtcagggctggaattgctttgagcgacctgagatcgttgaatgatctgtatgatccgcagtcgatagcggtgctgttcctgatcgggcttgtttcggtggcgccaacgttgctgggcaagaacgagaagccaaccagcgcatcggacatggcagctaacaccaactgatcactagtacacgccactccagctctcttctcatgtacatacaaaagtccagcgtttggtagtggtggcttcgagactctggatcaaataggacatgtcgccggccacgaacatggcgagggtcccaatctgtagatctgtcgacacttctgggaaacttttgtgctgactgctgattttgcagaagtgatgtctcatgatcacctcatcgtgaatcttgctggcaaaacgggctgggaacatctctctttcggttgctttgttttacattgtttcgctgttgtatcttgcacacgtcaaccagattcaatcaatacagccgattcagtgattcattcatgaa

SEQ ID NO: 128806 - DNA, 106 bp, Zea Mays
gcaactttgtttttttgacgtatgttgtcttcaaaatgggtcagttgaagcaaccaatcaacagcccaatgcaatctggctagaaccaaacaagctttacattatc

SEQ ID NO: 128807 - DNA, 1754 bp, Zea Mays
gcccgtcaaagaaaaagcggcgaactcggccaggcggcgaggggccaatctattcgccggatactctaatgtccagcggagccacgtcatcgtcctcgccgccgctggcagaggctggggacggatactgggaggggcgggaggaggcggtggcgcggctgaaggcgatggccgcgagggctcattgggaggacgaactctcggcggagcggttggagaccaacaaccaggtgcaggaggacgagatgctggcactgcaagccatttatggggatgacatggttatcttggaggataaggctggttttcgttcttttcagatttttgtttggtatccaattcctaatggtactaaggtgttcttgaatcttcatccaaatggaactatggttggaactgataatgatgagagcaaagatggtggtgaactcatctatgcttgcagtttaaagcatttgccacctgtggtgttaacatgtttgctgccatgttcatatcccagtgcaagtgctccttattttactatctcagccaagtggttggatgaacccaaagtttcacacctctgtaccatgtttgatgagatttggactgagctgccaggacaagaagtagtgtatagatggctggactggctgaatagctcttcatgggcttgcatttctttgaatgacaacataatactaatcgcagataaaacttcagatgttggagatgcacgtgctattgcaagaaggcttctagttgatcatactattcctcttatgcaaagttacaatgagaggaggtctcatgaaatatttctgaaaagcttacataagtgccgaatttgtcttagtgaaaatactggcagaaatttcatcaagctcccatgccaccatttgttttgcttgacgtgtatgaagtctcactgcagaattcacgtaacagaagggagtttaaccaagctcacatgccctgatacaacttgctgcagcccacttccaccatcagttttgaaaagcctcctgggagatgattgctataagcgatgggaatcattcgcgttacagaagctcttagatacaatgcctgatctggtatattgtccgaggtgtaatgctgcctgcttggaggatgacaatgatgctcaatgcccagagtgttttttcaccttctgctctttgtgcaaagaacgcaggcatgtggggaaggattgcgttactccagaagaaaagattaggattctgagggaaaaacaccagaaatattccctcccagaaaaacaattgttgaaagaacagagggaaatagatgaattaataagtgtctgcgaagcgcttcgcgattcgaagcaatgtccttcttgcaaaatggctatctcaaagactgaaggatgcaacaagatgatctgtaggaactgcgggaaattcttctgttaccgttgtaaccaggcaattcgtggatatgaacatttttgggatggaaattgcgtgctatttgaacaccagaatcaagtgcaaatatatggacggcttgaggagtccgatgatgaagaacattttgatgatgaagatctagaggagacagagcctgaactggtatggggttgtccttgtccagtgtgtggtcggtggaatggaaagcttgacacaaacaatcatatattgtgcatgggttgccgaggccactattgcgcgttatgccggaggagggtaatgaagagctccgaacactatggaccaagaggttgccaacaacacacggatccgtag

SEQ ID NO: 128808 - DNA, 2400 bp, Zea Mays
actctaatgtccagcggagccacgtcatcgtcctcgccgccgctggcagaggctggggacggatactgggaggggcgggaggaggcggtggcgcggctgaaggcgatggccgcgagggctcattgggaggacgaactctcggcggagcggttggagaccaacaaccaggtgcaggaggacgagatgctggcactgcaagccatttatggggatgacatggttatcttggaggataaggctggttttcgttcttttcagatttttgtttggtatccaattcctaatggtactaaggtgttcttgaatcttcatccaaatggaactatggttggaactgataatgatgagagcaaagatggtggtgaactcatctatgcttgcagtttaaagcatttgccacctgtggtgttaacatgtttgctgccatgttcatatcccagtgcaagtgctccttattttactatctcagccaagtggttggatgaacccaaagtttcacacctctgtaccatgtttgatgagatttggactgagctgccaggacaagaagtagtgtatagatggctggactggctgaatagctcttcatgggcttgcatttctttgaatgacaacataatactaatcgcagataaaacttcagatgttggagatgcacgtgctattgcaagaaggcttctagttgatcatactattcctcttatgcaaagttacaatgagaggaggtctcatgaaatatttctgaaaagcttacataagtgccgaatttgtcttagtgaaaatactggtaattctcttataagttatctgattaggatgctgtgtttgatttttactgagttatttacctttttattcaagttgctatcactgctttttggtctattttgtacatgatgtattagaggcaataagctctgcaacgcaagaaatataattacttcatttccctagtatttttttcagaaataaaatttaggaaatcaaatgacaaaaaataattttatcataaaacagcagtttcaggatctgtagtacaactactcagatgggttctgtagtgacttagctgccttcccatttattctctacaaagtaggtaacatgcacaatataactccttttcacatttcagtaattttgatacctgaatcttgtagtagtttttgactccctttgcccctcttcattcttaactataccaggcagaaatttcatcaagctcccatgccaccatttgttttgcttgacgtgtatgaagtctcactgcagaattcacgtaacagaagggagtttaaccaagctcacatgccctgatacaacttgctgcagcccacttccaccatcagttttgaaaagcctcctgggagatgattgctataagcgatgggaatcattcgcgttacagaagctcttagatacaatgcctgatctggtatattgtccgaggtgtaatgctgcctgcttggaggatgacaatgatgctcaatgcccagagtgttttttcaccttctgctctttgtgcaaagaacgcaggcatgtggggaaggattgcgttactccagaagaaaagattaggattctgagggaaaaacaccagaaatattccctcccagaaaaacaattgttgaaagaacagagggaaatagatgaattaataagtgtctgcgaagcgcttcgcgattcgaagcaatgtccttcttgcaaaatggctatctcaaagactgaaggatgcaacaagatgatctgtaggaactgcgggaaattcttctgttaccgttgtaaccaggcaattcgtggatatgaacatttttgggatggaaattgcgtgctatttgaacaccagaatcaagtgcaaatatatggacggcttgaggagtccgatgatgaagaacattttgatgatgaagatctagaggagacagagcctgaactggtatggggttgtccttgtccagtgtgtggtcggtggaatggaaagcttgacacaaacaatcatatattgtgcatgggttgccgaggccactattgcgcgttatgccggaggagggtaatgaagagctccgaacactatggaccaagaggttgccaacaacacacggatccgtagtgattcccaatcttgtacagtacagaatctcctttatacatagcattttgccacttccagtgttggcatcgacttgttgagttgtttcccaaaacgagaggcttctcgtggtagggccaatgtgaatttgcaattggaagggtccattgcatttatctaggatcgttgatgtcaacaacagatggttggccatgtaatgaacagggcattttattgaaaatgaccgtgcagattgaagattcagttcgtttatgacgtagccataagcgactactacgtatttcagtctg

SEQ ID NO: 128809 - DNA, 1838 bp, Zea Mays
gcctaatcttgcaactcctctgacctctctaaccgccattcaggactcggggtaaacgcaaaccagcagctacactctcgtctccctctcctccgatccattgtgacatgcggctccccaccaaggcacaacaacttacaatgtcattggcaacggcgaagctacgggagcgcacgcagttcaggctgtccgtgctgccgccggcgtcgccaccaccgttcatgttccaggagcacccgttcggcggcctgccgtcgtgtccgcccggatcgcccgaccccgtcatcaacaacctcacggagctcgagagggtgggcgtcctcggccatggcgcggacggtacggtctacaaggcgcggcaccgccgcacgggcgcggagcttgtggtcaagtcgctgcgcgtgcgcggcgacggcggcgccgcgctccgggaagccgacgtgcacctccgcgtggccgccgcggcgcccgaccacccgcacgtcgtccgcctccacggggtcttctccgcgaacccggccgcctgcagcgaccagcagctcctgcgccttgtcctcgagtacgttcctggcggctcgctcagcgacgtgctccggcggcgcggccgcctcccggaggacgccatcgcgggcgtggcgcgcaacgtgctctgcggcctgcgccacctgcaccgcctcggcatcgttcacggcgacgtcaagccgtcgaacctcctcgtcggcctccacggcgaggtcaagatcgccgacttcggcgccagcctccacgtccccagcggcggcggcggcgcgcaccgagcggccggcgccgaggggacgtgcgcgtacatgagcccggagcggctggaccccgaaggtttcggcgcggcctcgccgtcgggcgctgccgacctctccagcgacgtgtggtcccttggagtggtcctcctagaatgccacatgggtaggttcccgctggtggcggctggggagaggccggagtgggcggctctggtggtggccgtgtgcttcgggagcgcgcccgaggtgcctgtgacggcgtcgtcggagttcagggacttcgtgcggcggtgcctggagaaagactggaggaggagagccacggtggacgaacttctaggccaccccttcgtcgcgggagggccgccatgttgcgccaccaccaccaccaccaacgagtggctaaccaacttccatgacgaactgatgacagtcgaacgcaaagaacactcctgatacagaactcaacgaacgtggcaacgacgagaataaagacctaatggtgatcaacggtcgatgcaaatccaactgaacatgaggccagccaagcgaacttgatcaggtttgggagcataattcagaggtgtctgaatcccgcggcagagctggtgatcagctgcagttgctttgtgaggccgcaaaacgactggcttcatgagccgcccgtggtcgcactcgcaggtaaacaaaacatgcagtggtttgcaaacagatttgggtgaatcatcagtcctaggctgcgactgcgacctgctcaaagttgagctccaagcgtccaatggtacaacttaccgtgttcatgtattttttttcttcaattcgaacgcgtacaaaaagtagaattgaacgcatataaaattttcagttcgcacgctcaccagccgccgccgatcggctatgggcgagttctctaaaacttatcggattttgccctgttatttcagctggggaatcggaattcctccattccttgtgtgtgtgtttttgttgaatcacggtttaggctttgctttgctacaggatccataaataactatagaccgtccatctagatgtcaa

SEQ ID NO: 128810 - DNA, 664 bp, Zea Mays
agaagcccagtggcctcccctctcatcctttcgctttggaccccggtccccggcggcttcgaaacccgctcgtggcagtgggcgaggcgagcacggcggcggaatgatggcgaagggcggtgctggcagcgggatgatctgggcgacggcggaggatcttgcgcggcgccggccggtggttctgtccctgtatcggcaggtccttcgggcgctaaactcgccggcgctgccgctggggcacgcggcgcggctggcaaagaaggcggaatgccgagccatcttcgtcttcggtgccgaggagaggtcgctccacaacatccgggacctcgtcgaggctgcgcgccacacgcttggcctcctcaaccgcggccgcctcccgtagtgagaagacagaggtacgcagagtctcccgagcctagctgctaccgaatcttcattggtgtctctgtttcatacctcagcttccttgctatgcccgattgtaatatttaggcctgctgcatgttgacaatgactgaattggtgtcgtctgttctagtactctgtgtctgaattgtttctctatgcatacggcagaaccgatatgctattattatattgtaactgttaggaaataaactaatccgtacaatttcccattgtttctccatgtaaactactgaaa

SEQ ID NO: 128811 - DNA, 1545 bp, Zea Mays
aagcaagccgagatcgttgggccgcccagggcaagagaagcgtcggggttttggctcctgttcaaaatccgcagctcgccgttggacaagtgaggaaaggagagagaaagagaaagagagagagagagacggtcagccatggcggcgaaggcaagggtctcgctgacggctgtgctcgccgccgcggcgtgggcgtgcttatctgtcgtggccgcctccgcattcgacgtcccgaccgtggccttcgaggaggggttctcgccgctgttcggcgacggcaacctcgtccgctcctccgacgacaggagcgtccgcctcctgctcgaccgccggtccggttccgggttcatttcttcggactactacctccatggcttcttcagcgcgtccatcaagctgcccaaggactacacggccggcgtcgtcgtcgccttctacctgtctaacggggacgtgtacgagaagacgcacgacgagctggatttcgagttcctgggaagccggtggggcgggcagtggcgcgtgcagaccaacgtctacggcaatggcagcactagccgcggccgggaggagcgctacctcctccccttcgaccccaccgtcgaggcccacagctactccatcctctgggctcccacccacatcatgtacgcatcacagagtcaccaggagtaaactagaaagcagcgctacgcactctctacgtactagctagtctctacattgatcagtgattacttactgcatgcgtgttcaatgaatctgtgcagcttctacgtcgacgacacgccgatccgggaggtgatccggcacccggacatgggcggcgacttcccggcgaagccgatggcggtgtacgccaccatctgggacggctccgcgtgggccacggacgggggcaagtacaaggtcaactacaagtacgcgccgttcgcgtccgacttctcggagctggccgtcgtcggctcccgcgccgacccggtgctccgcgtcccgcgccgggacggcgccgcccaccaggacctcctcgcgctcatgacggccgactacgccgtcgtgacgccgcggaagcgcgcggccatgcgcgcgttcagggcgcggcagatgacgtacacggtgtgctacgacgccgtgcggtacgcggacgggccgttccccgagtgcgacaactcggacgaggagagggagtccttctcggcctggggcgagtccaagaccgtcgtcatgaggccacgcgcccggggccgccgccggggacgcaaggccggcaggggacgggctggcgtgtcaagcagctgacatccttcaaaataatataaatgccagggtctgtcgcgaaagctattggcacaatggttagggatgatggtcgattggtccggtaacgtagtaggtcgattcgttttttatttttatattttttggcgacccatatgcaggctgtaaagctaggtgtagggacggagtactagcagggattaatgcgttatgattctttgattccttgggtggcagctaataaaatgctcattataagtattgtgc

SEQ ID NO: 128812 - DNA, 1332 bp, Zea Mays
aagcaagccgagatcgttgggccgcccagggcaagagaagcgtcggggttttggctcctgttcaaaatccgcagctcgccgttggacaagtgaggaaaggagagagaaagagaaagagagagagagagacggtcagccatggcggcgaaggcaagggtctcgctgacggctgtgctcgccgccgcggcgtgggcgtgcttatctgtcgtggccgcctccgcattcgacgtcccgaccgtggccttcgaggaggggttctcgccgctgttcggcgacggcaacctcgtccgctcctccgacgacaggagcgtccgcctcctgctcgaccgccggtccggttccgggttcatttcttcggactactacctccatggcttcttcagcgcgtccatcaagctgcccaaggactacacggccggcgtcgtcgtcgccttctacctgtctaacggggacgtgtacgagaagacgcacgacgagctggatttcgagttcctgggaagccggtggggcgggcagtggcgcgtgcagaccaacgtctacggcaatggcagcactagccgcggccgggaggagcgctacctcctccccttcgaccccaccgtcgaggcccacagctactccatcctctgggctcccacccacatcatcttctacgtcgacgacacgccgatccgggaggtgatccggcacccggacatgggcggcgacttcccggcgaagccgatggcggtgtacgccaccatctgggacggctccgcgtgggccacggacgggggcaagtacaaggtcaactacaagtacgcgccgttcgcgtccgacttctcggagctggccgtcgtcggctcccgcgccgacccggtgctccgcgtcccgcgccgggacggcgccgcccaccaggacctcctcgcgctcatgacggccgactacgccgtcgtgacgccgcggaagcgcgcggccatgcgcgcgttcagggcgcggcagatgacgtacacggtgtgctacgacgccgtgcggtacggggacgggctggcgtgtcaagcagctgacatccttcaaaataatataaatgccagggtctgtcgcgaaagctattggcacaatggttagggatgatggtcgattggtccggtaacgtagtaggtcgattcgttttttatttttatattttttggcgacccatatgcaggctgtaaagctaggtgtagggacggagtactagcagggattaatgcgttatgattctttgattccttgggtggcagctaataaaatgctcattataagtattgtgcaattattgctaatagtattatatgatccaatcattaacat

SEQ ID NO: 128813 - DNA, 1332 bp, Zea Mays
aagcaagccgagatcgttgggccgcccagggcaagagaagcgtcggggttttggctcctgttcaaaatccgcagctcgccgttggacaagtgaggaaaggagagagaaagagaaagagagagagagagacggtcagccatggcggcgaaggcaagggtctcgctgacggctgtgctcgccgccgcggcgtgggcgtgcttatctgtcgtggccgcctccgcattcgacgtcccgaccgtggccttcgaggaggggttctcgccgctgttcggcgacggcaacctcgtccgctcctccgacgacaggagcgtccgcctcctgctcgaccgccggtccggttccgggttcatttcttcggactactacctccatggcttcttcagcgcgtccatcaagctgcccaaggactacacggccggcgtcgtcgtcgccttctacctgtctaacggggacgtgtacgagaagacgcacgacgagctggatttcgagttcctgggaagccggtggggcgggcagtggcgcgtgcagaccaacgtctacggcaatggcagcactagccgcggccgggaggagcgctacctcctccccttcgaccccaccgtcgaggcccacagctactccatcctctgggctcccacccacatcatcttctacgtcgacgacacgccgatccgggaggtgatccggcacccggacatgggcggcgacttcccggcgaagccgatggcggtgtacgccaccatctgggacggctccgcgtgggccacggacgggggcaagtacaaggtcaactacaagtacgcgccgttcgcgtccgacttctcggagctggccgtcgtcggctcccgcgccgacccggtgctccgcgtcccgcgccgggacggcgccgcccaccaggacctcctcgcgctcatgacggccgactacgccgtcgtgacgccgcggaagcgcgcggccatgcgcgcgttcagggcgcggcagatgacgtacacggtgtgctacgacgccgtgcggtacgcggacgggctggcgtgtcaagcagctgacatccttcaaaataatataaatgccagggtctgtcgcgaaagctattggcacaatggttagggatgatggtcgattggtccggtaacgtagtaggtcgattcgttttttatttttatattttttggcgacccatatgcaggctgtaaagctaggtgtagggacggagtactagcagggattaatgcgttatgattctttgattccttgggtggcagctaataaaatgctcattataagtattgtgcaattattgctaatagtattatatgatccaatcattaacat

SEQ ID NO: 128814 - DNA, 1462 bp, Zea Mays
aagcaagccgagatcgttgggccgcccagggcaagagaagcgtcggggttttggctcctgttcaaaatccgcagctcgccgttggacaagtgaggaaaggagagagaaagagaaagagagagagagagacggtcagccatggcggcgaaggcaagggtctcgctgacggctgtgctcgccgccgcggcgtgggcgtgcttatctgtcgtggccgcctccgcattcgacgtcccgaccgtggccttcgaggaggggttctcgccgctgttcggcgacggcaacctcgtccgctcctccgacgacaggagcgtccgcctcctgctcgaccgccggtccggttccgggttcatttcttcggactactacctccatggcttcttcagcgcgtccatcaagctgcccaaggactacacggccggcgtcgtcgtcgccttctacctgtctaacggggacgtgtacgagaagacgcacgacgagctggatttcgagttcctgggaagccggtggggcgggcagtggcgcgtgcagaccaacgtctacggcaatggcagcactagccgcggccgggaggagcgctacctcctccccttcgaccccaccgtcgaggcccacagctactccatcctctgggctcccacccacatcatcttctacgtcgacgacacgccgatccgggaggtgatccggcacccggacatgggcggcgacttcccggcgaagccgatggcggtgtacgccaccatctgggacggctccgcgtgggccacggacgggggcaagtacaaggtcaactacaagtacgcgccgttcgcgtccgacttctcggagctggccgtcgtcggctcccgcgccgacccggtgctccgcgtcccgcgccgggacggcgccgcccaccaggacctcctcgcgctcatgacggccgactacgccgtcgtgacgccgcggaagcgcgcggccatgcgcgcgttcagggcgcggcagatgacgtacacggtgtgctacgacgccgtgcggtacgcggacgggccgttccccgagtgcgacaactcggacgaggagagggagtccttctcggcctggggcgagtccaagaccgtcgtcatgaggccacgcgcccggggccgccgccggggacgcaaggccggcaggggacgggctggcgtgtcaagcagctgacatccttcaaaataatataaatgccagggtctgtcgcgaaagctattggcacaatggttagggatgatggtcgattggtccggtaacgtagtaggtcgattcgttttttatttttatattttttggcgacccatatgcaggctgtaaagctaggtgtagggacggagtactagcagggattaatgcgttatgattctttgattccttgggtggcagctaataaaatgctcattataagtattgtgcaattattgctaatagtattatatgatccaatcattaacat

SEQ ID NO: 128815 - DNA, 1119 bp, Zea Mays
cttcagagattccaactaacacatgatgaagttttgaattgccgtgacttttccttacgactctactcaatagagttccccttttcatgctgcagctgtctaacggggacgtgtacgagaagacgcacgacgagctggatttcgagttcctgggaagccggtggggcgggcagtggcgcgtgcagaccaacgtctacggcaatggcagcactagccgcggccgggaggagcgctacctcctccccttcgaccccaccgtcgaggcccacagctactccatcctctgggctcccacccacatcatcttctacgtcgacgacacgccgatccgggaggtgatccggcacccggacatgggcggcgacttcccggcgaagccgatggcggtgtacgccaccatctgggacggctccgcgtgggccacggacgggggcaagtacaaggtcaactacaagtacgcgccgttcgcgtccgacttctcggagctggccgtcgtcggctcccgcgccgacccggtgctccgcgtcccgcgccgggacggcgccgcccaccaggacctcctcgcgctcatgacggccgactacgccgtcgtgacgccgcggaagcgcgcggccatgcgcgcgttcagggcgcggcagatgacgtacacggtgtgctacgacgccgtgcggtacgcggacgggccgttccccgagtgcgacaactcggacgaggagagggagtccttctcggcctggggcgagtccaagaccgtcgtcatgaggccacgcgcccggggccgccgccggggacgcaaggccggcaggggacgggctggcgtgtcaagcagctgacatccttcaaaataatataaatgccagggtctgtcgcgaaagctattggcacaatggttagggatgatggtcgattggtccggtaacgtagtaggtcgattcgttttttatttttatattttttggcgacccatatgcaggctgtaaagctaggtgtagggacggagtactagcagggattaatgcgttatgattctttgattccttgggtggcagctaataaaatgctcattataagtattgtgcaattattgctaatagtattatatgatccaatcattaacat

SEQ ID NO: 128816 - DNA, 2918 bp, Zea Mays
agcgaggcccgaacgccatccgcgtccggcagtacagatcaaggagaccggttctcttgagctggggactgcaaaggatacgtggcttcagtcattgtgctctggatttttagatcaagggaccaatgcctccaggataatggcggggaaggacggagtttctctgaaatctgtgtcatacggggcaaggctgcgcaggagttgtgatgcatcactgagagaggcagggtccatgagagacccattcttgaaacacagagtaaagaaatttgatctatctagcctagattggattgatgagattccagattgccctgtattttctccatcaacccaggagtttgaggatcctctggtttatctcagcaaaattgcccctgtggctgcaaaatatggtatatgcaagatcatttcacctgtctctgcttcagtacctgcgggcactgtactaatgaaggaactaggtgggattaagtttacgaccagagttcagcctctccgtcttgctgaatggaccaaggatgacaagtttgccttctttatgagtggaagaaagtacacatttcgggagttcgagaagatggcaaataaagaatttgtacggagatactctagtgctgcttgtcttccatcaaggtatatggaagaggagttttggcatgaaatagcttttggcaagatggagtctgttgagtatgcatgtgatatcgatggtagcgcattttcttcttcttctcatgaccaacttgggagaagcaaatggaacttgaagagattctcacggttgccgaactctacgctgcgtcttctcagagctgcagttccaggaataacagatccaatgctgtatattgggatgctctttagtatgtttgcctggcatgtggaagatcattacctgtacagtattaactatcaccactgtggagcccccaaaacatggtatggtattccaggaagtgctgcttctgattttgagaaagtggtacgtgagcatgtatatgatcacgaaattttatcaggtgaaggggaaagtgcagcatttgatgttctgttgggaaagactacaatcttcccacctaatattttactggatcatcatgttccagtctatagagccatacagaaacctggagagtttgttgtaacgtttccccgagcttatcattctggtttcagccatggtttcaattgtggtgaggcagtaaattttgctacgggcgaatggtttcctctaggagcagttgccagtcaacattatgcacttcttaagaggataccagtattaccttatgaggagcttctttgtaaagaagcaacattttgtgctaatgagttttccttgtttgaacacggaaatgtaacattaactggaggcacacatatacagagctatatgaagggtccctttgtgcagttgatgcggttccaacaccgtgttcgttggttgcttgtgaaaatgggtgcccgtacatgctataaagcagacattgatgccacagttctctgtgggatatgcaaacgtgactgctatgtagctcacattatgtgtaactgcagagcagatgcaatttgcctttgtcatgaggaagagattagtaagtgttcttgcaactgcgaccgtgttgtttttgtgaggaaagacatctttgaattggaggaaatatcaaagaagtttgaggaaattggaatactggatgaagtaggaaaacaaatgtctcaaaatgatggctataacatgcatccttacttgtccaatggcattgaccacaatgctaaatactttccatactgcaagatcctaattgatacatcccctgaacttcgtaccttttcagaggtagatgttcttggatatgatctgaataagccatatcctacattatcaacaataacttctgcacatggaccccatgagtattctacacaaagtgatttctaagcaaagaacatactctagctcatgtccagagaatggaacgcttagtgtttatcctttatgtacatctgatcaagcattctcaactgacaaattggctgctcaggatactgatgattctgactgtgaggtatttagagttaagagacgatctagcatagttatggagaaaagatgttcagaagatctaacaataactttaactgagaatcagcgtagttcgagaaaaaaaggaaagcatggtttgagggagcatgctttaagacggttaaagaaagcctgttcagatgacagacaagagaacgcaactgaatcacattgccttgacttcatttctggaaatacagataatttcatcaatcgaagcaaacaaaaaatgaatgtagatcagctagatgcaaaaaatgtggaagatgaagttgctttcggccagaaatctatcggttgcagttacctgtctccatctgtagatcttgggccgaaacgcttgaaaattcgtggcccatccttcccaagcactgtttctgaagtggaaatatcttataggttccaggaggacattgacttggctagtcagcatactcaatgaagtatgctgctcttggtgctaactgctaacatcaatcgtaacttctggaagatgaaagctcttttttcattggatggttcagaactgattctatctacaggtctccaatggaggcactgttatggctggattttatgattctattgccaggtcataggcgatttttctgatgatccgtagctgcacatcacttatttcctttctttgtaggttttccactgtgaataggttagtctactacttttaacaatttggttcattctttttccaccacagatacacctgtacctagaatgctttaatagatcctcatacgaaatggacattgtacattttttttaacaagtcagtcttttgctcattataatctggaaccatttgcaattctta

SEQ ID NO: 128817 - DNA, 2212 bp, Zea Mays
gatcaagggaccaatgcctccaggataatggcggggaaggacggagtttctctgaaatctgtgtcatacggggcaaggctgcgcaggagttgtgatgcatcactgagagaggcagggtccatgagagacccattcttgaaacacagagtaaagaaatttgatctatctagcctagattggattgatgagattccagattgccctgtattttctccatcaacccaggagtttgaggatcctctggtttatctcagcaaaattgcccctgtggctgcaaaatatggtatatgcaagatcatttcacctgtctctgcttcagtacctgcgggcactgtactaatgaaggaactaggtgggattaagtttacgaccagagttcagcctctccgtcttgctgaatggaccaaggatgacaagtttgccttctttatgagtggaagaaagtacacatttcgggagttcgagaagatggcaaataaagaatttgtacggagatactctagtgctgcttgtcttccatcaaggtatatggaagaggagttttggcatgaaatagcttttggcaagatggagtctgttgagtatgcatgtgatatcgatggtagcgcattttcttcttcttctcatgaccaacttgggagaagcaaatggaacttgaagagattctcacggttgccgaactctacgctgcgtcttctcagagctgcagttccaggaataacagatccaatgctgtatattgggatgctctttagtatgtttgcctggcatgtggaagatcattacctgtacagtattaactatcaccactgtggagcccccaaaacatggtatggtattccaggaagtgctgcttctgattttgagaaagtggtacgtgagcatgtatatgatcacgaaattttatcaggtgaaggggaaagtgcagcatttgatgttctgttgggaaagactacaatcttcccacctaatattttactggatcatcatgttccagtctatagagccatacagaaacctggagagtttgttgtaacgtttccccgagcttatcattctggtttcagccatggtttcaattgtggtgaggcagtaaattttgctacgggcgaatggtttcctctaggagcagttgccagtcaacattatgcacttcttaagaggataccagtattaccttatgaggagcttctttgtaaagaagcaacattttgtgctaatgagttttccttgtttgaacacggaaatgtaacattaactggaggcacacatatacagagctatatgaagggtccctttgtgcagttgatgcggttccaacaccgtgttcgttggttgcttgtgaaaatgggtgcccgtacatgctataaagcagacattgatgccacagttctctgtgggatatgcaaacgtgactgctatgtagctcacattatgtgtaactgcagagcagatgcaatttgcctttgtcatgaggaagagattagtaagtgttcttgcaactgcgaccgtgttgtttttgtgaggaaagacatctttgaattggaggaaatatcaaagaagtttgaggaaattggaatactggatgaagtaggaaaacaaatgtctcaaaatgatggctataacatgcatccttacttgtccaatggcattgaccacaatgctaaatactttccatactgcaagatcctaattgatacatcccctgaacttcgtaccttttcagaggtagatgttcttggatatgatctgaataagccatatcctacattatcaacaataacttctgcacatggaccccatgagtattctacacaaagtgatgagtgtactagttctaagcaaagaacatactctagctcatgtccagagaatggaacgcttagtgtttatcctttatgtacatctgatcaagcattctcaactgacaaattggctgctcaggatactgatgattctgactgtgaggtatttagagttaagagacgatctagcatagttatggagaaaagatgttcagaagatctaacaataactttaactgagaatcaggtactgttacttttgtgattttgattagtttaactgctccatttaagagtggatgtcacggcagtatatttgtagccaagaatttttaaacttcgacaaataatgactagattggtcatgtgatgttaaatgtcgtgctaagggaggctctagccggacc

SEQ ID NO: 128818 - DNA, 1528 bp, Zea Mays
catgggcctactgatgggcacaaacacgggctggccttctggttgcggatgggcgtctgcagctgtgctgttcctttttcctctggtgagacttcgcgattcgtgaatgcgcctttccgttccaagagaaggaagagaagccgcagcctccgcgagggcgagacagctcggcggcgtggttcggggatgggcaagggcgccgaactgtgggacgactccgcgctggtggacgccttcgaccgcgccatgttcagcatgaaagaaatgcattgcaagagcaagcgagcaacgccaagcgaggatgggaagaccgaacttgctgctgctactgcagaagaggagccaattactgctggagcagcggatgtgtgcggagaggaagatgccaactgtgacagcacacactgtgatctgtcagagttacaacaacagccctatgaagacagacagacaattgagcatgctcctcttcaagaaactgatccaggcaaagagacacatgtttcagaggctaagacgctctccaccgatgcttctactaatgctggtggaaattggagctcaagccagcaaactgggcagtacaatgaattgctgagacaatactatgaacttgaggagaagagtcggaacattcttgagcaactccaacaaacaaactattcaaattatcaagcatcaggatatgcttctacggcccaacagcagcaagttcctgtctatagtgccacagtaccagatccttactcttccaccactcaatcctcatgctgcaattggaacgttcccctggtatctgtctcctgctgttcagcaggccaaccaagtggaggctctgcttgtacgccacctactgctggctgcagcgtatcattgacttgtgatcaatgcccaggtgcaactactgcataccctagtgtttcaaacttcatgcaggtcccaacgatggtatctaccaatgatgatcaagttgataaggctgcaatgatgactgctgaagctgcctttaattttatgagaagtacgatatctggacagcctagcacacaaggaagcaaatctgatactggaaaggaggaaagcacaaatatgggcatgaacccaaatcttgacagtgatcttgctgctctcttaaattcatggtatgctgctgggttctacacttgcaggtacctcatgctgcaatctacaaagaattccagaccgtagtgtagtaggccatggccgtcttgagatagatgtccgagaagaagcaggttgaagcatcgctgggtgccttcatgtatgtgaatctgctggagttgtgtctgtgctgtgccttgcttgtcactgctatttctagctagactttcggtacgctcgtatgtgaatctgttgatgtcaggcagaaaattgggtaaaattgttgcattaaccgatctggtattcgttgtatatatagcgctgacatcagtaacctatttttccaggctggtttcggcaggataacatttgtgctaacacgagtagattcgcttattcccgttcc

SEQ ID NO: 128819 - DNA, 1105 bp, Zea Mays
aactgcaaggcaccgcaggagagaagaagatcaccagcaacaccaagcaactactcgtacgcggaaagagaaacccagaagccggtcttgttggattattccgttcgtcagttccgtccggagcggcggaggctctgttggtggtgcaaaaatgagtgacaacctgatggacaaggttagcgcctttggtgagcgcttgaagatcaccgggacagaagtcagcaaaaagatgactgccggaatgagctccatgagtttcaagatgaaggagttgttccaggggcagactccagctgacaagattgttgagggtgccacctcagaggatctggacgggcctgactggaactcaaacttggagatttgcgacatgatcaacacagagaaggttgacagtgtggaactcatccgtgggatcaagaagaggatcatgctgaaggatgcgagggtccagtacctctccttggtcctgcttgagaccattgtcaagaactgtgacaaggccttctcggaagttgcggccgagcgggttcttgatgagatggtcaggttgattgatgatcctcaaaccgtggttaataacaggaacaaggcccttatgctcattgaagcatggggggagtctggtgatgaactccgttatctgccagtctatgaggaaacatacaagagcttgaaatcaagaggagtgcggtttcctggacgtgacaatgagagcttggctcctatatttactcccgcgcgatcagttgctgaagctgatgttgatgcaagcttgccccagcaggtgttcgaggacgtccatgttcatacatatactgctgaagaaacaaaagaagcatttgatgtagctcgtaacagcgtagaacttctttcaactgttctttcctcttctcctgagcaggatgctttgcaggtgctgtgtcatttaatttaactttccatttgctctgtcaagttccttaccatcatgaggtgattagctatttgcacacatgagattttttatggatcttttgcactaaaagatatttcttattgtgtcatgttgctgattaaaaaaatactcagggcagccgcgtttatggtgattaagtgatacagt

SEQ ID NO: 128820 - DNA, 1620 bp, Zea Mays
aactgcaaggcaccgcaggagagaagaagatcaccagcaacaccaagcaactactcgtacgcggaaagagaaacccagaagccggtcttgttggattattccgttcgtcagttccgtccggagcggcggagcaaaaatgagtgacaacctgatggacaaggttagcgcctttggtgagcgcttgaagatcaccgggacagaagtcagcaaaaagatgactgccggaatgagctccatgagtttcaagatgaaggagttgttccaggggcagactccagctgacaagattgttgagggtgccacctcagaggatctggacgggcctgactggaactcaaacttggagatttgcgacatgatcaacacagagaaggttgacagtgtggaactcatccgtgggatcaagaagaggatcatgctgaaggatgcgagggtccagtacctctccttggtcctgcttgagaccattgtcaagaactgtgacaaggccttctcggaagttgcggccgagcgggttcttgatgagatggtcaggttgattgatgatcctcaaaccgtggttaataacaggaacaaggcccttatgctcattgaagcatggggggagtctggtgatgaactccgttatctgccagtctatgaggaaacatacaagagcttgaaatcaagaggagtgcggtttcctggacgtgacaatgagagcttggctcctatatttactcccgcgcgatcagttgctgaagctgatgttgatgcaagcttgccccagcaggtgttcgaggacgtccatgttcatacatatactgctgaagaaacaaaagaagcatttgatgtagctcgtaacagcgtagaacttctttcaactgttctttcctcttctcctgagcaggatgctttgcaggatgacttgacaaccactcttgtgcaacaatgctaccaatctcagcacactatccagatgattattgagaccgttggagacaatgaagctgtgctctttgaggccttgagcgtgaacgatgagatccagaaagtattatcgaagtacgaggagatgaagcagcccagggcctccgagcatgcagaacatgtaccagttgtcataccgattgctgcggagcatgaagatttgaatgctgttggcaatgaagacgcccttgtcagaaaaccagctgccgcgagagcaacgtcaggtggagatgatgacatccttgatgatctcgacgagatgatatttggcaagaagggaggtagcagctcccaggaaggtccgaaaaagccagatccgaagaaggatgacctgatcagcttttaattacctttccataatcgcagccagtacttgctattgtctggtgctgtacccactcggtagattgaagatttttattcgcatacgattcataccggtttgttcagttaagtcgctacactttgtcaatcttgtttcatggctgggtcccatgaccatgaatgtattgtattggatggtggattatgcgagacggcgggaaagtgtccaatgtgggtgaatctttattcttcgctacagtagccattttttttaaactcatatcttatgcttcggctaatcaagtagatctcttataatgccgcata

SEQ ID NO: 128821 - DNA, 1635 bp, Zea Mays
aactgcaaggcaccgcaggagagaagaagatcaccagcaacaccaagcaactactcgtacgcggaaagagaaacccagaagccggtcttgttggattattccgttcgtcagttccgtccggagcggcggaggctctgttggtggtgcaaaaatgagtgacaacctgatggacaaggttagcgcctttggtgagcgcttgaagatcaccgggacagaagtcagcaaaaagatgactgccggaatgagctccatgagtttcaagatgaaggagttgttccaggggcagactccagctgacaagattgttgagggtgccacctcagaggatctggacgggcctgactggaactcaaacttggagatttgcgacatgatcaacacagagaaggttgacagtgtggaactcatccgtgggatcaagaagaggatcatgctgaaggatgcgagggtccagtacctctccttggtcctgcttgagaccattgtcaagaactgtgacaaggccttctcggaagttgcggccgagcgggttcttgatgagatggtcaggttgattgatgatcctcaaaccgtggttaataacaggaacaaggcccttatgctcattgaagcatggggggagtctggtgatgaactccgttatctgccagtctatgaggaaacatacaagagcttgaaatcaagaggagtgcggtttcctggacgtgacaatgagagcttggctcctatatttactcccgcgcgatcagttgctgaagctgatgttgatgcaagcttgccccagcaggtgttcgaggacgtccatgttcatacatatactgctgaagaaacaaaagaagcatttgatgtagctcgtaacagcgtagaacttctttcaactgttctttcctcttctcctgagcaggatgctttgcaggatgacttgacaaccactcttgtgcaacaatgctaccaatctcagcacactatccagatgattattgagaccgttggagacaatgaagctgtgctctttgaggccttgagcgtgaacgatgagatccagaaagtattatcgaagtacgaggagatgaagcagcccagggcctccgagcatgcagaacatgtaccagttgtcataccgattgctgcggagcatgaagatttgaatgctgttggcaatgaagacgcccttgtcagaaaaccagctgccgcgagagcaacgtcaggtggagatgatgacatccttgatgatctcgacgagatgatatttggcaagaagggaggtagcagctcccaggaaggtccgaaaaagccagatccgaagaaggatgacctgatcagcttttaattacctttccataatcgcagccagtacttgctattgtctggtgctgtacccactcggtagattgaagatttttattcgcatacgattcataccggtttgttcagttaagtcgctacactttgtcaatcttgtttcatggctgggtcccatgaccatgaatgtattgtattggatggtggattatgcgagacggcgggaaagtgtccaatgtgggtgaatctttattcttcgctacagtagccattttttttaaactcatatcttatgcttcggctaatcaagtagatctcttataatgccgcata

SEQ ID NO: 128822 - DNA, 1846 bp, Zea Mays
aactgcaaggcaccgcaggagagaagaagatcaccagcaacaccaagcaactactcgtacgcggaaagagaaacccagaagccggtcttgttggattattccgttcgtcagttccgtccggagcggcggaggtacgtctacgcccctcaaccccggctcctaatctgcatctcctgcttccccaaaaattccatgtcctgatcttctctgccgctgcccccaatttccctctcatctcttgctgtctcttccgccgccgccgcacgtcttccttcccatcgctctctactggtgctggactgccgtggggtggagatcggcttggaccaactcatattttaggctctgttggtggtgcaaaaatgagtgacaacctgatggacaaggttagcgcctttggtgagcgcttgaagatcaccgggacagaagtcagcaaaaagatgactgccggaatgagctccatgagtttcaagatgaaggagttgttccaggggcagactccagctgacaagattgttgagggtgccacctcagaggatctggacgggcctgactggaactcaaacttggagatttgcgacatgatcaacacagagaaggttgacagtgtggaactcatccgtgggatcaagaagaggatcatgctgaaggatgcgagggtccagtacctctccttggtcctgcttgagaccattgtcaagaactgtgacaaggccttctcggaagttgcggccgagcgggttcttgatgagatggtcaggttgattgatgatcctcaaaccgtggttaataacaggaacaaggcccttatgctcattgaagcatggggggagtctggtgatgaactccgttatctgccagtctatgaggaaacatacaagagcttgaaatcaagaggagtgcggtttcctggacgtgacaatgagagcttggctcctatatttactcccgcgcgatcagttgctgaagctgatgttgatgcaagcttgccccagcaggtgttcgaggacgtccatgttcatacatatactgctgaagaaacaaaagaagcatttgatgtagctcgtaacagcgtagaacttctttcaactgttctttcctcttctcctgagcaggatgctttgcaggatgacttgacaaccactcttgtgcaacaatgctaccaatctcagcacactatccagatgattattgagaccgttggagacaatgaagctgtgctctttgaggccttgagcgtgaacgatgagatccagaaagtattatcgaagtacgaggagatgaagcagcccagggcctccgagcatgcagaacatgtaccagttgtcataccgattgctgcggagcatgaagatttgaatgctgttggcaatgaagacgcccttgtcagaaaaccagctgccgcgagagcaacgtcaggtggagatgatgacatccttgatgatctcgacgagatgatatttggcaagaagggaggtagcagctcccaggaaggtccgaaaaagccagatccgaagaaggatgacctgatcagcttttaattacctttccataatcgcagccagtacttgctattgtctggtgctgtacccactcggtagattgaagatttttattcgcatacgattcataccggtttgttcagttaagtcgctacactttgtcaatcttgtttcatggctgggtcccatgaccatgaatgtattgtattggatggtggattatgcgagacggcgggaaagtgtccaatgtgggtgaatctttattcttcgctacagtagccattttttttaaactcatatcttatgcttcggctaatcaagtagatctcttataatgccgcata

SEQ ID NO: 128823 - DNA, 2492 bp, Zea Mays
acaaacactcgcatctcctaccgcggttttgatcgagaggacggccagccagccagccttaaaccctacccgcccaaacccacacgactcacgaccatggccgccgccgccgccgctaaggcagcggccgcggccgtctccgcgggggccgcctttgtgctctcctccgagcgggcccacgccgacgggggcggctccaccttccgcttccccggcttctactcctccgccccctccccggccccggccccggcccctgcccccgccgcgccgccgcctcaggagtccaatgccccggaggaggcgccgaaggtttcgactcagcaccctcgcactagtgcggcgggcttcgatcccgcgccgctggagcgtggggtggaggcgattaacaagctcaagcaggcgtcggaccccaaaaagctgttcgagtttatgaagaagcaggaggagactcaccagcaggaaatagctgcgaagaaactcgagttgcagaaggcactggccgagatcgagcttgagcaaaaacgggtggattttgaagaaaggaaaaaacttgatcaacaacgagctaaaattaagtcgcagatggctcaatacgaggatgagctaaaaaggaagcgactgcaggctgaacatgaggcgcagaggttaaggaaccaggagcttgtgaagatgcaagaggaatctgggattaggctagagcagatcaggcgggcgactgaggagcaaatccaggaacaacggagacagacagagagacatagggctgatctagagcaggcgaccatttcaaagaaagccatggcagaggcggaggggagaatactagtaacaaggcaaactgaagatgtgaagagacgattgattttggaggagataaatgctgacagagagaagtggatccaagtgataaatacaacatttgagcatataggaggtggtttgcgaacgatattaaccgaccaaaataagctagtggtagcagttggaggggtaacagcacttgctgcagggatatacacaacaagggagggtgcaagagtagtctggggctatgttgatcgtatcctgggtcagccatcactgataagggagtcatcacgtgggaaatatccctggtctggtttcctctcacgtgctacaagtaccctgactagcaaactgaagaatggaagcaacctagggaaggacagaaatgggtttggtgatgttattctaaatccttctctccagaagagagtgaagcagcttgctaatgccacggccaatacaaaacttcatcaagctcctttcaggaacatgcttttctatgggcctcctggcacagggaaaaccatggcagcacgagaacttgctcgcaattctggattagattatgcactaatgactggtggagatgttgcaccattgggatcacaagcagtcaccaagattcatcagttgtttgactgggcgaagaaatctaacaggggtttgcttctcttcatagatgaagcagatgctttcttgtgcgaacggaacaaaacttacatgagtgaagctcaaaggagtgccctgaatgctctcctcttccgcacaggtgaccaatccaaggacattgtccttgcacttgccaccaacagacccggtgatcttgactctgctgttgctgaccgtattgatgaggtcctggaatttcccctgcctggggaagatgagcgattcaagctcctgaagctatatctggacaagtacataatcaaagctggtgacaaacatgagaagagctggctccagttcttccgtcgccagccccagaagattgaggtgaaaggcatcactgatgacctgatccgggaggcggcatccaggacccagggcttctctggaagagagatagcgaagatgatggcaagcgtccaggccgctgtctatgggagcaaggactgcgagctcaccccaggcctgttccgtgaggttgtggactacaaggtcgctgagcacaagcagcggagaagattagccggtgaggagccaaagcaggatgcctagtttaccaatttttttgattcacccccattttgccgtgggatgtactgtgtttcccccccgggatagattgcttcatcgggcaggcgttttgcatgccccgtgttattcttttgttccatttgccttaccaggttggtctaaggtggtaggcgatggtaacttttttggtataagagatgagggttgcatgtggcatgtgatggaaactttggcgacaggtcacacacacacccagcaagctggccccgttttgatgcattatactgtttggtcagtcttctatcttcttactgatgctcgtcataaaatagtctgatttactgacaataatcgacagtgagccagtggctataatggtgttggcattgttttgcagctcttgtagatgtgtcgtacctactgatgctcgtcacaataagttagaacctttaaataattttagttaaaaaaacaaatataaa

SEQ ID NO: 128824 - DNA, 258 bp, Zea Mays
atgtgctggcgacgcccaactcgagctcattcagcagagccacggctcccggagacgtcgcactcgtcaagcagcgctaggatgttgtgctcgggcgcgcttacggagggcagtatggcgcgccttggaactgcagatcgtgacctagcgctgctaccgtcaggctccagctgcgacccttccttcacgaccggcaagtctgttctcaccctcgtgctgactgaagacattttctccttccatatcctcccgtcctag

SEQ ID NO: 128825 - DNA, 339 bp, Zea Mays
atggcttacgtgcagtatagacggctcaggaagcgggcatttcactggctcatcaagattgataggttccacggggcgctccactggcttgaactcaacaccaacctcgatgccatgggggctctccgcaggaacagctgccgctgggtcagattctcctgtacttatgttgggggccagcgtctcgacagcctcggccacgctcttggagcggcggtgggcgccggcggagaacctggagaagatcccgaccatcgtctcttcgccccccctgctctggctccaagctttctcggggttgaacgaagctgcccgcttttcttgtctacacagcactga

SEQ ID NO: 128826 - DNA, 1368 bp, Zea Mays
ttttttcagaggagagtgtagagtactcaaaaccggaagcgactccggtagtcggtctcggtcagtccactccactccactccactccaccacgcctgacccgcccactctaccttcttccctcttcagtctcctcgcgccaacgaccacatcccaccgaacaccgatcaaggtaaacctgttcgctgctccgccagaagccgaggtcgagctgttcacggcagcgagcatgcaccacgatcccaaccccttcgacgagggcgccgacgagaaccccttctcgaatggaggcggaggagcgcgtggcggaggcgtcaagccgcagtacgggttccggccgacggagcccgcggggttcggcggcggcaggggcgatgcgaccaccgacatccctctggacaccatgaacgattcgaagggcaaggcgaaggagctgtctcagtgggagtcagatctcaggaggagggagtcggatatcaggaggagggaggaagctctcaagagcgctggggtgcccatggaggacaagaactggccgcctttcttcccaatcatccaccatgatattgccaatgagataccagcaaacgctcagaagttgcagtatcttgcgtttgcgagctggcttggtattgtgctttgcctcttttggaattttattgctgtcatagtctgttggatcagagggggagattctaaactatttttcctggctaccatctatggtatgcttggcatccctttgtcctacttgatgtggtatagacctctgtaccgagcaatgagaactgacagtgctttcagctttggatggtttttcctttgttacctgctccatattggtttttgcatatttgctgccattgctcctgcagttgtattccgtggaaaatcattaacgggtatactggcagcgatcgacaccttttctgatcatgcaatagttgggatcttttactttgtcggatttgccttgttttgcttggagacacttgtgagcatatgggttcttcagaaagtatacatgtacttcagagggcacaagtaggctatggaagcacttgcaatagtcaaccaactaccatctcatctgattgccatgtggttttgtatgttaggacaacgtatatttttccgtttgcattgtggagggtaagtacgactatatgtataattttcggtttgcatggtggagggtaaatacgactatattgtagcgtctctctcgactgatctgtttttaaccccaattctttgctcatatacaaattgtgctttgtatgcacttttgtttgctaccaaggctgcacattgtatgcacttctgttggtgccttaaacaaggagacaaatattttatttgacacta

SEQ ID NO: 128827 - DNA, 1315 bp, Zea Mays
aacacacacattctgcgtggatttggctcgggggtcccgacagatctcagatgagagatctcgggcgttaggtttctggagcgtgctaatgaggtgctgatttggtgctgtgcagaatggaggcggaggagcgcgtggcggaggcgtcaagccgcagtacgggttccggccgacggagcccgcggggttcggcggcggcaggggcgatgcgaccaccgacatccctctggacaccatgaacgattcgaagggcaaggcgaaggagctgtctcagtgggagtcagatctcaggaggagggagtcggatatcaggaggagggaggaagctctcaagagcgctggggtgcccatggaggacaagaactggccgcctttcttcccaatcatccaccatgatattgccaatgagataccagcaaacgctcagaagttgcagtatcttgcgtttgcgagctggcttggtattgtgctttgcctcttttggaattttattgctgtcatagtctgttggatcagagggggagattctaaactatttttcctggctaccatctatggtatgcttggcatccctttgtcctacttgatgtggtatagacctctgtaccgagcaatgagaactgacagtgctttcagctttggatggtttttcctttgttacctgctccatattggtttttgcatatttgctgccattgctcctgcagttgtattccgtggaaaatcattaacgggtatactggcagcgatcgacaccttttctgatcatgcaatagttgggatcttttactttgtcggatttgccttgttttgcttggagacacttgtgagcatatgggttcttcagaaagtatacatgtacttcagagggcacaagtaggctatggaagcacttgcaatagtcaaccaactaccatctcatctgattgccatgtggttttgtatgttaggacaacgtatatttttccgtttgcattgtggagggtaagtacgactatatgtataattttcggtttgcatggtggagggtaaatacgactatattgtagcgtctctctcgactgatctgtttttaaccccaattctttgctcatatacaaattgtgctttgtatgcaagaaaataaacatgtaatatagaaataggttttttttaccgagaataagcaatagattaagggggtgtttgatttctagagactaatatttagtcccttcattttattcctttttagtgtataaattgctaaatatagaaactaaaataaagttttagtttctatatttggtaattttggaactaaaatagaataaaa

SEQ ID NO: 128828 - DNA, 231 bp, Zea Mays
atggccgagctcaaggctcaaatcagcttctcgggagggcgatggagagggcagggagtgggggaaaatgaccctcagaccacagcgcatctctctggagtgaaagatttcgggagaagcacaggggggctgctgctcggcgccatggccatggttgaccgaagctcacggatggctctagaatgtggaagaagggctcaatcaagtctgaagggaggcgattggcattga

SEQ ID NO: 128829 - DNA, 1704 bp, Zea Mays
ttttcagctcactacaagctgcccttgatattatcagaagaaaaaaaagaatgtgaaaaatagggacaccacatcattgccatccgcatttcgtcctcatgttcttgttatcttgtagctccacatccaccatcccactctccctattcttcttctcttcaagtgccactcccatccaccacaaggcttggcttggtgggaagaagacaaacgccggcacgcgcacgcagacacgatggcgatctgcagcgcgcacactaccacctccctgcgctccccatgcacgaccgtctcgaacgcaggtctgaggcagaagcaagtcatcttcgtcaccagcaacaggaggagcggcggcggcaggaggcacggaggggcaaggagcttccaggtctcgtgctccgtcgacaagccggtggtgattggcctggcggcagactcagggtgcggcaagagcaccttcatgcgccggctcaccagcgtcttcggtggcgccgcggagccgcccaagggcgggaacccggactccaacacgctcatcagtgacaccacgacagtgatatgcctcgacgactaccattccctggacaggaacggcaggaaggagaaaggtgtgaccgccctcgaccctagggccaacaactttgatctcatgtatgagcaggtgaaggcgatcaaggaaggccaggcagtcgagaagcccatctacaaccatgtcactggcctcctcgaccctccggagcttatcgcgccaccaaagattttcgtcattgaaggtctgcacccaatgttcgatgagcgagtgagggacctcttagatttcagtatctacttggacatcagtgatgaagttaagtttgcatggaaaatccagcgggacatggcagagcgtgggcacagccttgaaagcatcaaggccagtatcgaggccaggaaaccagattttgatgcctttattgatccgcagaagcagtatgctgatgctgtgattgaagttctgccgacccagttgattcccgacgacaacgaaggaaaggtgctgcgtgttaagctcatcatgaaagaaggggtgaagaacttcaacccggtttatctctttgacgaaggatcgaccatcagctgggtgccttgtggaagaaagctcacatgctcttaccctggcatcaaattttcctatggcccggacacttacttcggaaacgaggtatctgttctggagatggatgggcaattcgacagactagatgagctcatctacgtggagagccatctaagcaacctttcaaccaagttctacggagaggtgacacaacaaatgctaaagcatgcagacttcccaggtagcaacaacgggacaggtctcttccagaccatcattggactgaagattagagacctctatgaacagattgttgctgagagggctggtgtaccagcggaagcagcaaaagtttaacgatctatgcattcagatgtcctaaaactacagctctccgaactcaatgggagtaacaaccttcgcatctgttgggatatatggcgagctaggaggtatagaaatgtcattgcagaactcaggaaaacgtgcaatggaatttcttgaaatccctcttgaagagagtgagaactcgatagatcaagaatcaccacacgttgtattaatcgtatggtataatatttatacatgtacaggatgagctatgcata

SEQ ID NO: 128830 - DNA, 433 bp, Zea Mays
gccaacaactttgatctcatgtatgagcaggtgaagttctacggagaggtgacacaacaaatgctaaagcatgcagacttcccaggtagcaacaacgggacaggtctcttccagaccatcattggactgaagattagagacctctatgaacagattgttgctgagagggctggtgtaccagcggaagcagcaaaagtttaacgatctatgcattcagatgtcctaaaactacagctctccgaactcaatgggagtaacaaccttcgcatctgttgggatatatggcgagctaggaggtatagaaatgtcattgcagaactcaggaaaacgtgcaatggaatttcttgaaatccctcttgaagagagtgagaactcgatagatcaagaatcaccacacgttgtattaatcgtatggtataatatttatacatgt

SEQ ID NO: 128831 - DNA, 2634 bp, Zea Mays
gtttgattgcacagctagcccaccgctcatatcatccgcctcccctcgccccccctctctctctctctctcactcacaaacaaacaaacaaacaagcctggatcgagcgaattcagccgagcttcagaaacccttgcaagctcgtagcaacttctctcaaccttattcggctttcttctagctatataacgaccctaaattagtctgcttcattcggttcttgcgaattgccaagaccgaaagaacagcttattactcttctgttagaaagactcgaagaggccggccgagatagactatcagctagctagagggagctaactacctacctagctagccatgtgtgactacttcctgcaaaggatggatcagggcgaccaccaccaccaccaccaggccggagacctcacggacgtcgtccgagccggcggcgcgatgcatcaggcagctgtcgcggagctcccctccgcggacacggggtggcagctcccggccgagccagcagctggagcatgcctcttcccgccaccccagccctcgtcgtcggactgcgacggcttcgcggacgcgttcgccggcctcccggacccatttgccagcgactttcgcacctcctcctcctccggcgtgggcctttgccctgccgacgacttcttcgacttcgaggcgcctgctgctgctgctgccggtggcggcgctcgaagaggcggaggcgtactggcgggcgcgcagatgcccgcgctgtcgccgagagagatacggccgtacccggtgacgatgggcggcgacaccgtgaagatcggcgcgccgacgatgatgcccgggctggccgttgggccgccctgctgtgcgttcgacgctgtcgccgggatgcagatgccgtcgccgcacgcgcacggtggcgggatcaagcgcaggaaaaaccaggcaaggaaggtggtctgcatcccagctcctgcaccatcatcggcaggaggaaggaccactggggaggttgttccttctgatctctgggcttggaggaagtatggacagaagcctatcaaaggatcaccctacccaagagggtactacagatgcagcagctctaaaggatgcccggcgcggaagcaggtggagcgcagccgaaccgacccaagcctgctcgtgatcacctacaactcggagcacaaccacccttggccgacgcagcgcaacgcgctcgccggctcaacacgctctcaccacgccaagagcggcaagaacagctcctcgcacagtctgcagaagccgaaccttaaagcggaaccggagcatcaccaagcctcggaggcggtccccagctacgccaccaccgcgaccgcagccacaaccacaagcaccaccaccacagcgaccacaagcaccaccagcaacagtactcctccggagacggtggctgcagtgaaagaggaggcgatggttgggtcggaagtggagaaaggaacagaccacgacgcttctgtcctgctggaccacggtgatctcatgcagcagatgttcagccagagctactacaggccgaagataccggaggccagcggcggccaccacgccgatgacttcttcgctgacctcgccgagctggagtcggatcccatgagcctcatcttcccaggcggtgatcctgggaagaagggaagaatgtccagcgagagcttgggcatgggcaccgacccattattcaacatgctagattggggtgccagtgccactgatgttgctgctacttctgcagggagttcatttgagcaagacgaagagtggttggcgtgacatcgtttagcttgcgccggcaacctcaagcatgcatatatgcacgcaacacgtacgttcgatatctaggacaataaccatttcattagtacagaaggataagagacgagcagggatacttttgtttctctgtgccccctctcgttgtcatttcttctttcgtttttattgattctaaatgatatgtttgaataaggtgtttggtttctatcttctaaactttagggtatgtttgggaggaggggaatgttgaatagcaagaaaatcctaaactctccaatctcctccaacccctcttctcacacaagcaagtcctggtggctaaagtttagtcacttttagtccctaaattgtgaaactgtatgacaaaaggaggcttcctaaatagaaattctagggactaaagtagggatgacaatttaatccgtagatttgaatatccgtcggatatccgacccgacggatccggatatggatatgttcttttgacccgtgggttagacccatatccgacgcgaggtaaagtgggcatggatttggatattaaacctcatccggattatccgttggatatccgaaattaaccaatacttcaattatttttttccaggtaggtagacagcccaaccggtttgttgttgacaaataccttatggcagtgtgtctgctccgtgctcccctctctagctctcctagcgctacctcaagtgctcaacactacactaggataagatcatcaaaactttagaaagcagaaggccaaaagtagaggagacatgcagacatgtatttgttgtcatttgagaatgtatttgttgacatgcagacatgtacttaaat

SEQ ID NO: 128832 - DNA, 1648 bp, Zea Mays
atgtgtgactacttcctgcaaaggatggatcagggcgaccaccaccaccaccaccaggccggagacctcacggacgtcgtccgagccggcggcgcgatgcatcaggcagctgtcgcggagctcccctccgcggacacggggtggcagctcccggccgagccagcagctggagcatgcctcttcccgccaccccagccctcgtcgtcggactgcgacggcttcgcggacgcgttcgccggcctcccggacccatttgccagcgactttcgcacctcctcctcctccggcgtgggcctttgccctgccgacgacttcttcgacttcgaggcgcctgctgctgctgctgccggtggcggcgctcgaagaggcggaggcgtactggcgggcgcgcagatgcccgcgctgtcgccgagagagatacggccgtacccggtgacgatgggcggcgacaccgtgaagatcggcgcgccgacgatgatgcccgggctggccgttgggccgccctgctgtgcgttcgacgctgtcgccgggatgcagatgccgtcgccgcacgcgcacggtggcgggatcaagcgcaggaaaaaccaggcaaggaaggtggtctgcatcccagctcctgcaccatcatcggcaggaggaaggaccactggggaggttgttccttctgatctctgggcttggaggaagtatggacagaagcctatcaaaggatcaccctacccaagagggtactacagatgcagcagctctaaaggatgcccggcgcggaagcaggtggagcgcagccgaaccgacccaagcctgctcgtgatcacctacaactcggagcacaaccacccttggccgacgcagcgcaacgcgctcgccggctcaacacgctctcaccacgccaagagcggcaagaacagctcctcgcacagtctgcagaagccgaaccttaaagcggaaccggagcatcaccaagcctcggaggcggtccccagctacgccaccaccgcgaccgcagccacaaccacaagcaccaccaccacagcgaccacaagcaccaccagcaacagtactcctccggagacggtggctgcagtgaaagaggaggcgatggttgggtcggaagtggagaaaggaacagaccacgacgcttctgtcctgctggaccacggtgatctcatgcagcagatgttcagccagagctactacaggccgaagataccggaggccagcggcggccaccacgccgatgacttcttcgctgacctcgccgagctggagtcggatcccatgagcctcatcttcccaggcggtgatcctgggaagaagggaagaatgtccagcgagagcttgggcatgggcaccgacccattattcaacatgctagattggggtgccagtgccactgatgttgctgctacttctgcagggagttcatttgagcaagacgaagagtggttggcgtgacatcgtttagcttgcgccggcaacctcaagcatgcatatatgcacgcaacacgtacgttcgatatctaggacaataaccatttcattagtacagaaggataagagacgagcagggatacttttgtttctctgtgccccctctcgttgtcatttcttctttcgtttttattgattctaaatgatatgtttgaat

SEQ ID NO: 128833 - DNA, 105 bp, Zea Mays
atggttggagagaaacaacagaattttcaaaggtcaacagagaacgccagaacaagtgatgcagatggtgaaagatcttgtgggtacaggtctagcctgctagta

SEQ ID NO: 128834 - DNA, 1816 bp, Zea Mays
gcggcaatggacgctggggacgccatggagaggggcgaccgcacgccgctgctgccagagagtcacgggccaaaggttcaggacgacggcggcctgcaagtgccgctgctgaaggataaaaaacgtgccggcagcaaggcgccggcggttgttctcggattcgagtgcctggagagcacagcgttcaatggcatctcgaccaacctggtggtgtacctggagaccgtcctccatggcagcaacctgtccagcgcctccgacgtcaccacgtggttcggcaccagcttcctcacgccggtcttcggcgccgtcatcgcggacaccttcttgggcaactacaacaccatcctcgtctctctcgccgtctacctcctggggatgatgttcgtcaccttctcggcgttcctgcccacggccgcggtgctcggcggcacgtcggtgttcggcgccaagactatcgccttcctcgggctgtacctcgtggcgatcgggcgcggcggggtgcagtcgtcgctggcgccgttcggcgcggagcagttcgacgacgacaacccggcggaccgggagagcaaggcgtctttcttcagctggttctacctctgcgtcgacttcggcatgatcgtctccggcctcatcatcgtgtgggtccaggacaacgtcagctggggcctcggcttcggcatctccacggcctgcctcgcgctcgccttcgccgccttcgtgctcgccacgcccatgtacaagcgccgcatgcccaccggcacgccgctcaagagcctcagccaggtcgtcgtcgccgcatgcaggaagatcgctctcaaggtgcctgccgacgccgacatgctctacgaggtcggcgacaaggtggacgcccagcagcccaagatcgcgcataccgatgagttctcgtttcttgacaaggcagccgtcgtctccgaatcggacatggaggagatgcgcgtgtcgggggagaccggttcgtcgtcgtggacgctctgcaccgtcacccaggtggaggagctcaagatcctggtgcggctgctgcccatatgggtgaccagcgtcatcgtgtcctcggcgtacgcgcagatgaccaccacattcatccagcagggcagcgccatgaacatgtccatcctgtccgtgccggtggcagcggcgtccatgggctcgtttgaggtggtcttcctcctcacatgggtgctgctctacagcaaggtgatcgtgccggtgctcaggggcttctccacccgcggcgacggcgagccgtcccagctgcagcgcatgggcgccggccggctactcatggcgctctccatggcggtctcggcgctcgtcgagatgaagcgcctcgacagcgcggcgcgcggcgaggaggtcaccatcgcgtggcagctcccgcagtacttcttcatggccggcgctgaggtgttctgctacatcgcgcagctggagttcttctacgccgaggcgccggacaccatgaagagcacgtgcacgtcgctctcgctactcaccatcgcgctgggcagctacatgagctccttcatctacgccatcgtagcggcgttcacggcgacggccgacagtcccgggtggatctccgacaacctcaaccaggggcacctcgattatttcttctggaccatggccgccatgtgcacgctcaacttcgtcgtgtacagcgcgttcgccaagaactacaagctcaagacagtgctctcatgacgcgagtacaagctgctcagctcacctccgtcttggtcttggagattccactgcatttttggcacagatgcaaagtgatgattggtaa

SEQ ID NO: 128835 - DNA, 1752 bp, Zea Mays
atggacgcgggggacaccatggagaggggcgttcgtgctgtgctccggcctaagctgctcgctctcccgtcaggtctcacgcgctctatctcaatgggcactccacgcctgccgacgccctgcacgccgcgctctcccttcctgatcactccacaccggctggcatccttcacgccggatcgtcagcgatccattggagcgaggagccatggagacatggaaaagactcaggggccagagactcaggacggcgacttgcaagtgccgctccttgatgataagaactgcgccggcagcaaggcgccattggtagttcttgggttcgagtgcttggagagcacagctttcaatggcatctcgacgaacctggtgatgtacctggagaccgtcctccacggcagcaacgtggccagcgcctccaacgtcacgctgtggttcggcaccagctacctgacaccagtcttcggcgccatcatcgccgacgccttctggggcaactacaacaccatcctcgtctccctcgccatctaccttcttgggatgattctggtgaccttatcggcgttcctgccgacggacacggtgctcggcggctcctcggtgttcggcgcgcacacggtagcgttcgtggggctttacctcgtcgcgatcgggagcggcggggtgcggtcatcgctgctgacgttcggcgcggagcagttcgatgacgacaatgcggcggatcgcgagaacaagctgtccttcttcagctggttttacctatgcgtcgactttggcccgatcgtctccggcctgttcatcgtgtggatccaggagaacatcagctggggcctcggctttggcatctctaccgcctgcatcgcgctggccttgggcgcattcgtgctcgccacgcccatgtacaagcgctcgacgcccaccgccggcaaggcgtccgtcatctccgactccgagacgggcttggaagcgatatcggaggaggcgggctcgtcgcagaagctccgcgccgcgacgaaggcagaggagttcaagaccctgctgggacttctgcccatctgggcgaccagcatcatcgtctcctcggcgtacacgcagatgaacaccaccttcatccagcaaggcagcgccatgaacgtgtccgtcctgtcggtgcaggtgccaccggcgtcgatgggctcgttcgaggtggtctgcgtcctcatatgggtgctgctgtacggccacgtgatcgtgccggcgctgaggggatgcgggttctcgttcggcggcgacggcgaaccgtctcagctgcagcgcatgggcgccggccggctcctcatggccctggcgatggcggtcgcggcgctcgtggagatgaagcggctcggcagcgcggcgcgcggggaggagatcaccatcgcgtggcagattccgcagtacttcttcctggccggcgcggaggtgttgtgctacatcgcgcagctggagttcttctacgaagaggcgccggaaaccatgaagagcacgtgcacgtcgctcgcgctgctcaccatcgccctgggcagctacctcagctccttcatctacgctatcgtggcagcattcacggccacggcggacagtcccggatggatctccgacaacctaaaccagggccatctcgactacttcttctggaccatggccgccatttcagcgctcaacttcgtcgtgtacagcgtgttcgccaggaactacaagcccaagagtcaagactatgctctcatgacgtga

SEQ ID NO: 128836 - DNA, 781 bp, Zea Mays
aaatccttgaggtcaactaggcctagtacatcaggcgcggatgtcttctggcccggcaatgagaaggaagcgccgccgtccgcatcgtttgacggggacggaatcgcagaagcgcgtgcccgctacgcgatgccatctctgcatcacaaccgctcgtgtttgcgcaaatggctcagatgtgttctcaccgcattatcgagaaacttctattttcgtcacaaggctattccgttccgagagccaaaaactccactgctttcatcaactccggcgacttggagaagacgaagttccagaatccgatcggaagtttggtgctcgcgccttgacggattgatttcggtgcgccgatggggcaggcgttccgcaagctgttcgattccttcttcggcaccagcgagatgagggttgtgatgcttggtctggatgctgccggtaaaaccaccatattgtacaagctgcatatcggggaggttttgtcgactgttcccacgattggtttcaacgtcgagaaagttcaatacaagaatgtgatgtttactgtgtgggatgttggtggccaagaaaagttgaggcccttgtggaggcactacttcaacaatactgatggcttgatctacgtagttgattcgttggatcgggagagaattggaaaagccaaagctgaatttcaggcaataatcaaagatcctttgatgcttaacagtgtaatactggtacttgccaataagcaagatatggtgagccaaccacacttgactccttctaacacgaagattcc

SEQ ID NO: 128837 - DNA, 1287 bp, Zea Mays
aaatccttgaggtcaactaggcctagtacatcaggcgcggatgtcttctggcccggcaatgagaaggaagcgccgccgtccgcatcgtttgacggggacggaatcgcagaagcgcgtgcccgctacgcgatgccatctctgcatcacaaccgctcgtgtttgcgcaaatggctcagatgtgttctcaccgcattatcgagaaacttctattttcgtcacaaggctattccgttccgagagccaaaaactccactgctttcatcaactccggcgacttggagaagacgaagttccagaatccgatcggaagtttggtgctcgcgccttgacggattgatttcggtgcgccgatggggcaggcgttccgcaagctgttcgattccttcttcggcaccagcgagatgagggttgtgatgcttggtctggatgctgccggtaaaaccaccatattgtacaagctgcatatcggggaggttttgtcgactgttcccacgattggtttcaacgtcgagaaagttcaatacaagaatgtgatgtttactgtgtgggatgttggtggccaagaaaagttgaggcccttgtggaggcactacttcaacaatactgatggcttggtatgttttattgctaaaatgatattgatctgtactctactttgtaattgttctgcttgatgagttgggttacttatgtttgtcttggtgagtttatggggatactcctgaaagtattttgtaatgtgtcaagctcatccctggtaatcttcagggcagttaccgtttcccttcaatgaaatattattctacatccattgctgcttttcttccttgagataacattttaaattccagagttttgttgggtttatgattatgaccagttatacatggtaactctttatgcacgtttcgagttgtagatctacgtagttgattcgttggatcgggagagaattggaaaagccaaagctgaatttcaggcaataatcaaagatcctttgatgcttaacagtgtaatactggtacttgccaataagcaagatatgtttttattgaagaatactatgaagataaatctgcatctcactgcattgcaaccagtttctgttctcccagtgttcggttaaccttgtactcccagtgttcggtcagaatggttcagtcagaccttgtactgtattgatttaactcccagtgtttattttattttatgtctggacgtgattgtgcttctccggcatccccaatttagggtgagtgatgcatgagaaaagcattctctgccctt

SEQ ID NO: 128838 - DNA, 1242 bp, Zea Mays
aaatccttgaggtcaactaggcctagtacatcaggcgcggatgtcttctggcccggcaatgagaaggaagcgccgccgtccgcatcgtttgacggggacggaatcgcagaagcgcgtgcccgctacgcgatgccatctctgcatcacaaccgctcgtgtttgcgcaaatggctcagatgtgttctcaccgcattatcgagaaacttctattttcgtcacaaggctattccgttccgagagccaaaaactccactgctttcatcaactccggcgacttggagaagacgaagttccagaatccgatcggaagtttggtgctcgcgccttgacggattgatttcggtgcgccgatggggcaggcgttccgcaagctgttcgattccttcttcggcaccagcgagatgagggttgtgatgcttggtctggatgctgccggtaaaaccaccatattgtacaagctgcatatcggggaggttttgtcgactgttcccacgattggtttcaacgtcgagaaagttcaatacaagaatgtgatgtttactgtgtgggatgttggtggccaagaaaagttgaggcccttgtggaggcactacttcaacaatactgatggcttgatctacgtagttgattcgttggatcgggagagaattggaaaagccaaagctgaatttcaggcaataatcaaagatcctttgatgcttaacagtgtaatactggtacttgccaataagcaagatatgaaaggggcaatgacaccaatggaggtgtgtgagggtcttggcctctacgatttgaagaaccgcatctggcacatccaaggttcttgtgcgctcaaaggtgatggcctttatgagggcttggactggctggcaagcacactgaaggaattgcaagcttcaggtcgcctaccttctggagggacatcgttgttctaagtagcaagcctgcctgtaagatccttcggctgatagcagtaataatggatcaagagcgttttttttgtcatggatacaaactcatccctcgggatttcttgtcagtgatctaacctatgatattgatcttgtaaattctgttactagttcatacaaagctaaccggcggatgcatgttacatatgagaattgaggagtcaacttccacatgctattattgtaagcatttctgtaaactgaagttggcaaacacaaattatcccaacatattggttgccattagatctatcttatggccattcatcag

SEQ ID NO: 128839 - DNA, 2533 bp, Zea Mays
ctcctcagcatcccatttttgctctattcgccacccacaaatccactgcagccagcgcatcaggagaagaaggtaagagacgaggggggagatggaggcggcggccatggatttccacacgctctcgcgccgggagctccaggcgctgtgcaagcgcaacggcctccgcgccaacatgaccaacgccgccatggccgaggcgctccaggggctaacctcggtcgacgggatcgacgaaatcggcaccagtctctgtctcccgacgccaggacggtcggcgatgaagtcggcggcgaagatggtggccgtggccgtcgaggagcagcagcacggtagcccgctcccccgcggccgccgcgtatcggtgaaaccaccagaggccatccggatggaggttgaagagggggaggacgagatgaaggagatcgtgaagactcccggcgtggcgctgcgcagcactcgccgcggcactcgggccactcccgcgccgcttcctactccggtggcggcgtgcagtacgcgcgcaacagcggggaggaccgccgctcgtaagacgcgcgacgtggcgccgaccccagccacccggaggagccagaggacagcgtctcgcaaggccgcgggggctgttgaggtggaccgacgcgccgaagatgtatccgaggaaaagacgtcggatatgacgatagctttggatcaggaagctgaggtgttagcggccgcatcaaaggaggagaaggttcagcaagacgaaaagaaagctgctgtttcagatgtgaaatgtgatgacccaaaggaggaggacaaggtgcagcaagaggaaccaaaagatgttgcctcagatgtgaaaattgatgacccagagcaggaggaagttgccaataaagatgaggaatcggaggagggcgacgaagatgtttcggttaagagctgcaatgatcctaaggtggatgaagtggttgttgtcataggggaacaatcaacaaagtcccatgatgggattgtgaaagagcaggaacctatcagtgttgagaaatctgctcacttgacggtcatggaggattcaacaatcctaggtgtcattgaggacttggctgaattgtcacctgcaagggagatgcctgatgagatcattcctgttactgaagataatgaagtggccatcaatgaggagaccatcaaggaagatgattttgctgacgctattcagactgatcctactccaaaggagattaatctaactgctgcgggggaagataagatcattgaaggcaaagaaggtgctgatgataagatgccacaggctgctgaaactagtgaacatgatgaggacactgaatttaaagaaggggcagctgatgaggtgctgcaggctgagctggcagacaatgaaacaagtgatggtgaagatgaccgtactgaagtgagagaaggggctgctgctaagacgttgcagggtgaactgacagacgatgagactagtgaagatgacctccatgaagatgaagaatgggcttcagatgatgaggaaactgcctctagtgacgagagcgatgaaggtactgagtccaatgaagggagttacattgctgatgcagtgcagatgttgcagggaactgggatagtggaagtggccgacgaagatgcctctactgaagatgatttcagtggcgacctaccaccagagtttgacaatatcatgatattccgtgatgctgaaactgatagtgacagtgttcctccagcgctcgaggaaaaccaggctgttgcatttgcaaccaaagctgcagagtccctaggtgattctgccatgaatgcagagcattatgagggtcctgaggaggctgatgctactgaaaaaacaatgaaagtggttgaggacattgtgaagtccctggatgaatcctccttcaaggagggagaatcaaaggagacgcaaaagaagcagccgcaggattatgatatcatgagcctaataaagcttagaagcacgtacaagaaatgtcttattgcccgaaaggaggggaagaggcctcctctcgaggaggtggatgggaacgcctgcattgaccactgaacagaacaagctgtgtcagtcacaaaattttcgtgaggatggcagctgccacgacgggattgaatagaggaatgctctggttgtgaagtgataactaaggctaccttcaaggcttaatgatcaagggttaatgaaactgtggtttcagccaaccaacctgcaattcctgtggtttttgtccatgttgattaactagtacgaatgccaagttccttgaaagttatacaaatccgttaatgttcagatggcattcagcatgctccatgtgctgcatgccaacatatcattcggcaaattggcaatgcaaactagaattgctaacgcagagtgaattttctagccctgttcgtttttttttccgtggaacctgtttccctttgtatgtcatcgttgaatacaagcctttggacggcccagctcagatgctactcggcccagtttacgacggcctaactgccc

SEQ ID NO: 128840 - DNA, 1053 bp, Zea Mays
gcagacttgtcggcacagccgtcgtaatatatccattcgatcgaagcaatcgcgccttgaaccctagctcccgccgccaccccacgcctgcagccatgccgcccaagctcgacccgtcgcaggtggtggaggtgttcgtccgtgtgaccggcggcgaggtaggcgcggcgtcttcgttggcccccaagatcggtccgctcggtctttctcccaagaagatcggagaggacattgccaaggagacggccaaggactggaagggcctccgcgtcaccgttaagctcactgtccagaaccgacaggccaaggtctccgtcgttccctctgccgcggcgctcgtcatcaaggcgctcaaggagcccgagagggaccgcaagaaggtcaagaacatcaagcacagcggcaacatcagtctcgacgacgtcatcgagattgccaggaccatgaggcccaggtccatggccaaggaaatgtccggctgcgtcaaggagattctcggcacctgcgtcagcgtcggctgcaccgtcgacggcaaggaccccaaggacctccagcaggagattgacgacggcgaggtggagatcccgtccgcttaagaagagggattggagtctaggagggttgtctgtctactgaagtaattctctctagctagatttgtctgttgaagtaattttctctagctagatttttgttaaaatgtatctctgctacccattgctatggttttctggtggatgcgtgctttttactatatatagctaggaacagtgtctttcattagctccactgcacaaggctcatgctggatgggggcagcgatgagattttcccagctccaaactcatgccatatgcagttaaacaatgtgctgaacaacttcaagcctgtgggcaagcattaactctcattttgaaaaaaaagacgcctaacaaatattgcttcggtttgaatgactcgcccaggttggattttgtcaaagcgtctgtagtgatcgcttgtttctggatgcagcagcttacctgttgattaataaatacttccatgtgcttt

SEQ ID NO: 128841 - DNA, 1032 bp, Zea Mays
gcagacttgtcggcacagccgtcgtaatatatccattcgatcgaagcaatcgcgccttgaaccctagctcccgccgccaccccacgcctgcagccatgccgcccaagctcgacccgtcgcaggtggtggaggtgttcgtccgtgtgaccggcggcgaggtaggcgcggcgtcttcgttggcccccaagatcggtccgctcggtctttctcccaagaagatcggagaggacattgccaaggagacggccaaggactggaagggcctccgcgtcaccgttaagctcactgtccagaaccgacaggccaaggtctccgtcgttccctctgccgcggcgctcgtcatcaaggcgctcaaggagcccgagagggaccgcaagaaggtcaagaacatcaagcacagcggcaacatcagtctcgacgacgtcatcgagattgccaggaccatgaggcccaggtccatggccaaggaaatgtccggctgcgtcaaggagattctcggcacctgcgtcagcgtcggctgcaccgtcgacggcaaggaccccaaggacctccagcaggagattgacgacggcgaggattggagtctaggagggttgtctgtctactgaagtaattctctctagctagatttgtctgttgaagtaattttctctagctagatttttgttaaaatgtatctctgctacccattgctatggttttctggtggatgcgtgctttttactatatatagctaggaacagtgtctttcattagctccactgcacaaggctcatgctggatgggggcagcgatgagattttcccagctccaaactcatgccatatgcagttaaacaatgtgctgaacaacttcaagcctgtgggcaagcattaactctcattttgaaaaaaaagacgcctaacaaatattgcttcggtttgaatgactcgcccaggttggattttgtcaaagcgtctgtagtgatcgcttgtttctggatgcagcagcttacctgttgattaataaatacttccatgtgctttgatggtt

SEQ ID NO: 128842 - DNA, 667 bp, Zea Mays
gcgtgtcgtcattcctcttccctcggctgcttcttgcctccacattcccgccatgaaatcctagcgccagttcggctaaatctagggacaacaagcggtgcaaacaaatggggtggtgccgcaggcgtacagccgctcccgcgcgcgtggcagcacgtagcgcgcgctgtgcggtgcagcgggcagcctcgactggcattggcggcttggcgttccgctgcccgctggaggcaaggatgaaccacattggcacatcgccatcaattaggaacataccatgtcttttctgaaattcgaatgcaaatgaacacctcatccaacagaatgttcagggagggaacacctttcagaaaagaagagaaacggagtgatggaactcaactgtgaaggctgcgtctgcgcttagctttgtgaatatggtgatggatcttatggtcattcttgaatttgtccatggcaccattcatgctaaacaacctgttctaaccatgtggagggacactggttctgggtgttcatatgttttttttttctggagctgcaaatgcttggggtaaacaagcattctgatcgttttgctgagctgcattacagcgacaaatttgatgagcaatagaggcagattaagctggaagttgaaatcaatgaaatttggaagttctgttaa

SEQ ID NO: 128843 - DNA, 840 bp, Zea Mays
atgaacatgttcgatgggatggagagggctgggtacggcggcggcgctgggccgatgggcggggtggtgctgtcgcgggaccccaagccgcggctgcggtggacgcccgacctgcacgagcgcttcgtcgaggccgtcaccaagctcggcggggcagacaaggcgacgcccaagtccgtgctgcggctgatgggaatgaaagggctcaccttgtaccacttgaagagtcacctccagaaatacaggcttggaaagcagaccaagaaagacacgggtttggacgccggcagaggggcattcgcggcgcagggcatcaatttctccacaccagtacctcctcctagcattccatctacggccagtgacaatacgggagaaacgccacttgcagatgcgctgaagtaccagattgaagtccaaaggaaattgcacgagcagctcgaggttcagaagaagctgcagatgcggatcgaggcgcaaggcaaatacttgcagacgatactcgagaaggcccagagcaacctctcgtaccacgcgactggagccgcaaacctagaagcaaccaggtcgcagctgacggacttcaacctcgcgctctcaggcttcatggacaacgtgacccaggcgtgcgagcagaacaacggcgagctggtgaaagccatgtccgaggacggtctcagagcgaacaatctagactttcagccgtaccatggagttcatgacggggacgatgtcaagtgcgctacggacgaagggttgctacttctggacctgaacatcagaggcgggtacggtcatcggatttcgacggatctgaagatgaatcaacacatgcggtga

SEQ ID NO: 128844 - DNA, 2712 bp, Zea Mays
aagttgccagtagcaggcggctccgtatagtagaaagagaagacgacgtgtgttttggcctccggaggagcaagccccccaaaaaaaacgagcagggagcggttaaaaagcaggcaaaaaaggggagacgccacgagcggaagacagacaggcaggcaagcgagaccaaggcgggggcggagcgcgagaggcgacgcgagaggcgagaagtggaggcggtgctgcggtggcatgccatggttataaaaagtaacggagcgcgacgagggtagaaagaggaaggcccgccgcttccccttcttcattcccgtcccacacacgccgccgccgccggtgcggctcgcttccgtcccccccggtccgcgcgggctgcctgcgggagcagggtggcagggcactccggcaaccacgtgggtggggaggcgacgacaccaccctatgctctgtcctcgcccgcagggtaagattgcagcagcagtgaatttgggagcttgaagcattcatctgagacatggaaaaagtgatctgctgggcatatctccttcaacgcaagcagttctcgaaagaaactcttgattgctgtgtcttagctcgtgggaacactcctctctcctctctcgtgaactacacatagtgattatatgttcctctatgctcaacaacaagcaggctgatgcgatattttgctgaagttattatatttcagtctatgccagacatctacatgtagatggtgctcatataagtgggggttgatatatttgctgtgttcagcttacatctgttgcggccctagttagctatttgtcttttgtgtactatctgaggcaagagattgatcagctaggacttggcgaacacttgcctgtgttggctgttcatctgaagggggaaatttgcacgagacacctcggatattacaacaatggatagattcaagttgattaaggaagttggcgatgggactttcgggagtgtatggcgtgctataaataaacagaatggtgaagttgttgctgttaagaaaatgaagaaaaagtattattcttttgaggaatgtatgggtttgcgtgaagtaaagtctttgcggcgcatgaatcatcctaacattgtgaagctcaaagaggttatccgagaaaatgatatattatacttcataatggaatacatggagtgtaatctctaccaacttatgaaggataaggtcaagcctttctcggagtctgaagtccgcaactggtgctttcagatatttcaggctcttgcttacatgcatcagaggggctactttcatcgtgacctcaaacctgagaatctgttggttagcaaagatgtcataaagctagcagactttggtcttgcaagggaagtttcatctttgccgccatatacagaatatgtctcaactcgctggtatcgggcaccagaagtattgctccagtcatctgcttatgattctgcagttgatatgtgggcaatgggtgccataatggctgagttgttgacactccatcctctctttcctggaactagtgaagctgatgagattcacaagatatgcaatgtcatcggtagtccagatgagcaatcttggcctcaaggattgtcacttgcagaagcaatgaagtatcagttcccacagatcaaaggcagtcaactggccgaggtgatgacaacagccagtagcgatgcaattgacctcatctcatcactatgctcatgggatcctagcaagagaccaaaggccgcagaagtcctccagcataccttttttcagggttgtacatgtgttccactccctgtccgtccaaaagcttcatcacttcctagaacacctccatgtgttggatcaaaaggaaattcagagaacagtgtggctagaagattctcaactggaactctatctacaatgaaatctcatagcaatgcatccgcaaaattaaatggtttatctaagactggtgtacaaagaaaacttaatttggatcgtcagccatcccaaaagggtatgaagccaaccgagactagcaataaactaactacgaatcgggtaccagctcggaatagcccagggaatcctgtacttaggcattcacggagcttgcctgaaactggccgaggagcaatacagaaggtctcatcaattacagagaaactatcccaaatgtctgtgacctctagaacacggagcgctgtgaagcctgctgcccccatgatgaaggccggacatggcaagtcggactttcttgggaagtctgacgatatccctccagcaaagaggctgacaagaaaattggtcagctaaatgagggtatgtggagtgaaaattcgatcagctgcaggaggggtgttgtgtatagtgtgcagaaaccagtgtgcccgaagaggatagtcagcctgagcgtttgcccatcgatggttgtgcggatttgccatcaccacagtttcgctgcgtcgagacatattagaatgggtttgcaaattcctttgtgaagtgctagagcctgcatcaagccttccccacttccgggcggttgatctgcttttttcctgcgaaaagcttgcccccatgttttaataaacatgattgtgctattaatttggtttggtttgccttgcaatgttatcttgcaccaatatcgctgtcacaaactgtatgcacatttaacagcttgtaaatccttgagcccaacaagggatggacatttcaca

SEQ ID NO: 128845 - DNA, 2734 bp, Zea Mays
aagttgccagtagcaggcggctccgtatagtagaaagagaagacgacgtgtgttttggcctccggaggagcaagccccccaaaaaaaacgagcagggagcggttaaaaagcaggcaaaaaaggggagacgccacgagcggaagacagacaggcaggcaagcgagaccaaggcgggggcggagcgcgagaggcgacgcgagaggcgagaagtggaggcggtgctgcggtggcatgccatggttataaaaagtaacggagcgcgacgagggtagaaagaggaaggcccgccgcttccccttcttcattcccgtcccacacacgccgccgccgccggtgcggctcgcttccgtcccccccggtccgcgcgggctgcctgcgggagcagggtggcagggcactccggcaaccacgtgggtggggaggcgacgacaccaccctatgctctgtcctcgcccgcagggtaagattgcagcagcagtgaatttgggagcttgaagcattcatctgagacatggaaaaagtgatctgctgggcatatctccttcaacgcaagcagttctcgaaagaaactcttgattgctgtgtcttagctcgtgggaacactcctctctcctctctcgtgaactacacatagtgattatatgttcctctatgctcaacaacaagcaggctgatgcgatattttgctgaagttattatatttcagtctatgccagacatctacatggttgatatatttgctgtgttcagcttacatctgttgcggccctagttagctatttgtcttttgtgtactatctgaggcaagagattgatcagctaggacttggcgaacacttgcctgtgttggctgttcatctgaagggggaaatttgcacgagacacctcggatattacaacaatggatagattcaagttgattaaggaagttggcgatgggactttcgggagtgtatggcgtgctataaataaacagaatggtgaagttgttgctgttaagaaaatgaagaaaaagtattattcttttgaggaatgtatgggtttgcgtgaagtaaagtctttgcggcgcatgaatcatcctaacattgtgaagctcaaagaggttatccgagaaaatgatatattatacttcataatggaatacatggagtgtaatctctaccaacttatgaaggataaggtcaagcctttctcggagtctgaagtccgcaactggtgctttcagatatttcaggctcttgcttacatgcatcagaggggctactttcatcgtgacctcaaacctgagaatctgttggttagcaaagatgtcataaagctagcagactttggtcttgcaagggaagtttcatctttgccgccatatacagaatatgtctcaactcgctggtatcgggcaccagaagtattgctccagtcatctgcttatgattctgcagttgatatgtgggcaatgggtgccataatggctgagttgttgacactccatcctctctttcctggaactagtgaagctgatgagattcacaagatatgcaatgtcatcggtagtccagatgagcaatcttggcctcaaggattgtcacttgcagaagcaatgaagtatcagttcccacagatcaaaggcagtcaactggccgaggtgatgacaacagccagtagcgatgcaattgacctcatctcatcactatgctcatgggatcctagcaagagaccaaaggccgcagaagtcctccagcataccttttttcagggttgtacatgtgttccactccctgtccgtccaaaagcttcatcacttcctagaacacctccatgtgttggatcaaaaggaaattcagagaacagtgtggctagaagattctcaactggaactctatctacaatgaaatctcatagcaatgcatccgcaaaattaaatggtttatctaagactggtgtacaaagaaaacttaatttggatcgtcagccatcccaaaagggtatgaagccaaccgagactagcaataaactaactacgaatcgggtaccagctcggaatagcccagggaatcctgtacttaggcattcacggagcttgcctgaaactggccgaggagcaatacagaaggtctcatcaattacagagaaactatcccaaatgtctgtgacctctagaacacggagcgctgtgaagcctgctgcccccatgatgaaggccggacatggcaagtcggactttcttgggaagtctgacgatatccctccagcaaagaggctgacaagaaaattggtcagctaaatgagggtatgtggagtgaaaattcgatcagctgcaggaggggtgttgtgtatagtgtgcagaaaccagtgtgcccgaagaggatagtcagcctgagcgtttgcccatcgatggttgtgcggatttgccatcaccacagtttcgctgcgtcgagacatattagaatgggtttgcaaattcctttgtgaagtgctagagcctgcatcaagccttccccacttccgggcggttgatctgcttttttcctgcgaaaagcttgcccccatgttttaataaacatgattgtgctattaatttggtttggtttgccttgcaatgttatcttgcaccaatatcgctgtcacaaactgtatgcacatttaacagcttgtaaatccttgagcccaacaagggatggacatttcacatttggtttgaatgcacatttaacgcagtgaggtgccaatttggcgc

SEQ ID NO: 128846 - DNA, 1363 bp, Zea Mays
tgattatctgctcgatcttgcacaggtagatttgagtagcttagtggacattgacttgcctgaagcggacgcggcggagctcgcgggtgccatcgccgaactcgcggatggtgatggacacgccgggctcgtcctgctccacccactccgtggcctccaggtcgctcgcgttgctcacggacacggacgcctcgtccagggacgacgtggtagcgcgcgacgggtcgaggtgcggagcggccggtgccggcgccggcgcggagttgagcaggttgaagtggtgcgcccacacgtggtccgacgggtccggcaccgcactggacgatgggttgcacgcggctcgggccgtggaagccgccgcggccgtggccctgcacgaggtggcgcgggcgatcggctgctccctgcccacggctgtcggcggcaggatcaccgggctgtccctcgtcgagccggcgcgggagtagaacgacgagtctctctgcatgccaacaaccgtttcagttgggtggcctgatccacgacgacagcacagaaacgtacgtgcgtgcggcatacgctgcaccggcgccggtggtcgagacggctacgcacctgcgtggcatcgtcgatggaggacgtcggcgtcgagacgccctgctgccggctgaacgtctgcacgttgtagagctccaccacgcggtcgtagttctctccccaccaccgctgcgcctcccacttgttgaacatgtcgcggctgcacgccagacacgttcgatgctccgttacgttagctgagcacgcgcgcacttgatgcagcagtcgcgcgcaaagctagctgttggcgatagataataagcacctgaagcggattcgctttatgtcgttgccagcgccgccggcggtggagacgaaggtgatctggacgccgggctccacctgggccgtccactcccgcggcacgcggtcctcttcaacgacgacaacctcttcatcctcctcatcgtcctcctccccgatgctcggtatccagctcgcgctcgggctcctgacgtgctgcgggaagccacggccgaccttggttcccgcggtggcgccggtcgcgtgcgtcgtcgtcctcatgtagccgtagccctcggtggccccgtccgacgtgaagcccgagtcgtcaatgacgcccgtgtacgcggccaggcggctgttgcggtggaagcggttgccccggaacgacgggctcgccgccgcggccttgtactgcctgccggagccggagaacttgagcaccatgtccttgagctagaaagcacatttgcggaaatgcttccttttgtcagatggtcgaaggtgcagaaatttatgacatggcacatggtatttttgcatg

SEQ ID NO: 128847 - DNA, 1287 bp, Zea Mays
accagctcattcatcgtagcatagtaccattcactgatccaagacaaaatatggctgtgaatgtgagcaccatgtggtcgttgatgcaggcacaagttgcgatggttgtggcgttgtccttcttggtgagcggtgcatggtgcggtcctcccaaagtcccccctggcaagaacatcacggccacctatggcaaggactggttagacgctaaagcaacatggtatggcaagccgacgggtgccggtcccgacgacaatggtggcggctgcgggtacaaggacgtgaacaagccccccttcaatagcatgggcgcgtgcggcaacatccccatcttcaaggatggtctgggttgtgggtcctgcttcgagatcaagtgcgataagcctgtggagtgctccggcaagcccgtggtggtgcacatcacagacatgaactatgagcctatcgcggcgtaccacttcgatttggcaggcacggcgttcggcgccatggccaagaagggtgaggaggagaagctgcgcaaggcgggcatcatcgacatgcagttccgaagggtcaagtgcaagtacggctccaaggtcaccttccatcttgaaaaggggtgcggccccaactacctggcgctgctggtcaagtacgtcgacggcgacggtgacattgtggcggtggacatcaaggagaagggctccgacacgtacgagcccctgaagcactcttggggtgccatctggaggaaggacagcgacaaaccgcttaagggacccctcaccgtccgcctcactaccgagggaggcaccaagaccgtctacgacgatgtcatccctgccaactggaaggccaacaccgcctacaccgccaaataattaactttagtgctaacaatactttaagccggactatgctagctatactagattgggttggatcccaagcaatgcattacacatgcatgcattggaccgtgatatctatttgctaccactaccctattacgacagtgatgctggcgccaacaataatggcgtcatcctccttctccatcttctccatctccatatatagctagagtgagacttcgctgttgtttaaaagagaagagttaagaaatggattgacaagttatataataagtgcctaatgaaatatttgataggccttcatttgttataaaaggatccatgaatgttgtgttgtccatgtatctcctacgtaatcctaactttatcatgcatggctacattttaatagaatacatattttttatgactaattgaaatatatgacagt

SEQ ID NO: 128848 - DNA, 1252 bp, Zea Mays
attcatcgtagcatagtacaattcactgatccaagataaaacatggttgtgaatgtgagcaccatgtggtcgttgatgcaggcacaggttgcgatggctgtggcgttggcgttcttggtgagcggtgcatggtgcggtcctcccaaagtccccctggcaagaacatcacggccacctatggcaaggactggctagacgctaaagcgacatggtatggcaagccgacgggtgccggtcccgacgacaacggcggaggctgcgggtacaaggacgtgaacaagccccccttcaatagcatgggcgcgtgcgggaacatccccatcttcaaggatggtctgggttgtgggtcctgcttcgagatcaagtgcgataagcttgtggagtgctccggcaagcccgtggtggtgcacatcacggatatgaactatgagcctatcgcggcgtaccacttcgatttggcaggcacgacgttcggcgccatggccaagaagggtgaggaggagaagctgcgcaaggcgggcatcatcgacatgcagttccgaagggtcaagtgcaagtacggctccaaggtcaccttccaccttgaaaaggggtgtggccccaactacctggcgctgctggtcaagtacgtcgacggcgacggtgacattgtggcggtggacatcaaggagaagggctccgacacgtacgagcccctgaagcactcctagggcgccatctggaggaaggacagtgacaaaccgcttaagggacccctttttcgtcagcctcactaccgagggaggcaccaagaccgtctacgacgatgtcatccctgccaactggaaggccaacaccgcctacatcgtcaaataattaactttagtgctgacaatactttaagccggcctatgctagctatactagattgggttggatcccaagcaatgcattacacatgcatgcattggaccgtgatatctatttgctaccactaccctattacgacagtgatgctggcgccaataataatggcgtcatcctccttctccatcttctccatctccatatatagctagagtgagactttgctgttgtttaaaagagaagagttaagaaatggattgacaagttatataataagtgcctaatgaaatatttgattggccttcatttttataaaaggatccatgaatgttgtgttgtccatgtatctcctacgtaatcctaactttatcatgcattgctacattttaatagaatacatattttt

SEQ ID NO: 128849 - DNA, 1352 bp, Zea Mays
gcgcgcttcacggttgcaagctcgatcgtccaaccgttggcacacacaaccataaattcaggcctacccgctcattcatcgtagcatagtaccattcactaacccaagacaaaacatggatgtgaatgtgagaaccatgtggtcgtcgatgcgggcacaggttgcgatggctgtggtgttggtgttcttggtgagcggcgcatggtgcggtcctcccaaagtccccccaggcaagaacatcacggccacctatggcaaggactggctggacgctaaagcgacatggtatggcaagccgacgggtgccggtcccgacgacaacggtggtggctgcgggtacaaggacgtgaacaagccccccttcaatagcatgggcgcatgcggcaacatccccatcttcaaggatggtctgggttgtgggtcctgcttcgagatcaagtgcgataagcctgtggagtgctccggcaagcccgtggtggtgcacatcacggacatgaactatgagcctatcgcggcgtaccacttcgatttagcaggcacggcgttcggcgccatggccaagaagggcgaggaggagaagctgcgcaaggcgggcatcatcgacatgcagttccgaagggttaagtgcaagtacgactccaaggtcaccttccaccttgaaaaggggtgcggccccaactacctggcactgctggtcaagtacgtcgacggcgacggtgacattgtggcagtggacgtcaaggagaagggctccgacacgtacgagcctctgaagcactcctggggcgccatctggaggaaggacagcgacaaaccgcttaagggacccctcaccgtccgcctcactaccgagggaggcaccaagtccgtctacgacgatgtcatccctgccaactggaaggccaacaccgcctacaccgccaaataattaactttagtgctgacaatactttaagccgacctatgctagctatactagattgggttggatcccaagcaatgcattacacatgcatgcattggaccgtgatatctatttgctaccactaccctattacgacagtgatgctggcgccaacaatgatggtgtcatcctccttctccatcttcttcatctccatatatagctagagtgagacttcgctgttgtttaaaagagaagagttaagaaatggattgacaagttatataataagtgcctaatgaaatatttgataggccttcattttttataaaaggatccatgaatgttgtgttgtccatgtatctcctacgtaatcctaactttatcatgcatggctacattttaatagaatacatattttttatgactaattgaaatatatgatagt

SEQ ID NO: 128850 - DNA, 705 bp, Zea Mays
atggctatggcgttggcgttcttggtgagcggcgcctggtgcggtcctcccaaggtcccccctggcaagaacatcacagccacctatggcaaggactggctggacgctaaagcgacatggtatggcaagccgacgggtgccggtcccgatgacaacggcggcggctgcgggtacaaggacgtgaacaagccccccttcaatagcatgggcgcgtgcggcaacatccccatcttcaaggatggtctgggttgtgggtcctgctttgagatcaagtgcgataagcctgtggagtgctccggcaagcccgtggtggcacggcgttcggtgccatgggccaagaatggcgaggaggagaagctgcgcaaggcgggcatcatcgacatgcagttccgaagggtcaagtgcaagtacggctccaaggtcaccttccaccttgaaaaggggtgcggccccaactacctggcgttgctagtcaactacgtcgacggcgacggtgacattgtggcggtggacgtcaaggaaaagggctccgacacgtacgagcccctcaagcactcctggggcgccatctggaggaaggacagcgacaaaccgcttaagggacccctcaccgtccgcctcactaccgagggaggcaccaagaccgtctacgacgatgtcatccctgccaactggaaggccaacaccgcctacaccgccaaataa

SEQ ID NO: 128851 - DNA, 707 bp, Zea Mays
ctgagatcctttgcagttccaccaccaagagctgcgtaggagtagctggcagcactgtccatgtgcagctgagacgatccccccatcgacgaggagaacggggaggagatattgccggacccgccaactcctcctccaccaccagtgctgccggcgatggccgggtagagagagtggttctggaagccgctgccgttggtggtggcggcggcggcggctgccaggggcggagcggcggagacggctgcggcggcgggcggttgggactggggcgcgagctgcgtttccacaggctttcttgaacggttgcggccgcggtgcatgtggcgctcgcagtacttggagtccggggcggcctccttggagcaccgccacttcttgccgtccgttcgccggcaccggccgggctccggatccagtttcctccccagccaagcaccccggacgcagtacaggaaggagatggagtctggcagggcgccgagaggagagggagggaaatgccgtacggagtcgaggccgcggcggattggaaccacgagatccggcggaacgggcacgcccgccaccaggtacttgtatatgagcgcctgctgctccagctcctggtactgcgccggcgtgaacggcaccaccggcctcgcggccggccacctcgcgctcgcctgggcgtcctcctcgcccagcccgccgcccctgcaccagca

SEQ ID NO: 128852 - DNA, 1532 bp, Zea Mays
ccttgaatagtttgattaaaaactagtattgtacaatttttcataacggagatagcacgaaactaggatttttcatttcacattttcagcaaattcacacggccacgtggggcatggatattcaagggacaaggggcaccacgttgtccatttccctgccggcacctctactttatcactaggctacgaaacagtgccgcggtgcgcgcacacacagccaccacagcccagacccctcgcctcggcctcttttaaatatcgcgcatcccggcgccgcaaatggctcacgcggcgctgctccattgctcccagtcctccaggagcctcgcagcctgccgccgcggcagccactaccgcgccccttcgcacgtcccgcgccactcccgccgtctccgacgcgccgtcgtcagcctgcgtccgatggcctcgtcgacggctcaggcccccgcgacggcgccgccgggtctgaaggagggcatcgcggggctgtacgacgagtcgtcggggctgtgggagaacatctggggcgaccacatgcaccacggcttctacgactcgagcgaggccgcctccatggccgatcaccgccgcgcccagatccgcatgatcgaggaggcgctcgccttcgccggtgtcccagcctcagatgatccagagaagacaccaaaaacaatagtcgatgtcggatgtggcattggtggtagctcaaggtacttggcgaagaaatacggagcgcagtgcactgggatcacgttgagccctgttcaagccgagagaggaaatgctctcgctgcagcgcaggggttgtcggatcaggttactctgcaagttgctgatgctctggagcaaccgtttcctgacgggcagttcgatctggtgtggtccatggagagtggcgagcacatgccggacaagagaaagtttgttagtgagctagcacgcgtggcggctcctggagggacaataatcatcgtgacatggtgccataggaacctggatccatccgaaacctcgctaaagcccgatgaactgagcctcctgaggaggatatgcgacgcgtactacctcccggactggtgctcaccttcagactatgtgaacattgccaagtcactgtctctcgaggatatcaagacagctgactggtcggagaacgtggccccgttttggcccgccgtgataaaatcagcgctaacatggaagggcttcacctctctgctgacgaccggatggaagacgatcagaggcgcgatggtgatgccgctaatgatccagggctacaagaaggggctcatcaaattcaccatcatcacctgtcgcaagcctggagccgcgtaggaggaggccaaggagcacaagttactagcacaggcacaggagtgccaagtgcaataatgtagatccgtggcaccatcgccgtctactcatctatactgcaccaaaatcaacattctcctaggacatgttaaataattttctgccactcgtcgagatatttcaaattcactgttccacacgcttccgttactgtc

SEQ ID NO: 128853 - DNA, 1464 bp, Zea Mays
ccttgaatagtttgattaaaaactagtattgtacaatttttcataacggagatagcacgaaactaggatttttcatttcacattttcagcaaattcacacggccacgtggggcatggatattcaagggacaaggggcaccacgttgtccatttccctgccggcacctctactttatcactaggctacgaaacagtgccgcggtgcgcgcacacacagccaccacagcccagacccctcgcctcggcctcttttaaatatcgcgcatcccggcgccgcaaatggctcacgcggcgctgctccattgctcccagtcctccaggagcctcgcagcctgccgccgcggcagccactaccgcgccccttcgcacgtcccgcgccactcccgccgtctccgacgcgccgtcgtcagcctgcgtccgatggcctcgtcgacggctcaggcccccgcgacggcgccgccgggtctgaaggagggcatcgcggggctgtacgacgagtcgtcggggctgtgggagaacatctggggcgaccacatgcaccacggcttctacgactcgagcgaggccgcctccatggccgatcaccgccgcgcccagatccgcatgatcgaggaggcgctcgccttcgccggtgtcccagcctcagatgatccagagaagacaccaaaaacaatagtcgatgtcggatgtggcattggtggtagctcaaggtacttggcgaagaaatacggagcgcagtgcactgggatcacgttgagccctgttcaagccgagagaggaaatgctctcgctgcagcgcaggggttgtcggatcaggttactctgcaagttgctgatgctctggagcaaccgtttcctgacgggcagttcgatctggtgtggtccatggagagtggcgagcacatgccggacaagagaaaggaacctggatccatccgaaacctcgctaaagcccgatgaactgagcctcctgaggaggatatgcgacgcgtactacctcccggactggtgctcaccttcagactatgtgaacattgccaagtcactgtctctcgaggatatcaagacagctgactggtcggagaacgtggccccgttttggcccgccgtgataaaatcagcgctaacatggaagggcttcacctctctgctgacgaccggatggaagacgatcagaggcgcgatggtgatgccgctaatgatccagggctacaagaaggggctcatcaaattcaccatcatcacctgtcgcaagcctggagccgcgtaggaggaggccaaggagcacaagttactagcacaggcacaggagtgccaagtgcaataatgtagatccgtggcaccatcgccgtctactcatctatactgcaccaaaatcaacattctcctaggacatgttaaataattttctgccactcgtcgagatatttcaaattcactgttccacacgcttccgttactgtc

SEQ ID NO: 128854 - DNA, 899 bp, Zea Mays
atgaaggaatctttttccatccatggcagcatcaaccagaaacttgtggaagcaaatgtatctttcattatcaaccatctcgtgtggatgagactatcgctagattcaaagtcaccaccttcagtctttgcgctaccaggccaatccttggaggtgacaagaatccttacccacgccggtgctgaactggtcgtcccccaactgataccgtctttagctgagagtcatcaggccaccgtcaagtctcctttgttatggagaactttggctgcactaatttcattaaccataaggaccacgtcaacctcatggggtgatgtcagtttactaagcaagattcttgctgcgcttgccacaggtgtgatagctattgttgtggcaaatccaactgatctcgtcaaagttaggttgcaagctgatggaaaggctaacactgtcaagaggagttattctggagccctcaatgatggactttgggatgtatacaatgactgcgccatgggaatgtgtgccgagcttcgtgctaacaatgatgccctcacaagagaagaacagtgcaatatatttgcatttttggtgtacgctgggggcggcaaccgggggcggaggtcggggaccggtgaatttggtagggcttttaagctttgaatgcatcgagaatttgtaactggtctggtactggcatggagcaggctgtgatggtttggttcggttgtctgacagaaactgtggcgtagcgaccgagtgagatagtgtagagcctagaggggagggcagatgcttcttttttagtctgagatggtggtgctacgaatttgtttagaaaaagttccaggcaacaccatatttgtatctctttttgtaaagcaaatgttttggatgcgaaacacaatgtttgg

SEQ ID NO: 128855 - DNA, 2651 bp, Zea Mays
gattaggctgctccgtgcagcgctgaccgttgagcagaaaaaggtgctgcccagtagattcgttcatggccaccgcccctccctgcgcctgcggcgctccgtccccatcgctgcgatgccctctagccctgccgctccccttcgctacctctcatcccgccgtccggctcgccgccccgccgcttctcgcgcgccgcctcgccgtgtctcctcgaagggcagcgtcagcgctggaagccctcgtgctggaatctgacgacgaggaagaggagtccgggataggcctgttccagggtgaggagtgggcagcgaccgccgacgagagggacgcggtaaggtcccccgagctggaggttttcgagctcgaagagctgccggagcagtggcgtcggtcgaggatcgcctggctctgcaaggagctccccgcttacaagcactccaccttcacccgcatccttaatgcccagcgaaagtggattaaccaggacgacgccacctacatcaccgtccactgcctccgcatccgccacaacgccgctgcattccgggtgtacagctggatggtacagcagcactggtaccgcttcaactttgcactagccacaagggtagccgattgtcttgccagagaaggcaaggttgaaaagtgccgagaggtgtttgatgcgatgatcaagcaaggacgagtaccggctgaatccaccttccacatactggtggttgcatatctcagtgttgctagggggggttgtcttgaggaggcatgcaccatctacaaccagatgatacagatgggtggctataagcctcgcctcagcctgcataattcactgttcagggcacttgtgagtaaaacaggaggcactgcaaagcacaatctcaggcaggctgagtttgtctaccacaatatagtcacaagtaaccttgaggtgcacaaggatatttatgcagggctcatctggctccacagctatcaagatgtcattgatagagacaggatcaaagctcttagggatgagatgaagcgagccgggtttgaggagagcactgatgtgctggtgtcactgatgagggccttctccaaggaaggagatattaaagaaactgaggcaacatggcattggcttcttcggagtggttgtgagcttcctgcccaagcttatatctgccgaatggagctttatgcacgcactggtgagccaatgaaatccctagaaatgttcaaggaaatgaagaaccggaacatccctcctaatgttgcatcatatcataagattattgagataatgacaaaagctagagagatagagattgcagaaaaactcatggatgagtttgttgaaagtgatatgaaacatctgatgccagcctttcttgacttgatgtatttgtatctggatctggatatgcatgagaaactggaacatactttcaccaaatgccttggccgatgccgtccaaatagaatattatacaccatttatatggaatcacttgtgaggattgggaatgtctcgaaggccgaggagatctttgatgagatgcataaaaatgggatgataggtactaatgctaagtctgccaacatcctgctcagaggctatcttttggcagagaactatcagaaagctgagagcatttatgagttaatgtgtaaaaaaaagtacgatataccagtggaatctttggagaaacttcagagtggcctcctcagtagtaagaaagttgtcaagccaccaaaacctgtgagcatgaagttggatgaagagcagcgtgagattctgattggcttgctccttggaggcactcagatagaatctcatgcacagaaaggggtctacatcgtcaattttaagttccaggaagattctcatgctcactcagctctaagggtgcatattcacgaacgtttcttcgaatggctgccttcagcatgcagatcactgaatagggagagcgagatcccttatcgattttcaaccatacctcatgcacatttcggtttctttgcagatcagttctttcagaaaggccagcctgttctcccaaaacttgtccacaggtggctttccccacgggttctggcatattggttcatgtctgggggcgtcagactgcaatcgggtgatattgttcttaaggtcagtggcggggacactggtggtgttgagagaattgtgaagtccttgcaagcacaacaatctttagcatgtaaagtgaagaggaaagggagattcttttggataggtttccagggatgtaatgccgactctttctggaaaatagtcgaaacttatgtactggacagttttgctagttccaccgaggaaagccacaatgtaggttctgatggcttgcaagactatacatattatgagagtgatacgcagaggcatggtagagaaagtgaggagtgaggatagactttgttcacaagttgtctacattactttcctactaacacctgtcgcccagattgatctatcacctttccagctgatcgtctgtggttgcagtattgtactatagacagtcgtgagcagagagagatatgagtagcttggtggattcccttgttattgtacctggatttgcacagatgttcagtttttgctgcccattagtttgttgggttccatgatttccagctg

SEQ ID NO: 128856 - DNA, 507 bp, Zea Mays
gggtcagcaaagaatttgccgccttcatgcacttcgacgttacctccaggaacgtgctttttcccccagaacgaggtgaaacagatacagacacctctgttcatcctcaacgcagcatatgattcatggcaggtaaggaacattttggtgccaggagtagctgaccctcatggaaaatggcatagctgtaagcatgatatagaccagtgctctgcatcgcagctacgggtattgcagggattcaggggtgattttctgaaggaagtggcagaactagggaactccgactcgagagggttgttcataaactcatgcttcgtgcactgccagtctgagatacaggagctatggttctcatctgactcccccgtgctcggaaacacaacagtagcaaacgctgttggcgactggttcttcgaccgcagctccttccagaagatagactgcccatacccttgtgactcgacctgtcacaatcggatctacgatgactcatcacaagcatag

SEQ ID NO: 128857 - DNA, 201 bp, Zea Mays
atgctgatctggtccatcagggaccgccggatgtgtcccggtggcgtctcggtgatgccggccaagtacacgtcagaggagaggtcgaacttcagcgtggtcatgggggtgttcggcttcttgatcaggtcatcctccagcagtatctccgccacgcgcgacaatatgctgaacgctaccccaacaagaaccctagcgtag

SEQ ID NO: 128858 - DNA, 1146 bp, Zea Mays
atgtgggctgacagcctctcgcctctcctcgacaccgaggctcccattcccatggcaaaaaatcggagtagttcttctaaagcagcacaacttataagctggtaccacgattgttggttggtctgtatgcatgcacgcttggaggtcgtggaggtgaatgagagggcgtcgtctggaagaggaaagtttggggaagcgcgcttggaggtcgacaccatagctccagcttcgtgcgaatgggttccaagccgctccatatctgcgcgtccaggttgtggcgacgatgatcgaggactagatccacgtccaggctgctgcggcgacggcggaggcctcaatccgggtctagaccaaggtcatggtggcgacgaaggtggaggccgaggtggagggcgatgcttccactctcagtcttggggtggggtcgtggggatgatagatgagagtggggtgcggtggtggctcgtcgacatcagccattggcacccttcccttgcccagtttgacgatgcaccctccctcctactacttcacgatggcaccaccatctccaggtaccgtgccgatggaggaaaggagaaacaaggtattttgaagtcatctcttactgaattggattggggctttggaaagcttaaagcaatgcttacattaggttatgattgtgctaacattgatgaagatcaaccagcagatgaaataaatgctaagattgaggattatgagaagtatttaatacagctaagcaaactaactaaggtaaaccttttgaggcatgccaaacgcaatgtagcaagagacttccagataaaagataaatctgggggacaacaggaagatgatcacattctagacaatgctgcagcatctgataacgagactgataaggacgcaatgggtccaaatgcaccagttgaatcatgtgctgacgatgctcaaaaatcatacactgacgacaatgcatcatgtgaaagtgagcatgatgaggatgcagggggtccaaacactccagcagaagcagatgctgatgaaaccattaggtctagcattccatatggtagaccagtccaggagtttgaatctgagagagaagaggaagaattattagcacagacgaagagggctaagacaaaacaagtcgtgtag

SEQ ID NO: 128859 - DNA, 1347 bp, Zea Mays
tcggagcctctccttttaccgattccctcttcttcttcctccagtccccgcacccctctccccgccttcgattacgccacgataaaatagctaaactactagcatgcgagtgggcgtgtccatgtgattgttcagcgtccagcagagcagacagcccgcgcgcggaattgaattactagtcggattaggtgggcaaccacggagttgagcgcgcgatggagaaggggagcagcgggccgtcctgccgcgccgccatctgtggcatcgtcgtgctcctctgcgccgtcgccttctcctgctccctcgccgcggaattccgcaaggtcaaggagaaggacatgaagctggacggcagcctctgctcgctgcccaggagctccgcgttcgagctgggcgtcgccgccatcgccttcctcttcgtggcgcagctcgtgggcaccacggcggcggtgagcaccgcgtgcgccgccgagcccaagaagaggcagagctccgccgcccgagggcgcgtcgcgttcgtcgccctcctggccctctcatggctgagcttcgcggtggccgtggtcctgctggcgacggccgcgagcatgaaccacgggcagcggtacgggcgcgggtggctggacggcgactgctacgtcgccaggagcggcgtgttcggcggcgcggcggccctggtcgtcgtcacggcgctcatcaccctcggcctcaccttcgcgaccgaatcggccgcgggggccatggcgacaacgcccgcgtcgtcaccggcgacgcgcgcgaggatacgtgtcgacgcggcgtcggcggacgcggaacaaccgggcgggcgatccaggcaatgaggcaagcaggcaggcaggctggcagtggcaggggcgcggcgcggggcgggccaaccggaggcggcgggtgagcggcaacgctcgttccggctgcaaaaggccacgcccgcgtggacaacggaaagtggcaggcgctcgccgccggacccgacgggtgggaccgcgggggggcggatggattatggatataccgctggttggttggatatttagcagccgcgacagagggtacatacattaccgtttactgtcctcttactgacacgatcgtctaacatgtaaatgacgctaagcgatcattgcaaaaaaaaaaattgcaaagataaaccatacggaaattaccactttgttacagctgagtgttgagtgtttgtgtgcatgtgcaccaacctggtgctagtggtggtggggaatgggcatgttcagcctggcgccttgattggatgacctggacactgtactgtgattggtgacaataatactacattgaaaatttgaaatgatc

SEQ ID NO: 128860 - DNA, 1279 bp, Zea Mays
cacgagaattgaagtgggcggcggttcggcaaagggcaagggacggcgaccgcccaccggaggcggagacagatcgagatcggcgggggatggcggcgcgggaacgggacggtgaagggaggcgggcgcacttgacgatggttggcgtgcagctcgtctacgccgggtaccacgtcatcgctaagcaggcgctcaatgttggggtcaaccgcgtcgtcttctgcgtcttccgggacctcctcgccctctccgtcctcgcgccgctcgccttcttccagcaccgcatctcgtccgtgcaggcgcgtccgccgcctctcacccggcgcctcgtcggctcattcttccttctcgggctcactgggctccaattttggtgaaatatccttcaagtctgtcactgactgcatactcatacttctttggagtggttttaatggtcatttctggggtttttgcaacaaacgataaacacgattggagtttgactcaatccgaggttgctgctgttgtatatgctggtgtcatggcatctgctcttaattatgtcctattgacatggtccaacaaaatactgggacctgctatggtagcactttatagccctcttcagccagtggtctctgctctattgtctatgatttttctgggaagcccaatttaccttggaagtatttttggaggacttctaatcatcttcggtttataccttgtgacctgggcacgccacagagaaaaactggcaagtattggagtaccttatgtaacatgtgtatcggagtcactcgatggtccttctcatgttgcaaagactgtgcccttcatatctctttcaaggctgtgggatgtgccacatgagtcttgagaacttggaggtgtttgatctatacaacctttaggtacccctcttactaaaactatggatacagaaaacacacataaaaaagggaaatgccacagaaaataatattgatttatcttgtaaaattgtagtctgcccttctaggagcagttgggttagtcactagagagatttgacaggctaggtttatgtccgttggttttgtgagacttaacaactctgatgttgttggacggacctgacaccaaacgcaatgtgagctccactggggaaccgaagaaaaacagcatgcatattctgttaattcccacgtatacagacataaatttgtagctatacaccgacatcgattcaaagagcagtaactctgcatatctgttagtgcctgcggcttgtataatattgtccacattttgcacc

SEQ ID NO: 128861 - DNA, 1569 bp, Zea Mays
cacgagaattgaagtgggcggcggttcggcaaagggcaagggacggcgaccgcccaccggaggcggagacagatcgagatcggcgggggatggcggcgcgggaacgggacggtgaagggaggcgggcgcacttgacgatggttggcgtgcagctcgtctacgccgggtaccacgtcatcgctaagcaggcgctcaatgttggggtcaaccgcgtcgtcttctgcgtcttccgggacctcctcgccctctccgtcctcgcgccgctcgccttcttccagcaccgcatctcgtccgtgcaggcgcgtccgccgcctctcacccggcgcctcgtcggctcattcttccttctcgggctcactgggctccaattttggtgaaatatccttcaagtctgtcactgactgcatactcatacttctttggagtggttttaatggtcatttctggggtttttgcaacaaacgataaacacgattggagtttgactcaatccgaggttgctgctgttgtatatgctgtaagttttcaattatttactgttcttatgtcttcctagtgtgtcattttgaatattacgttcttgcatcaaatacatattccatcttatacatgtgatagcttacctgttagtacattgtactgatgcactggagtaagatccgtgcatgtaactatgaatttgaaattctgtatctatgccgcgtatggagactatggctgcaccttgcactagtcttgtacgccatgaattaagtagttgatgcatgccttttgctagtcaaactccatttttttctcttattccagggtgtcatggcatctgctcttaattatgtcctattgacatggtccaacaaaatactgggacctgctatggtagcactttatagccctcttcagccagtggtctctgctctattgtctatgatttttctgggaagcccaatttaccttggaagtatttttggaggacttctaatcatcttcggtttataccttgtgacctgggcacgccacagagaaaaactggcaagtattggagtaccttatgtaacatgtgtatcggagtcactcgatggtccttctcatgttgcaaagactgtgcccttcatatctctttcaaggctgtgggatgtgccacatgagtcttgagaacttggaggtgtttgatctatacaacctttaggtacccctcttactaaaactatggatacagaaaacacacataaaaaagggaaatgccacagaaaataatattgatttatcttgtaaaattgtagtctgcccttctaggagcagttgggttagtcactagagagatttgacaggctaggtttatgtccgttggttttgtgagacttaacaactctgatgttgttggacggacctgacaccaaacgcaatgtgagctccactggggaaccgaagaaaaacagcatgcatattctgttaattcccacgtatacagacataaatttgtagctatacaccgacatcgattcaaagagcagtaactctgcatatctgttagtgcctgcggcttgtataatattgtccacattttgcacc

SEQ ID NO: 128862 - DNA, 1551 bp, Zea Mays
cccaccggaggcggagacagatcgagatcggcgggggatggcggcgcgggaacgggacggtgaagggaggcgggcgcacttgacgatggttggcgtgcagctcgtctacgccgggtaccacgtcatcgctaagcaggcgctcaatgttggggtcaaccgcgtcgtcttctgcgtcttccgggacctcctcgccctctccgtcctcgcgccgctcgccttcttccagcaccgcatctcgtccgtgcaggcgcgtccgccgcctctcacccggcgcctcgtcggctcattcttccttctcgggctcactggcgtctttgggaaccagctgctgttcttgcttggcctcagctacactaaccccacctacgcggccgccattcagccgtctattcctgccttcaccttcatcctagcccttatcatggggaccgaaacggtgagcttgatctcaaacgagggcagagccaagataggtggcacagtcgtttgtgtgctgggagccgttctcatggtgctctatagaggcccagctgtgtttggtagcagcgagcttgagcttgatgtttatagtcatggtgttatagctgacatgacacagcctgagcctgccggacctctaatatctttgttcatggcctttgggctggaaaactggcacattggagtgctgtgcttgatagggaactgtctatgtatggctacttatcttgctttacaggctccaattttggtgaaatatccttcaagtctgtcactgactgcatactcatacttctttggagtggttttaatggtcatttctggggtttttgcaacaaacgataaacacgattggagtttgactcaatccgaggttgctgctgttgtatatgctggtgtcatggcatctgctcttaattatgtcctattgacatggtccaacaaaatactgggacctgctatggtagcactttatagccctcttcagccagtggtctctgctctattgtctatgatttttctgggaagcccaatttaccttggaagtatttttggaggacttctaatcatcttcggtttataccttgtgacctgggcacgccacagagaaaaactggcaagtattggagtaccttatgtaacatgtgtatcggagtcactcgatggtccttctcatgttgcaaagactgtgcccttcatatctctttcaaggctgtgggatgtgccacatgagtcttgagaacttggaggtgtttgatctatacaacctttaggtacccctcttactaaaactatggatacagaaaacacacataaaaaagggaaatgccacagaaaataatattgatttatcttgtaaaattgtagtctgcccttctaggagcagttgggttagtcactagagagatttgacaggctaggtttatgtccgttggttttgtgagacttaacaactctgatgttgttggacggacctgacaccaaacgcaatgtgagctccactggggaaccgaagaaaaacagcatgcatattctgttaattcccacgtatacagacataaatttgtagct

SEQ ID NO: 128863 - DNA, 1391 bp, Zea Mays
gtgccctccgtcctcacagcttctcctccagtcatcccggtcccggccgcggccattttctatcccgtcaaccacatcagggcaacctgccaaacaccgcgattgcgcaatccgtccaaaccccgtcaacttcctgattccctctcccggagccatcgagatgctctcttcctccgttagttcagctaccgccgcgctgtctcgcgggtcgccgccgctccaagaagcatgccccgcctattgcttccatctccatcgcctcgcccctgtctgaacgactcggtgcgccgtccaccactctccaaatatcggttcttcctgcccaggactcggaggcggccaagtccgcggcttggcgtgcgaatggcagagatgaccaaggttgggagcgccggggaaccggccgaggttggggtttccatggagagtgacccgattgtgggaggggaggcgccgtcccgcccggggtgggaagcgagccggtgggcgcccgtggaggctgcgctgaatcggatgagtaaatggctggtggctggttctcttgcttttgcagctatttggaagcgtgatgctgaaattatgtggtttttgctgggtgcggttggcaactctctgctttcgatggttcttaaaaagatgctaaaccatgaaagacccgcaccagctttgcggtctggccctgggatgccatcgtcccatgcacagtccatattctatgctgcgaccatcctggctctttcattgtactactggcttgggacaaattatctgaccatgattcttgggcctgcaactctgtcggtggctgcctatctgtcttggctacgggtgtctcggcgccttcatacactaaaccaggtcatggcgggagctgttgtaggatctgtcgtcggtgctctatggtttgtgctctggcattcgcttgtgcaggaggcttttgcttcttctctgctggtcaggattgcagtcgttcttggatcatcagcattttgtgttggctttgtcatctacatgattcgtcactggctcaaggatgagtaatgtacttcttagccgcaatgggagatcgactgataggcacggtgcgtttggatgagtgaatccgttccaattgttatcagaatcgcttgaaatggtgtcaaatgggttgtgagtggagcgattcacgagtgaaaccatttttaattaaaattcaatctagtagttaaatgatttcacgaagtgattctagttcgtgatcagaaacatttcaagaatttagatccaaaatgtttctatacccatcatggtgcaaagacctctaaacgcacatttgatttctgttgtgaattagacctttttatttaacactgaaggaaagttaaagcatggattcttgtggtaccgaataa

SEQ ID NO: 128864 - DNA, 1577 bp, Zea Mays
tggctgcttgaaaaaacagctgtgctagttggctattcgtgactgcccgccaacacctcgcctaaccctagactaacctgattccgcctagcaacaaatccgtatcccgactccggcgaaggcactacccgagttcacttcacactcgtgcacccatccgggtcactggctcactgacaccgcgccccaatcacgcgcgcgccacccgcgatgatggcggcggcggcgatctccggctccagcggccacctcgtcgtctcctccccccgcttcaggcagccgctcacgctcccttctcgcagcggtcgcccaatcgccgccgccgcctcggccgtggcccgcggcggggtcgcggtcgccgccgtgtccagccccgctgtgtcggccgtcgcggggaaggatgccaaacaggctcctaaggatttccttcatatcaatgattttgacaaggatacaataatgaatatccttaatcgagcgatcgaggttaaggcagcgataaagtctggagacaggagcttccaaccattcaatgggaaatcaatggcgatgatttttgccaagccatcaatgaggacccgtgtttcatttgaggcgggattcttcttacttggtgggcatgctatttatttgggtccagatgatatccagatgggcaagcgtgaggagactcgtgatgttgctcgagtactttctggctataatgatatcattatggccagggtctttgctcatcaggatattctggacttggcaaaatatgcagctgtacctgtcataaatggtctcaccgactataaccatccatgccagataatggctgatgcacttactatgcttgagcacgttggtcgcattgagaacactaaggttgtctatgttggagatgggaacaacattgtgcactcgtggcttctattggctgctgtacttccttttcactttgtatgtgcttgtcccaagggatttgagcccgatgcaaagacagtggagatcgccaggagtgctggaatcagtaagattgaaataacaaacgatcccagggaagcagttaagggagcagatgttgtgtatacagatgtttgggccagcatgggccaaaaggaagaagctgattatagaaaacagaagttccagggattcacggtggatgaagccctgatggagattgctggcccacaggcctaccttatgcactgtttgcccgcagagagaggagtggaggtgaccgacggtgccatcgaggctccaaattcaatcgtgttcccccaggctgagaacagaatgcacgctcagaacgccatcatgcttcacgttctcggtgcttaaccctcctattgcacaccagtgtttaacttttcttgaatttgcttagggattgaggcagttttggctttagggcatatgtgagagcttaattcagcgaactgttcagtaacgtggtaactgttcttcagggtgggagtttgttgtactggaaaagtttggcaacctgaataaaaaataatcttttgtgctggttttactgagcagcagggattacattttcgttttgtatttttgaatactgttttgtt

SEQ ID NO: 128865 - DNA, 1268 bp, Zea Mays
cgtgcacccatccgggtcactggctcactgacaccgcgccccaatcacgcgcgcgccgcctcggccgtggcccgcggcggggtcgcggtcgccgccgtgtccagccccgctgtgtcggccgtcgcggggaaggatgccaaacaggctcctaaggatttccttcatatcaatgattttgacaaggatacaataatgaatatccttaatcgagcgatcgaggttaaggcagcgataaagtctggagacaggagcttccaaccattcaatgggaaatcaatggcgatgatttttgccaagccatcaatgaggacccgtgtttcatttgaggcgggattcttcttacttggtgggcatgctatttatttgggtccagatgatatccagatgggcaagcgtgaggagactcgtgatgttgctcgagtactttctggctataatgatatcattatggccagggtctttgctcatcaggatattctggacttggcaaaatatgcagctgtacctgtcataaatggtctcaccgactataaccatccatgccagataatggctgatgcacttactatgcttgagcacgttggtcgcattgagaacactaaggttgtctatgttggagatgggaacaacattgtgcactcgtggcttctattggctgctgtacttccttttcactttgtatgtgcttgtcccaagggatttgagcccgatgcaaagacagtggagatcgccaggagtgctggaatcagtaagattgaaataacaaacgatcccagggaagcagttaagggagcagatgttgtgtatacagatgtttgggccagcatgggccaaaaggaagaagctgattatagaaaacagaagttccagggattcacggtggatgaagccctgatggagattgctggcccacaggcctaccttatgcactgtttgcccgcagagagaggagtggaggtgaccgacggtgccatcgaggctccaaattcaatcgtgttcccccaggctgagaacagaatgcacgctcagaacgccatcatgcttcacgttctcggtgcttaaccctcctattgcacaccagtgtttaacttttcttgaatttgcttagggattgaggcagttttggctttagggcatatgtgagagcttaattcagcgaactgttcagtaacgtggtaactgttcttcagggtgggagtttgttgtactggaaaagtttggcaacctgaataaaaaataatcttttgtgctggttttactgagcagca

SEQ ID NO: 128866 - DNA, 1374 bp, Zea Mays
ctctcgtaccaaaaaaaaaaaaaatcgtgctcggcacacgcaggcggctctcagcgacggaggggcagacgccagacgggcagtcccaggttcggcgtcgtcgtcagcggctccccctcctgccagtcgcctcgcgccttcgcctccggtcctccgcacacctgctggctgccggcgactctgcgtgcgcgcctcccgcttcccttccgcctccgctggaccgtcgactgcgccctgcgccagcggccgctgctccaccaaggcggtcgcgccgctttgggaacgcttatgccccaaactgaagcgttacccgcttagcgctgaagcgtgcgcttagtgcagccttttggaaccctggatctgccagtacctgtactgggtccgctcttgcgcgaaccctactgtttggctattcgtatccagaattccagatctgatataattactacgctcgctacatcaacatgaggctcaataaggtggaagtgaaccttataaggctgttggaggctgctccacggcagcaaaatcaggctaaacttgtctattatgtaaccacagcgcgggagctgttggagcagctaggagctgagacaacaccagaagggatatcaagcatttcaaaagctaagctttctgagtattcagaaaagattgaagcacttgcttccaggcttgctgcttcagtgcctgaaaatgaaaagccgattattgaaagcaaagatgaaatctcttatgaagaagcaaagccagaaagtccaatatctttatcatcaggactgcgaaggagatcaacagcccatgctgtggttggaacaagccatcaggaaaataaagaagatatcggagcaccgataaaattggatgcagaagctcaggctcacattgagaagcataggaagctccaagaagatttgactgatgaaatggtcgagttagcacgtcaactgaaggaaagtagcctaatgatgaaccaatccgtgcaggagacagagaagatccttgattctaccgagagggccgtggagcacagcctggcaagcacaggccacgcaacctcgcgagctgcggaggtctactcgctggcttccaagactacgtgcttccagtggctgctaatgtttgtgatgacctgcatgtttgtaatggtggttctgctgataaggatcacttgaatgatgaggctgtagcaggcactcaaatcgtagtcacccttgtctttgtttcatgggaattctttgtggtcaggtcatggtatttttccgagcaagtgtccccaaccaaacaagcctgctgtatgagagagaaactggaacagctgcctgtacagaggcttggtggtcgctgttttattggtcaggcctgagagactcc

SEQ ID NO: 128867 - DNA, 763 bp, Zea Mays
tttttttaatctgaacctttacctcttataccttttagattggatagactatcagttaatactatattcttgttgcagcctgaaaatgaaaagccgattattgaaagcaaagatgaaatctcttatgaagaagcaaagccagaaagtccaatatctttatcatcaggactgcgaaggagatcaacagcccatgctgtggttggaacaagccatcaggaaaataaagaagatatcggagcaccgataaaattggatgcagaagctcaggctcacattgagaagcataggaagctccaagaagatttgactgatgaaatggtcgagttagcacgtcaactgaaggaaagtagcctaatgatgaaccaatccgtgcaggagacagagaagatccttgattctaccgagagggccgtggagcacagcctggcaagcacaggccacgcaacctcgcgagctgcggaggtctactcgctggcttccaagactacgtgcttccagtggctgctaatgtttgtgatgacctgcatgtttgtaatggtggttctgctgataaggatcacttgaatgatgaggctgtagcaggcactcaaatcgtagtcacccttgtctttgtttcatgggaattctttgtggtcaggtcatggtatttttccgagcaagtgtccccaaccaaacaagcctgctgtatgagagagaaactggaacagctgcctgtacagaggcttggtggtcgctgttttattggtcaggcctgagagactcc

SEQ ID NO: 128868 - DNA, 1446 bp, Zea Mays
ggaaagagaacaaaagtgccccaccccacaccgtgcttaaaaaatttatataaatcgcccaaacttttctcggacccttttatccttcgccctaacacagaccaggaggacacaggcccacagaattcacaagaggggaagtatagagagagggaggagcggcaccggagcctggaggggagatttcgtttggcgcactagggagtggagagcgatagagttggaaggtggaatcagaaatccacggcgaatacagggagtaggggggatctggagctcctgaggagtagtagtaggtaggagctgtaattgtaacggttggcatagggggatcctctcgatctgttcttgagctggaagactcccatcttttgagccgcggagctggagaaacttggatctcgaggccctccaagagaaaccgtttctcgctgctaccctcctgcattgctgcctctcccccctcacacccgacctgccacaaggagaagggtggaatctctgctcgccttctccactaatcggctcagaatctgggttccttgacctgttcttgggagcgccgtgcctcaaatctttaggggggaaaaaggtcgattttttttttgtgtgtgtgttgggtagatgcgggagtgatgtcgactactttatgagctgccccctcccctgctactttgggggtttagattcgctatagttatggcggatctcgccatggaccattaggagttccatttcgtcgaaggcgaaaggagcttgcccgtaagctgcaatgtctctcaagagcatcgttcgggagctgaaggagatgagggacggcatcgggagcatgtcgagacgcggcggcagcggctccgacggccgcgccgccggccacgcccgctcggggtcgcggcattcctggcctagcctgtgggcggagcagcaacagccgcagcggcagggccagggccagggcctgggtcaggaggggccgcggcatcagcaccaggggcggtgggcggacctgcctccggaactgctgctggatgtgatacagagggtggagtccagcgaggcgacgtggccggcgcggcgccaggtcgtggcgtgcgccgctgtttgccggtcgtggcgcgaggtcaccaaggatgtggtgaagacgctcgaggagtgcggcagaatcaccttccccatatcccttaagcagcccgggcctcgcgaactgccggtacagtgttttgtgaggagggagagggcgacatccacatatctactctacctagggctcagcccatgtaagttatcatgttcgtctgtccaaggatagagttcttgttcagttgttcttatctcttttgtagccatttgtctgcatcgagatgaactgtgttagtatggctacattgtccaactgccaagttgtaagaacaaaatcttgaataaacgtgtcctttgcaatgatca

SEQ ID NO: 128869 - DNA, 2359 bp, Zea Mays
ggaaagagaacaaaagtgccccaccccacaccgtgcttaaaaaatttatataaatcgcccaaacttttctcggacccttttatccttcgccctaacacagaccaggaggacacaggcccacagaattcacaagaggggaagtatagagagagggaggagcggcaccggagcctggaggggagatttcgtttggcgcactagggagtggagagcgatagagttggaaggtggaatcagaaatccacggcgaatacagggagtaggggggatctggagctcctgaggagtagtagtaggtaggagctgtaattgtaacggttggcatagggggatcctctcgatctgttcttgagctggaagactcccatcttttgagccgcggagctggagaaacttggatctcgaggccctccaagagaaaccgtttctcgctgctaccctcctgcattgctgcctctcccccctcacacccgacctgccacaaggagaagggtggaatctctgctcgccttctccactaatcggctcagaatctgggttccttgacctgttcttgggagcgccgtgcctcaaatctttaggggggaaaaaggtcgattttttttttgtgtgtgtgttgggtagatgcgggagtgatgtcgactactttatgagctgccccctcccctgctactttgggggtttagattcgctatagttatggcggatctcgccatggaccattaggagttccatttcgtcgaaggcgaaaggagcttgcccgtaagctgcaatgtctctcaagagcatcgttcgggagctgaaggagatgagggacggcatcgggagcatgtcgagacgcggcggcagcggctccgacggccgcgccgccggccacgcccgctcggggtcgcggcattcctggcctagcctgtgggcggagcagcaacagccgcagcggcagggccagggccagggcctgggtcaggaggggccgcggcatcagcaccaggggcggtgggcggacctgcctccggaactgctgctggatgtgatacagagggtggagtccagcgaggcgacgtggccggcgcggcgccaggtcgtggcgtgcgccgctgtttgccggtcgtggcgcgaggtcaccaaggatgtggtgaagacgctcgaggagtgcggcagaatcaccttccccatatcccttaagcagcccgggcctcgcgaactgccggtacagtgttttgtgaggagggagagggcgacatccacatatctactctacctagggctcagcccatctatgaatgtggaaaacgacaagctattgcttgcagctcgtaaggtcaggcgtgccactcggacttctttcgtgatctcactggtctctgatgatttctctcgctccagtagcacctacgtcggcaagctgaagccgaacttcctcggcacaaagttcacgatattcgacagccagccgcctcccgacgctgttgcgctaccaaacaacagaccgagcaaaaggcagtcgaagcaagtgtcaccgagactgccactaggcaactacaacgtcgccacggtcacgtatgagctcaccgtcctgcgcaacagggggccaaggagaatgcagtgcaccatgcactcgataccagccgagtgcatccaggagggcgggaaggccccaacccctaccggcaccgtccagtcgcttgacgagccagtgcccaccttacctagtaccaccaaggggaaggaagtggctgtacaattttcttcgacgagcctcagcgccgatctgtctggaccggtttctgggaacgaagcgcctctagttctgaagaacaaagccccgcgctggcacgagcagctgcagtgctggtgcctcaacttccgggggcgtgtcaccgtcgcttcggtgaagaacttccagctcgtcgcgtcagttgacccttccctaaacgtccccgcagcggagcaggagaaggtgatcctccagttcgggaagatcgggaaggatatattcaccatggactaccggtacccactctcggcgttccaggccttcgcgatctgcctgaccagcttcgacaccaagccagcgtgcgaataactgaaggtagcataaaagctggggtgggtatgttcgtcctgggcgacgtgaatttcttgatcttgccacatcggagcctgtgcccaggcgaaatggtcgcttgtgatgggggtgtgaagatgagctatggcatttgtaccataggaacagatttgaacgacctggactgttatatgtatcgttgttgggatgcctggctgtgaaatatcactgccgcatcgtatcgataatggtcgttgtggctatcttgctcgctcgtttctgcgatcgttt

SEQ ID NO: 128870 - DNA, 1021 bp, Zea Mays
taacgcctactatacggaaccccgtcgggaattaatgcgcccgtcctcgccagtcgccacgaccgcagcaatccgccgcccttggccgtgccccgtgctgccgtactcgtaatccgtgagggaaagcgtccgcgctccgggccccgccgccgatagttccttcaagggagcgacgagcgcgcggtcgatggagacggtggaggaggacgtggaggagtacagctggcgggaggtggtgctgccgcacctcgtccccgtggttcccggcgcgcaaccggagctcgagcgggagaccggggagcggcgccgcggcagggacctcctcgtcgccgtcgacttcggcccgaactccaagcacgcctttgactgggcgctcgggcacatcgcgcgcatggccgacacggtccacctcgtccatgccgtctccagtgtgcaaaatgagattgtgtatgataaaagtcgggagctcatggaggatttagcagtcgaggcattcaagacgttactggtccggaccaaggccagaattgttgaaggagacgctggaaaagttatttgccgagaagcagatcgactgaagcctgccgctgtcattcttggtacacgtggtagaggccttattcaaagtgtgttgcagggaagtgtcagtgagtattgcttccacaactgtaaagcagccccaattatcattgtgcctgggaaagaagctggtgaacagtctgtgctttgaaggaagatgagtaggagagttgttcctgttcgttgtactgtcagtttaggtgataaagtgttgtatattggtgctggtttgttgtgggaacatgtccttaagtgctttgctttgcttgtaatctgaagctctgaaccctctgtctggcttggttatgaaggaatgcttagaaaccgggagagtagcagacaaacatataacacaagaaatgtacttgtattgccattgctgacagaatacttcattagtacagttgatatgaataaagaatcttcagccacaagttttttt

SEQ ID NO: 128871 - DNA, 361 bp, Zea Mays
gcatcattctttacctcctaggccacagatcatttatcattttgctctctctctctcttttcccccctgtgaggttccctgcctttaagagctcacatcctcgttcagaatccaatctttcatatgcaatgttagatgattcttcttctattattatgttatgacatcacggtcacatacattccatgcttattcctagagaaatacacacttgttcggcgaaatctgtattttcagtctttttgagagtatcagaatatcaggaaaacaggatataccatttctcacatccttctctttgcatccgaatgctgctgcctgccttttggttaagttcatttgaccataacttttgatgttt

SEQ ID NO: 128872 - DNA, 291 bp, Zea Mays
atgggttcgtcctggaccgagagtcaaaacaatctcttcgagcgtgcgctggcagtatatgacaaggacacaccagaccgctggcacaacgttgcgcgggcagtcggctgcggcaagacagccgaggacgtgaagaggcactacaagtacctgaagacggacgtgaagcacatcgaaaccgaagaaggcggccgaggatcccagtccagcagccctgctggtgctggtgctggtggcagtggaagcagcagcagcagttcttggggcagggacaacggtgacaagaggtag

SEQ ID NO: 128873 - DNA, 2229 bp, Zea Mays
ggtttagccagaaactagcggagaaccccttcgcggcgcagctcctttcttcctcctcggccctcgcgtctcttttcccagtcgacgcaccgccaaaagccctgggtagggtgactgggtgtctgggtctctacgcctccctcgtcatgctgcgccgcctccgtctgcgctcgccggtgtgcgctgtcgccggcgcggccgctgcaatggcgtcgctcaccaacgtcgcctacgccgatggcctcttccgccgccagtccccgccgtcgaatccaggcgacgaggacaatttgggagcctccgcgttcggccgcgacccggagaccctggagcgcatggctcgagcgctgcgggagatcaacaactcaccgctcgccaagcaggtgtttggactgatgcggaagcaggaggaaacacgccttactgagctggaggccgagaaggtccaatacgccatctacgagaagctcagggacatggaaaggatggagaaaaaagctgaagattacagaaatagtttgcaacaagaagcacaagtaaaagctcaagcattacgctttgaggatgaattagctagaaaaagaatgcagacagagcatgctgcacagaggcaacaggatgctgaacttgtgaagatgcaagaggcatctgccctcagaagagaagaagctaggcgtgcaacagaacagaagattttggaagaaatgatacggactgagaaggaaaaggctgaaatagatcaggaagtaaacagagctaaagctttagcagaagcagaagctcgtgttcatgaagagaagcaatcagaagaagttacaaaaagaatgatgttggaacgtatgaagggtgaaaaggaaaagtggctcgctgcaataaatacaaccttttcacacattgaaggtggattcaaagcactgttaactgataggagcaaactaataatgggtattggaggagttactgcactggccgctggagtctatactactagggaaggtgcgagggttacatggagttacatcaataggatcttgggtcagccttcactgatccgtgaatcatcaatgccaaagttcccactaccaatgtctaggttactcaaaccaagctcagcatctttgtcggggggagcaggctttgagaatgtgattctgcacccttcactcaagcggaggattgaacatcttgcacgagcaactgcaaatacaaagtctcatggtgcaccattccgcaacatgctgttttatggtcctcctggaactggcaaaactttagtagccagggagatggctcgcaaatctggcctggattatgccatgatgacgggaggagatgttgcacccttaggatcagaggctgttaccaagatccatcaaatatttgactgggctaagaagtccaagaaaggcatgctggttttcattgatgaagctgatgcattcttgtgcgagcgtaacagtacccatatgagcgaagctcagcggagtgctctcaatgcattgttgtttcgaactggcgaccagtccagggatattgtccttgtcctggcaacaaacagaccgggtgaccttgatgctgctatcactgaccgcattgatgaagtcatagagttccccttgcccggggaggaggagaggtttcaactgctcaagctatacttgcaccaatatatactcaaggaagagggcaaaggatcttggggtgcattattcaagaagcagcagcggaagattcaggtgaatggcataagcgacgatttgctcagggaagctgcaaggaggatcgatggcttctctggcagggagattgcaaagcttgtggctagcgtgcaagctgctgtttatggccggcctggctgcacattggatccccagttattttcggaggtagttgactacaaagttactgagcatcaccaacgcatcatgcttgcttctgagggtatggcttgatcaataagaaatattttacctggaagccacaggtttcaagctatcaaagatcgggtttggtgatgagcgacaaaactgacaatcacctcccactgacttgtagtcatgttttggatcccgtgggactttttgtaggcggaggttctatttccagaatttttgttccatgtgccttgcctgaagcaaggtctggtcccggatggacatccaaataggctggttgtggtcaactgagtttagtttaactcatttagtaggtttgcgctgtgttttaact

SEQ ID NO: 128874 - DNA, 242 bp, Zea Mays
ttttttttttttggtttccctggcggctgctgctgctctatcattttgtatatgttgttatgcttgtgctggtgacataaaacgactaaacgagatgagacgtcgttaccagtaaggcaacaacgcacctttcctcctttagcacatcagagatcagacacaacgatgtttgaatagctcgggttcaagcctccatctgccgacaattcacatgtcatcattcaccctgctgcataccccat

SEQ ID NO: 128875 - DNA, 190 bp, Zea Mays
gaagcagctcaagtaaaattggccctcacaaaaggctgcaaaagcccttaagaaaggggttccggctgcaagacagcagaagaggacagaaagcaactgctagctgcgagatagtaggcttagaagccaggaaccctgctttaatgacccctcctaatcgtactttgcacgcctaagtacattcccctcc

SEQ ID NO: 128876 - DNA, 516 bp, Zea Mays
gttgatatggcaaacagctcactgaaaaacagatttgaagaactccagacattcaatagtatatttgggtttttatttagctcgacaacattgaagtcgctatgtgatattgaactagaagcctgttgcatcaaatttgcaaaaatattctcttcacatgatacttttgatgttgaggtaaatgacctactatccgagttgaaggtcttgaagctaagtttacccgaaagaccaatgtcttctatggagatctttgagtatgttcggcaaatggattcgtatccaaatatttcaattgcttaccggatattatttattgtgcctgtaactgttgcatcagctgagagaagctattcaaagttgaaattgttgaagaactatttaaggtcaacaatgtctcaagaacggctcaacggattggccactttatgtattgggaagaaattattggacaaggttgatagcaacactattatcaacgacttcgcatcaagaaatgttagaagaaatttttga

SEQ ID NO: 128877 - DNA, 1232 bp, Zea Mays
accggcctttctcgcggtccgatgcgttcaaagatctctgcgaaaacaaaggaagaatgtgagagagagtgggaaaggagagatgggagcggcatcatcatgccatatgccactatgccagcagctgagctgagtgaggagtcggctcgagcacttggcttgtgagaatgagaagaagaaaaagatgcaaaggaaggagttgctcggttcaaatcggcgccttcggctcccaccataaaaggaccacaccacacactcccctcagtgcccaagagtgagactcaaacggccgaaccgttgcttggattggagtgagaggagtgaccgtttagttagctcgagagagccgagagaacccaagaagcaagggcatggcttccttgcccgatcccacggtgtactacccgacgtcctccaacgccatcctgcgcgcgcatccgtccgccgccgccgcggcgtccaggggctcgttcggcccggtcttcgccgtgctcgcggtgatctccttcctcgccgtgtccgcctgcgtcgtcggcaggctgtgcggccgccggctcttcaggaaggggtccgccgaccaggactcgtacgcctccgactccgacctggagaagggcttcgaggtcaagtacccggccatgaagcccatggcgagctcccgcgccgtgatccacgacatggacgacggcttcgagatcaagttcgcgcccgggaagcctgcggcgtggaagcacgacggcaaggccgacagcaaggggagtcgtcagggccacggccagggccagggccagcgtcagcatcacggccagggccagggtcagggtcagcatcagccccagctcgttggcattcccaaaggctacgccgtgccggtgcccgtgcccaaggactacgcgggcttcagataccctgcggaagccgtggtcaggcaggggcagatcaggggcggggcattcgttccagcgaagcctggcacatgaacgttacgtatagcggccggcagcttaggttcacaactccattgatgctatcgcatatgatacgtacaatctctctcatcatccatccctccacgaacgatgatagcgttagttttcatcttcactctagttttttggggcgcagtgtgcaaaaaagttccctcggcgaactggtttcaggcacttgcatatcgtgttttgtacattaacccattacaagcagtgaagaacatctcattctcattctcattc

SEQ ID NO: 128878 - DNA, 1877 bp, Zea Mays
acaaaaccccggacggctaccgttcagtggccagcgtttcaacagtaatcagagtaatctctctgtgcctgcgacgacgactaggtgggttaccgccgtcgcgccgccgccgccgccgccgtcatactacaggtgcgaggccttcatcggtatcttaacaggcgacgaacaccaaccagtctgcactctacgatggcggcgcctccggccacggctcccgcggcctcccggtgtctctccggtgccaagtcgtgctgggctgctgagcggagctccagctcgtttgccgtctcggcgccttctactggcctccggcaaagtaggagccgcgtcctcagcgttcgtgccaaggttgccactggcgtgcagagagccagcactgtggatgatggagcgaaaaggccgtggaagctcagtgatgctcgtcttgtcctggaagatggttcagtgtggagggccaagtcttttggcgcatcaggaacacaagtcggtgaagttgttttcaacacatcactgacaggctatcaggagattttgacagatccaagctatgctggtcaatttgtcctgatgaccaatccccatattgacgatgaagaatcaaaccaatgttttcttggtggccttatcataagaaatctaagcatatgtacttccaactggcgatgcaaagaaacacttgaagagtatctgactaagaggaacatcatgggaatatatgacgtggatacacgtgctataacacgaagattaagagaagacggcagtcttattggtgtcttgagtactgatcagtctcagacagacaatgagttgttggaaatggccaaaaagtggaaaattgttggagttgatttgattagtggtgtcacatgtgatgctccatatgaatggttggacaagactgactcagaatgggagttcaagagggatcagtcaagtgaaacttttcatgtggttgcctatgactttggtatcaaacataatattttgagacgattgacatcatatggatgcaaaataacagttgttccagcaaattggcctgcttcagaggtactcaatttgaagcctaatggtgttctttttagcaatggtcctggagatccagctgcagttccctatgctgtgaagacagtacaagacataattggaaaggttcctgttttcggcatctgtatgggccaccaattgattgggcaggcgcttggtgggaagacatttaaaatgaaatttggtcatcatggtgggaatcaccctgtctgtgatctccgtagtgggcgtgtagacataagtgcacagaaccataactacgcagttgacccagaatcacttccagaaggagcagaagtaactcacgtcaatctcaacgacaatagttgtgctggccttcagtacgccaagatgaagcttgtgtctctccagtaccatcctgagtcttccccaggtccgcatgattccgacacagccttcggtgagtttatagagctcatgaagagcaacagattgtgagggaggggagtactggcaaaggtcaacaattgtcttggtgctctctcgcagcaagctcaaaagaatttgtttcattttagtgtttttctttgggatgttcatgtacttgaattttgggtccagaggacatagcataagatgctctgcagctgtaccatgaattgaagtagtgaactggttgaatttcttgagaataacatgttatcaaattgcacggtacagtatactcagattatgctcgcgaatttctggccggcaagtaaagtggtgagcaccagtagactagttagtatagagataaaggatggccatgaaggctcgtcagtggatacttctgttgttccaagctaatcagatgtgcacaa

SEQ ID NO: 128879 - DNA, 2019 bp, Zea Mays
acaaaaccccggacggctaccgttcagtggccagcgtttcaacagtaatcagagtaatctctctgtgcctgcgacgacgactaggtgggttaccgccgtcgcgccgccgccgccgccgccgtcatactacaggtgcgaggccttcatcggtatcttaacaggcgacgaacaccaaccaggtaacttcgtcggtatcttcacttcaccgacggcgacgagcacgaactcgaaccttttttccccccaaaaattagccccctccctgccccagtctgcactctacgatggcggcgcctccggccacggctcccgcggcctcccggtgtctctccggtgccaagtcgtgctgggctgctgagcggagctccagctcgtttgccgtctcggcgccttctactggcctccggcaaagtaggagccgcgtcctcagcgttcgtgccaaggttgccactggcgtgcagagagccagcactgtggatgatggagcgaaaaggccgtggaagctcagtgatgctcgtcttgtcctggaagatggttcagtgtggagggccaagtcttttggcgcatcaggaacacaagtcggtgaagttgttttcaacacatcactgacaggctatcaggagattttgacagatccaagctatgctggtcaatttgtcctgatgaccaatccccatattggtaacactggcgttaatcctgacgatgaagaatcaaaccaatgttttcttggtggccttatcataagaaatctaagcatatgtacttccaactggcgatgcaaagaaacacttgaagagtatctgactaagaggaacatcatgggaatatatgacgtggatacacgtgctataacacgaagattaagagaagacggcagtcttattggtgtcttgagtactgatcagtctcagacagacaatgagttgttggaaatggccaaaaagtggaaaattgttggagttgatttgattagtggtgtcacatgtgatgctccatatgaatggttggacaagactgactcagaatgggagttcaagagggatcagtcaagtgaaacttttcatgtggttgcctatgactttggtatcaaacataatattttgagacgattgacatcatatggatgcaaaataacagttgttccagcaaattggcctgcttcagaggtactcaatttgaagcctaatggtgttctttttagcaatggtcctggagatccagctgcagttccctatgctgtgaagacagtacaagacataattggaaaggttcctgttttcggcatctgtatgggccaccaattgattgggcaggcgcttggtgggaagacatttaaaatgaaatttggtcatcatggtgggaatcaccctgtctgtgatctccgtagtgggcgtgtagacataagtgcacagaaccataactacgcagttgacccagaatcacttccagaaggagcagaagtaactcacgtcaatctcaacgacaatagttgtgctggccttcagtacgccaagatgaagcttgtgtctctccagtaccatcctgagtcttccccaggtccgcatgattccgacacagccttcggtgagtttatagagctcatgaagagcaacagattgtgagggaggggagtactggcaaaggtcaacaattgtcttggtgctctctcgcagcaagctcaaaagaatttgtttcattttagtgtttttctttgggatgttcatgtacttgaattttgggtccagaggacatagcataagatgctctgcagctgtaccatgaattgaagtagtgaactggttgaatttcttgagaataacatgttatcaaattgcacggtacagtatactcagattatgctcgcgaatttctggccggcaagtaaagtggtgagcaccagtagactagttagtatagagataaaggatggccatgaaggctcgtcagtggatacttctgttgttccaagctaatcagatgtgcacaagcacaacgttgttgccagctttttaaatg

SEQ ID NO: 128880 - DNA, 2143 bp, Zea Mays
agcgtttcaacagtaatcagagtaatctctctgtgcctgcgacgacgactaggtgggttaccgccgtcgcgccgccgccgccgccgccgtcatactacaggtgcgaggccttcatcggtatcttaacaggcgacgaacaccaaccaggtaacttcgtcggtatcttcacttcaccgacggcgacgagcacgaactcgaaccttttttccccccaaaaattagccccctccctgccccagtctgcactctacgatggcggcgcctccggccacggctcccgcggcctcccggtgtctctccggtgccaagtcgtgctgggctgctgagcggagctccagctcgtttgccgtctcggcgccttctactggcctccggcaaagtaggagccgcgtcctcagcgttcgtgccaaggttgccactggcgtgcagagagccagcactgtggatgatggaggtgggttgtcttttattagttgttcagacatcaagttgtgtattcggcacgtggagtgtgcacctgggatcttgtagcacggttcatcgattatgtaccttacaatttaagagctctgttatttctggttttaccatttttgaaatgtctatgcagcgaaaaggccgtggaagctcagtgatgctcgtcttgtcctggaagatggttcagtgtggagggccaagtcttttggcgcatcaggaacacaagtcggtgaagttgttttcaacacatcactgacaggctatcaggagattttgacagatccaagctatgctggtcaatttgtcctgatgaccaatccccatattggtaacactggcgttaatcctgacgatgaagaatcaaaccaatgttttcttggtggccttatcataagaaatctaagcatatgtacttccaactggcgatgcaaagaaacacttgaagagtatctgactaagaggaacatcatgggaatatatgacgtggatacacgtgctataacacgaagattaagagaagacggcagtcttattggtgtcttgagtactgatcagtctcagacagacaatgagttgttggaaatggccaaaaagtggaaaattgttggagttgatttgattagtggtgtcacatgtgatgctccatatgaatggttggacaagactgactcagaatgggagttcaagagggatcagtcaagtgaaacttttcatgtggttgcctatgactttggtatcaaacataatattttgagacgattgacatcatatggatgcaaaataacagttgttccagcaaattggcctgcttcagaggtactcaatttgaagcctaatggtgttctttttagcaatggtcctggagatccagctgcagttccctatgctgtgaagacagtacaagacataattggaaaggttcctgttttcggcatctgtatgggccaccaattgattgggcaggcgcttggtgggaagacatttaaaatgaaatttggtcatcatggtgggaatcaccctgtctgtgatctccgtagtgggcgtgtagacataagtgcacagaaccataactacgcagttgacccagaatcacttccagaaggagcagaagtaactcacgtcaatctcaacgacaatagttgtgctggccttcagtacgccaagatgaagcttgtgtctctccagtaccatcctgagtcttccccaggtccgcatgattccgacacagccttcggtgagtttatagagctcatgaagagcaacagattgtgagggaggggagtactggcaaaggtcaacaattgtcttggtgctctctcgcagcaagctcaaaagaatttgtttcattttagtgtttttctttgggatgttcatgtacttgaattttgggtccagaggacatagcataagatgctctgcagctgtaccatgaattgaagtagtgaactggttgaatttcttgagaataacatgttatcaaattgcacggtacagtatactcagattatgctcgcgaatttctggccggcaagtaaagtggtgagcaccagtagactagttagtatagagataaaggatggccatgaaggctcgtcagtggatacttctgttgttccaagctaatcagatgtgcacaagcacaacgttgttgccagctttttaaatg

SEQ ID NO: 128881 - DNA, 2647 bp, Zea Mays
gcacatagcactagtcacgtccatgtccatcccggcccttggtagcactaacatcgaagcatcctcctccgtccacgacccacaccgccgtgctcaaattcggccttgccagcgccgccgagcgtccagcgccgacccaagcacgtgaggagttggacaccaccgagaggaactctctggtcctgctcgtggtggtcgtcgtcatcgcttcccgggcctgagaactgtgactgtagactacaattgcatcctgaagaataaaatggaccaacatgattccatggctgactcaccaaggaggcggcacaaccttttgcgtgacaaggtccaattggtgaaaaggaaagattcagatcgctatgagatcgtccgcttccatgatccactgtcttttgagaaaggcttctttgttgtgatccgtgcttgccagcttttggcacagcacaatgacgggataatatttgttggtgttgctggcccctctggtgctgggaagactgtgttcactgagaaggtggtcaatttcatgcctgatgttgctgtgatatcaatggacaactataatgacgcaactcgcatagtcgatggcaattttgatgatccacgtctgacagactatgacacactgctggaaaatatacatggtctgaaggaaggaaggtcagttcaggttccaatatatgatttcaagtcaagctgccggactggttatagaacagttgatgtccctagctcccgaattgttatcattgaaggtatttatgcactgagtgagaagttacggccagtgatagacttgcgtgtttctgtcactggtggtgttcattttgacctagtcaagagggttttaagggatatacagcgagctggccaggagcctgaagaaataattcatcagatctctgaaacggtttatccaatgtacaaggctttcatcgaaccagatttggagaccgcacatattaagatcatcaacaagttcaacccattttcagggttccaaaatcctatgtacattctaaagtcaccaaggtctctaggacctgagaaaatcaaggctgtgcttggtgatgatcatacggaaagcaacgaagaaacttatgatatatatctgcttccacctggtgaagacccagaagcatgccaatcttacttgagaatgcggaatagggaagggaaatataatctaatgtttgaggaatgggtgaccgacaattcttttatcatatcaccaaggatcacttttgaagtcagtgttcgtcttcttggtggtttgatggcattgggatatactatagcagctatactgaagagaagcactcgtgttttttctgatggcaaggcaactgttaaaattgattggctggaacaacttaacagacaatatatacaagtgcaaggaagagatcggctttatgttaaatctgtagcggatcagttaggtttggatggttcttacataccacgcacatatattgaacaaattcagctggagaaattgattaatgatgttatggcgttaccagaagatttgaagacaaagctcagcatcgacgatgagctggtctcaagtccaaaggaagccttttcccgtgtttcggctgatcggagaaacaaacttatgaagagtggcctatctcaatcatattcaacacacggagacaaaaatattgtgaaattgagtaaactaacagaaaccaataggaggtttggtggagggcgggcccttgaaccgcctgctatcaaccagggtgcaatcacccagctttcagaacagatatcaacattgaatgaaaggatggatgagtttacctctcgagttgaagaactcaactcgaaatttacagtgaaaaaacatttgcccagtcagcagaacttagctcttccaaatgatgcttgcaatggttccacgcctacaaatctctttgtctctcatttaggcaatggtactctgatacctcattcttcatcatcaaaccaactttcaaaggattccccgatgatagaagagattatgaacataacaagaggtcagcgccaggttatacatcagctcgacaatctgacaaatctgcttcacgagcatttggtcttaacacgccagactaataataccgccagcaggaaccgggtgctggatagcgacacactcatctgtccacttatttgcctgactgttgccagtatcggttacttcatgtttaaaggtctcagtaggggctgagcaaagtgagttggcccaaacatgtgctccgaggctcaccaccaagttttggcagaactggagtaagcaatcgtcacagctcttactgatctgcagtacttccagaattcgtattgatgctgtctctcctgcaggctaaaggaagacagttcttgaaccgtttacatcaggaagatcatatctaacagcttacggtcttattaagacaggtaaacctatataccagcacatggaacaaagctttcgcttttcagggagttattactcccaaacgcagaaaatggtgtaccagaagcatacacttctgtaacaggcactgacagttcccagtgctaataaattttggaggttaaaataatgctcagataatgtcgaagaaattatgagagatctataagtttaactgaacattgtcgttgtctt

SEQ ID NO: 128882 - DNA, 2712 bp, Zea Mays
ttcaccccgcgtgatctgtctcgtgcggcaaggcgtacgcgtcctttccctcccgcggcaaggcaacagccgccgtcgccctaagccaggtgcccaggtattcgtcggtcccttcgccaggcctccctcgcttgccgccaacgagcacccactaggtatccgcaacctccctctcccattcatgctgtgcgaaaccgatcacccgattcatgctgtgcgaaaccccatccgaaccctcgcaataaaatggaccaacatgattccatggctgactcaccaaggaggcggcacaaccttttgcgtgacaaggtccaattggtgaaaaggaaagattcagatcgctatgagatcgtccgcttccatgatccactgtcttttgagaaaggcttctttgttgtgatccgtgcttgccagcttttggcacagcacaatgacgggataatatttgttggtgttgctggcccctctggtgctgggaagactgtgttcactgagaaggtggtcaatttcatgcctgatgttgctgtgatatcaatggacaactataatgacgcaactcgcatagtcgatggcaattttgatgatccacgtctgacagactatgacacactgctggaaaatatacatggtctgaaggaaggaaggtcagttcaggttccaatatatgatttcaagtcaagctgccggactggttatagaacagttgatgtccctagctcccgaattgttatcattgaaggtatttatgcactgagtgagaagttacggccagtgatagacttgcgtgtttctgtcactggtggtgttcattttgacctagtcaagagggttttaagggatatacagcgagctggccaggagcctgaagaaataattcatcagatctctgaaacggtttatccaatgtacaaggctttcatcgaaccagatttggagaccgcacatattaagatcatcaacaagttcaacccattttcagggttccaaaatcctatgtacattctaaagtcaccaaggtctctaggacctgagaaaatcaaggctgtgcttggtgatgatcatacggaaagcaacgaagaaacttatgatatatatctgcttccacctggtgaagacccagaagcatgccaatcttacttgagaatgcggaatagggaagggaaatataatctaatgtttgaggaatgggtgaccgacaattcttttatcatatcaccaaggatcacttttgaagtcagtgttcgtcttcttggtggtttgatggcattgggatatactatagcagctatactgaagagaagcactcgtgttttttctgatggcaaggcaactgttaaaattgattggctggaataaatctgtagcggatcagttaggtttggatggttcttacataccacgcacatatattgaacaaattcagctggagaaattgattaatgatgttatggcgttaccagaagatttgaagacaaagctcagcatcgacgatgagctggtctcaagtccaaaggaagccttttcccgtgtttcggctgatcggagaaacaaacttatgaagagtggcctatctcaatcatattcaacacacggagacaaaaatattgtgaaattgagtaaactaacagaaaccaataggaggtttggtggagggcgggcccttgaaccgcctgctatcaaccagggtgcaatcacccagctttcagaacagatatcaacattgaatgaaaggatggatgagtttacctctcgagttgaagaactcaactcgaaatttacagtgaaaaaacatttgcccagtcagcagaacttagctcttccaaatgatgcttgcaatggttccacgcctacaaatctctttgtctctcatttaggcaatggtactctgatacctcattcttcatcatcaaaccaactttcaaaggattccccgatgatagaagagattatgaacataacaagaggtcagcgccaggttatacatcagctcgacaatctgacaaatctgcttcacgagcatttggtcttaacacgccagactaataataccgccagcaggaaccgggtgctggatagcgacacactcatctgtccacttatttgcctgactgttgccagtatcggttacttcatgtttaaaggtctcagtaggggctgagcaaagtgagttggcccaaacatgtgctccgaggctcaccaccaagttttggcagaactggagctaaaggaagacagttcttgaaccgtttacatcaggaagatcatatctaacagcttacggtcttattaagacaggtaaacctatataccagcacatggaacaaagctttcgcttttcagggagttattactcccaaacgcagaaaatggtgtaccagaagcatacacttctgtaacaggcactgacagttcccagtgctaataaattttggaggttaaaataatgctcagataatgtcgaagaaattatgagagatctataagtttaactgaacattgtcgttgtctttgtcgtgatttctgagtgcgagcactatctcatgatgccatctgaattcacgattctacaaaattgtcttttattttattctcacaagtaaccgggattaacaattgctgcatatttgacgttccgtatggtacaactgtcggaaacgttgaaacggaggagagggtgtagaattcgtcgcgcgctaaaaataacaaagaaaa

SEQ ID NO: 128883 - DNA, 5248 bp, Zea Mays
cagttggggagttttctgccttttcttctccccttctctgttttccttcaccgcgccaccgggggcgaatcgcggacgccgctcacctcccccatctcctccccaccacgtcgcaaacccatcgtcaccatcaccgcctccggccgcggctcccatcctcgcgtggccgtcgcgatccactacgagcttctctcgtccggtcttccgagtctcggctacctgctcctacgtcgaatcctcgggccctgctgtcgccaccgccgaatcctgctgcactcgccgcagccggggaacgcggacggcctgcgggagcttggcgcctcctccttcgcgttgcgtcgtcacgaggaactaagtcaacagtctttatgggcttcatgctagtagaggataattccagcactgcttttggaggtcctgctattctttctcatatggattggtagaccagatcctggcaaagcaatgctgatggaccctcctgttatgcaaatggactgcaagttgaaaaatgacgtggataaaacatcatcaattgactatgataggaaggtgaccatctcacatgatgattatgggtgggcaggctctgatgtcaaaccaaaagatgatatagtatgtaaccctgtggaggttagtaatgcttgtcaaacaggcataaatgaggtattagattctgcttccaaaaattcacctcttaacttgggtgatttacctcagggtgcagaactaagaaataagaatggtgacagttcctactccaatgtaaaacttcagttgaactcaagtgctggaaataataatggcttgcaaactgatgatgacaactttactaaacaatattttggtaagaaggatatgcatcatcgacaggaagagatgcatccttcttccaacacagtgtcattaccaacttcatgcagactcaatggagatgccacaccttctgaagaggagaaaatagcagaggatcgtgtcaaagtggatggaaatgtagatgctgtaattaaggaagtcgaaactgacttggtaggatgccatgcacatcagaaagaatttcagtgcacgctccaagatctatcagaaatagcctgcagtattgatttagtacataatacatcttctccacaaggagagaataagaagcctgtctcccctttaaatggcatgggccattatgttgataacaatagttgtaatggtgataccaattataaaggggaggagctcaatatgggggatgctggggatgaggatcatgctatagcactttgggtgaagtggagaggaaaatggcaaactggaattcgatgctgtagagtagattgtcctttacctactctaagggcaaaaccaacacatgacaggaagagctatgttgtcgttttcttcccacgaacaaaaacttattcttgggtagacatgctacttgttcttccaatagaggaatgtcctttgccacttgtaaatggaactcatcgtaaatggagaaagctggtgaaggatttgaacattcctcgacgattcaacatgcaaaatcttgccgtttttatgataaatttaattgatgagcttcatatcgaggaacttcgacagtcccttcatgggaacaagcttaaggaattgaggaatgcatcagtgcagcctgaattgatccctgagtggaacagatggaaacaagaattgataaaacagtacttttcattgcatcctgctggtaatgttggaaactttgagaaaaacaattgttatgatgatccagctttagatcaacaaggtagtagaaaacgtccaaaacttgaggtccgaagaggagagatacaaatttcacacatgggtgaggctgactacaggactccaaccgaagacccaaaccaaaataaccttcctggtaactctgtcatgcatgaaaatgtaggggcattaggatcaacagatcaaaataattctgtcacgttgcctggaagttttggcaccaacgaaaacacaatatccagtagtgccaatgcagctttacagaatgctagacttgatttagattcattcaagagttctcggcagtgttctgcacacattgaagcaaaggggaggcaatgtggtaggtgggcaaatgatggtgatatttactgttgtgtgcatcaaagtatgcattttcttgaccattcttcaagggaggacaaggcacttaccattgaagctccgttgtgcagtggtatgactaacatgggtagaaaatgcaagcatcgagctcagtatggttctactttttgtaaaaagcaccggctacagacaaacttggatgcaatgcacccagaaaatttgttggatccatctgaggtactccatatgggtgaagaacctccgaataagtgggtggaagaaatttctaagtcgcaagcaatgtatagcatagacttggaaacagacaagaaagtccaggatgctgtaaaagtgaaattgatgacaattgtgtctatagagaactctggtgaaaaaggcgcaatggagaaagctgatatgtgtgtggcatcaacttctataacaaatactgatgatacttctctttgtattggaattcactctcatgatagtattgttgaatgccaggattatgccatgcaacatactctttattgtgagaagcaccttccaaggttccttaaacgtgccaggaatggtaagagtcgactcgtttctaaagatatcttcgtcaatctactgaagggatgcacatcaagaaaagataagatatgtctgcaccaagcatgtgaatttctttattggttcttgagaaacaacctttctcatcaacacactagtcttgctagtgaacatatgccccagatattggctgaagtgtctaaaaatccagatgttggagagtttttgttaaagttgatatctactgagagagagaaactagcaaatatctggggctttgatacaaatagatctaagcaaatatattctgaaaacaaagaagggtctctagtgttgcataaagagggaactaatctttcatctggtccgaagtgcaaaatctgtgctcaccagttctctgatgatgaagctcttggattacattggacaactgtccacaaaaaggaagcccggtggctgtttagagaagggacaaatggtctgtccctttatgatagccacaacattgaggatgccaatggctctcagaagttcatctgcagattatgtgggctcaaatttgatcttcagccagatcttggccgccaccataaagtcgctcatatggactcagatgttgttggccacagctcactgggccgtgggaagtatcagcttaaccgtggccgacactactattccgctttcaagaaaagtttacgaccaacaagtacattaaagaagaggagtagctctggaatcgagaaaaactttaagtttcagagttctgccctaacatctcaaataattcaatctgaaacatccagctttggtaagttacaggattttcagtgctcagatgttgcgcaaacattattttccaagattcaaaagacaagaccccatccaagcaaccttgatattttatcggttgcccgcactgtatgctgcaagacaagtcttgctgctgcattggaagttaaatatggatctttacctgagaacatatttgtgaaagctgcaaagctatgcagtgacaatggcatccaaattgattggcatcaagaggtatttatatgccctaaaggttgcaaatctagatataattcaaatgctctgcttcctatgcaactcacggcagttgattttcctgaagctccttctgttgatcctcttaatgatgatgaaatgtgggcaatggaagaataccattatgttcttgattcaaagcactttggatggaagcctaaaaatgagagtgtcgttctctatgaagacataagctttggcagggagaaagttccaattgtctgtgtcattgatatggacgcaaaagattctttaggcatgaagcctgaagaacttttgtcacatggcagttctgtgccttggcaaggtttccactatatcacaaagcgtttgatggattcatctcttattaattcagagaactctatgcctgggtgcgcatgttctcatcctgaatgttctcctgagaaatgtggtcacgtgagtctcttcgatggtgtctatgctagtctggtggatatcaatggaacaccaatacatggcagatttgcatatgatgaaaatagtaaaattattttacaggaagggtatccaatatatgagtgcaattcatcatgtacttgtgactcatcctgccggaataaagtattgcagaaaggactgcttgttaagttggaactcttcagaactgagaataaggtgaagtactctgtactccccatgatggatttccgaactcctggttgggctattagagctgccgaacctattccacagggtacctttgtctgcgagtatattggtgaagttgtgaaggccgacaagaccatgaaaaatgcagaaagtgtgtcatcaaagagtgggtgcaattacttgtttgacattgcttctcagattgatagggaaagacttcggactgtaggggctattgaatacttgattgatgccacaagatctggaaatgtgtcccgctatatcaatcacagttgttccccaaatctcagcacccgattggttttggtagagagcaaagattgccagcttgctcacattggcttgtttgctaatcaagacattgccgtaggagaagaacttgcctatgattaccgacaaaagcttgtagcaggcgatggctgcttctgccattgtgggggtaccaattgccgaggccgtgtctattgacttcgcaggaagacactaactgttcaacgcttggttgcagaactcgaggtttctacagctgtgtaggctgctgagcgatttagcactgcaattttccagagctcgagtgcaggactaggatcccattcttcatgctacaaatagggattgtgatataggactcacagaaatgaagtgattcaggctgctttattcgtaggcgagaattctttcagtaaaattccttcattcatattttattgctcatgggcaccatcatcgacgtcaagtaataaactgcttatcccatttttgcgtttgttcatattagacgacggcctgttgtgcaggtaatattttgtagttgtattaattgcgtgatggctatcagaatcaatgaaaagataagtcttgtttc

SEQ ID NO: 128884 - DNA, 5334 bp, Zea Mays
cagttggggagttttctgccttttcttctccccttctctgttttccttcaccgcgccaccgggggcgaatcgcggacgccgctcacctcccccatctcctccccaccacgtcgcaaacccatcgtcaccatcaccgcctccggccgcggctcccatcctcgcgtggccgtcgcgatccactacgagcttctctcgtccggtcttccgagtctcggctacctgctcctacgtcgaatcctcgggccctgctgtcgccaccgccgaatcctgctgcactcgccgcagccggggaacgcggacggcctgcgggagcttggcgcctcctccttcgcgttgcgtcgtcacgaggaactaagtcaacagtctttatgggcttcatgctagtagaggataattccagcactgcttttggaggtcctgctattctttctcatatggattggtagaccagatcctggcaaagcaatgctgatggaccctcctgttatgcaaatggactgcaagttgaaaaatgacgtggataaaacatcatcaattgactatgataggaaggtgaccatctcacatgatgattatgggtgggcaggctctgatgtcaaaccaaaagatgatatagtatgtaaccctgtggaggttagtaatgcttgtcaaacaggcataaatgaggtattagattctgcttccaaaaattcacctcttaacttgggtgatttacctcagggtgcagaactaagaaataagaatggtgacagttcctactccaatgtaaaacttcagttgaactcaagtgctggaaataataatggcttgcaaactgatgatgacaactttactaaacaatattttggtaagaaggatatgcatcatcgacaggaagagatgcatccttcttccaacacagtgtcattaccaacttcatgcagactcaatggagatgccacaccttctgaagaggagaaaatagcagaggatcgtgtcaaagtggatggaaatgtagatgctgtaattaaggaagtcgaaactgacttggtaggatgccatgcacatcagaaagaatttcagtgcacgctccaagatctatcagaaatagcctgcagtattgatttagtacataatacatcttctccacaaggagagaataagaagcctgtctcccctttaaatggcatgggccattatgttgataacaatagttgtaatggtgataccaattataaaggggaggagctcaatatgggggatgctggggatgaggatcatgctatagcactttgggtgaagtggagaggaaaatggcaaactggaattcgatgctgtagagtagattgtcctttacctactctaagggcaaaaccaacacatgacaggaagagctatgttgtcgttttcttcccacgaacaaaaacttattcttgggtagacatgctacttgttcttccaatagaggaatgtcctttgccacttgtaaatggaactcatcgtaaatggagaaagctggtgaaggatttgaacattcctcgacgattcaacatgcaaaatcttgccgtttttatgataaatttaattgatgagcttcatatcgaggaacttcgacagtcccttcatgggaacaagcttaaggaattgaggaatgcatcagtgcagcctgaattgatccctgagtggaacagatggaaacaagaattgataaaacagtacttttcattgcatcctgctggtaatgttggaaactttgagaaaaacaattgttatgatgatccagctttagatcaacaaggtagtagaaaacgtccaaaacttgaggtccgaagaggagagatacaaatttcacacatgggtgaggctgactacaggactccaaccgaagacccaaaccaaaataaccttcctggtaactctgtcatgcatgaaaatgtaggggcattaggatcaacagatcaaaataattctgtcacgttgcctggaagttttggcaccaacgaaaacacaatatccagtagtgccaatgcagctttacagaatgctagacttgatttagattcattcaagagttctcggcagtgttctgcacacattgaagcaaaggggaggcaatgtggtaggtgggcaaatgatggtgatatttactgttgtgtgcatcaaagtatgcattttcttgaccattcttcaagggaggacaaggcacttaccattgaagctccgttgtgcagtggtatgactaacatgggtagaaaatgcaagcatcgagctcagtatggttctactttttgtaaaaagcaccggctacagacaaacttggatgcaatgcacccagaaaatttgttggatccatctgaggtactccatatgggtgaagaacctccgaataagtgggtggaagaaatttctaagtcgcaagcaatgtatagcatagacttggaaacagacaagaaagtccaggatgctgtaaaagtgaaattgatgacaattgtgtctatagagaactctggtgaaaaaggcgcaatggagaaagctgatatgtgtgtggcatcaacttctataacaaatactgatgatacttctctttgtattggaattcactctcatgatagtattgttgaatgccaggattatgccatgcaacatactctttattgtgagaagcaccttccaaggttccttaaacgtgccaggaatggtaagagtcgactcgtttctaaagatatcttcgtcaatctactgaagggatgcacatcaagaaaagataagatatgtctgcaccaagcatgtgaatttctttattggttcttgagaaacaacctttctcatcaacacactagtcttgctagtgaacatatgccccagatattggctgaagtgtctaaaaatccagatgttggagagtttttgttaaagttgatatctactgagagagagaaactagcaaatatctggggctttgatacaaatagatctaagcaaatatattctgaaaacaaagaagggtctctagtgttgcataaagagggaactaatctttcatctggtccgaagtgcaaaatctgtgctcaccagttctctgatgatgaagctcttggattacattggacaactgtccacaaaaaggaagcccggtggctgtttagagaagggacaaatggtctgtccctttatgatagccacaacattgaggatgccaatggctctcagaagttcatctgcagattatgtgggctcaaatttgatcttcagccagatcttggccgccaccataaagtcgctcatatggactcagatgttgttggccacagctcactgggccgtgggaagtatcagcttaaccgtggccgacactactattccgctttcaagaaaagtttacgaccaacaagtacattaaagaagaggagtagctctggaatcgagaaaaactttaagtttcagagttctgccctaacatctcaaataattcaatctgaaacatccagctttggtaagttacaggattttcagtgctcagatgttgcgcaaacattattttccaagattcaaaagacaagaccccatccaagcaaccttgatattttatcggttgcccgcactgtatgctgcaagacaagtcttgctgctgcattggaagttaaatatggatctttacctgagaacatatttgtgaaagctgcaaagctatgcagtgacaatggcatccaaattgattggcatcaagaggtatttatatgccctaaaggttgcaaatctagatataattcaaatgctctgcttcctatgcaactcacggcagttgattttcctgaagctccttctgttgatcctcttaatgatgatgaaatgtgggcaatggaagaataccattatgttcttgattcaaagcactttggatggaagcctaaaaatgagagtgtcgttctctatgaagacataagctttggcagggagaaagttccaattgtctgtgtcattgatatggacgcaaaagattctttaggcatgaagcctgaagaacttttgtcacatggcagttctgtgccttggcaaggtttccactatatcacaaagcgtttgatggattcatctcttattaattcagagaactctatgcctgggtgcgcatgttctcatcctgaatgttctcctgagaaatgtggtcacgtgagtctcttcgatggtgtctatgctagtctggtggatatcaatggaacaccaatacatggcagatttgcatatgatgaaaatagtaaaattattttacaggaagggtatccaatatatgagtgcaattcatcatgtacttgtgactcatcctgccggaataaagtattgcagaaaggactgcttgttaagttggaactcttcagaactgagaataaggtgaagtactctgtactccccatgatggatttccgaactcctggttgggctattagagctgccgaacctattccacagggtacctttgtctgcgagtatattggtgaagttgtgaaggccgacaagaccatgaaaaatgcagaaagtgtgtcatcaaagagtgggtgcaattacttgtttgacattgcttctcagattgatagggaaagacttcggactgtaggggctattgaatacttgattgatgccacaagatctggaaatgtgtcccgctatatcaatcacagttgttccccaaatctcagcacccgattggttttggtagagagcaaagattgccagcttgctcacattggcttgtttgctaatcaagacattgccgtaggagaagaacttgcctatgattaccgacaaaagcttgtagcaggcgatggctgcttctgccattgtgggggtaccaattgccgaggccgtgtctattgacttcgcaggaagacactaactgttcaacgcttggttgcagaactcgaggtttctacagctgtgtaggctgctgagcgatttagcactgcaattttccagagctcgagtgcaggactaggatcccattcttcatgctacaaatagggattgtgatataggactcacaggcaagcatcaggcaacaacatagtgtcgattttagtcatggtaccatcgtgcataactgattatttgtttgacgcagccagaaatgaagtgattcaggctgctttattcgtaggcgagaattctttcagtaaaattccttcattcatattttattgctcatgggcaccatcatcgacgtcaagtaataaactgcttatcccatttttgcgtttgttcatattagacgacggcctgttgtgcaggtaatattttgtagttgtattaattgcgtgatggctatcagaatcaatgaaaagataagtcttgtttctttaa

SEQ ID NO: 128885 - DNA, 954 bp, Zea Mays
atgttaacagtaatgttgcccctcctcatagccgcggcggcggctgccggagcgctggcgctcattgtcgcgacacgcctcctcagggaggacgccgtggcatccctccgccgggagatccgagaggtgctcacggcactcgtcgccgacgacgaggacggcgacggcgagagcgcctccccgccgccgccatccgtgctgatcacggggttccgtgcccacggcaagagctcgctggtcaacacggcgtgccgggcgctggcggccgaggacggcccgctgctgctgcgcgcggaggcatcgccgcccggcggcgggaccgacgggctgaggaggctcctcagggtcaatgccgtggtggctggggccgacggcgacagcgcgggagcgggggagagcgatgcggtggagctgctggatgcgccgccgctccccgaggcgtttaggctgaagagggaggacgtcgacgcggccatcagcgtcggggaccctgagtgcgttgtgttcgttctgcgctgcgacgcgcccaccaaggagcggagcgccgccatcaagtgtctaccggagatttctgccgccgtcagaaacaaagggcttaatttgatcgtcgtgttgacttttaagaaggccacgagatccattaggcaggctgaagagcttctacgggaggtatcgttcagggctagaactgactgtgtctacttcatcgagaactacacctggagcaagaatggccccaacctccgccacccccctgtcatcaagaacgagtttgagacccatttcacggtgctgacaatcattcgacagtgtcttgagttcatcaagctaaacaggagccagtccaaggacaagaaaaggaacggcaagcaggaaaaagcacccgagcctaaacctaagaatccacgcacagaaactaagcagtaccggaaaatcaaggagcccagtatctaa

SEQ ID NO: 128886 - DNA, 2273 bp, Zea Mays
cccaacaagcactcgctgtcgctggctgcaacaccgatccagaggccagaccgccagagcacaccagctgagctcgagcgacctctagtcgttttagcaccggctccggtgtcacccatggccatgaggagagcggcgcagcaggcggcacggttcgccatgggaccacacgtccctcacgttattgcgcccgctgagaggagccttcatgcgtccgccgcgagcaagaagatcgtgggcgtgttatacaagggcggcgagtacgccgacaggaaccccagcttcgtcggctgcgccgagcacgccctcggcatccgcggctggctcgagtcgcagggccaccagtacgtcgtcaccgacgacaaggacggccccaactgcgagctggagaagcacatcgcggacgcgcacgtgctcatcaccacgccgttccacccggcgtacgtgaccgcggaccgcatcgcgcgggccaagaacctggagctgctcctcacggcggggatcggctccgaccacgtggacctggccgccgccgccgccgcggggctcacggtcgccgaggtcacgggcagcaacacggtgtcggtggcggaggaccagctcatgcgcgtcctcgtcctcacgcgcaacttcctgccgggccaccgccaggccgtcggcggggggtgggacgtggccgccgtcgcgcaccgggcgtacgacctggaggggaagacggtgggcaccgccggcgccggccggatcggccgcctgctgctgcagcgcctcaagcccttcaactgcaggctgctctaccacgacaggctccgcatcgacccggcgctggaggcggagatcggcgcccagttcgaggcggacctcgacgccatgctgcccaagtgcgacgtcgtcgtgatcaacatgccgctcaccgagaaaacaagaggcatgttcgacaaggagaggatcgcgaggatgaagaaaggcgtgatcatcgtgaacaacgctcgaggcgcgatcatggacacgcaagccgtggcggacgcttgcgccaccggacacatcgcgggatacggcggcgatgtgtggcaccctcagcctgcgcccaaggaccacccgtggcgctacatgcccaacaacgccatgacccctcacatctccggcaccaccattgatggccagttgaggtatgcggccggggtgaaggacatgctagagaggtacttcaagggccaggatttcccagtgcagaattacatcgtcaaggaaggcaagctcgcgggccagtaccagtgagcattcatgaagatgcagctgcattgagcgaagcttgctgcatatgtcaatcacctttacttcaaaaacaatgtcccaatcaccataaataaaagtcgcgacgtttacacattgtcgtcacggcggttatggatgagaatctgttccgtttccaagctttcatttcatccctttatttggtcgaaatttgcaacgactgaatgacctttgatacaagtactaagacaacagcattgctatgttggcctttatttatacctacacaatgttcagttctctcaagtctcaacccaacatcagaaaccacctaccaggaattcaactgctacacttgttctgaacaagataatcttgtgaatagctgttatgccactgaataacaaaaacagacttcaacttgctaaacaaaaggatagtgaaacccacatgacccttgtctgtttgggcttcacatgcgttggagtgatgcaatctcctcttatagactgcatccagcctgacggatatatatccgcaaaggaatacactgtttacattgatgtgatggtgtgcaaaagcttgatagtgtgcaaaagcttgatcgtgtgcaaaagctctcacaatcgaagtgcattcaggcccttcattagtgcatcagtgtgctcgggtttcccaaccgagatacgaatatagcctttcagttccttcttgtcatagtggcggatcatcactcccatcttcgcaaggtcttcctgaaatttttgtcaataaaacatgtgagtaatgctgcaaattgcatactcttccaaacattcctgcataaaaacaagcactaatattttctgaccttaaatcacaataaaagtgactgatacctcaaaggaataagatggaaatgcaaacatgcagcaataaataaaacaaacctttattttctttgcatcctttcctgacgtgacctcgcagagaatgaagttagaatgactgggaaatggcttcaggaatggtattcccttgag

SEQ ID NO: 128887 - DNA, 600 bp, Zea Mays
gattattcagtccattgcgtggggaggagagtagaggatgggaggtaggcaggtggggcacagggccagatgggcgcatccgccgagtcaccgttgccaaccgctcgacgcggaggtggaggcgaggcgcaacctctgctctccaactagcgctggcggctaggagctaggaagggagggaagtgcgagtgccgggtcgcctggctgctgctgaaactctaagggttgctgctatggaaagtggcgagtactgcagagaactggaaaattctctgcccatctggagcacgagcgaatctggagaatgatgtgaagatgttaaagtcttcggcaagggcaccaaacagattgcgctggaaatgatcttttgtttggaagagagttggggaatggctggagtaacaatgtttttgctgcccggttttattttctgttggtcttggaagcgctgctaggatattagctggctggggggtctaaattttgatgtaataaaaggatttatgtaacttggatgctatctgccttgccactggtatcaggcttgttggccttgatgcttgggaatgaaagcccttagagcatttacaacccaattaa

SEQ ID NO: 128888 - DNA, 888 bp, Zea Mays
atggcgttggtgagggagcacggtgggtactacggaggcttcgacagcgtcgaggcggcggccttcgacacgctcggctacggccacggcgcgtcgctgggctttgacgcgtcgtcggcgctgttcggggaaggcggttatgcggcgggcggcggggacgcctgggcgggcgcgggggcgtcgaccgtcctggcgttcaaccgcacaacggcagcggcggccgtgggtgtggaagaggaggaggaggagtgcgacgcgtggatcgacgctatggacgaggacgaccagagctccggccccgccgcggcggcgccagaggcgcgccacgcgctgacggcctccgtgggtttcgacgcctccacggggtgcttcaccctgacggagagggcgtcgtcgtcgtcaggcggagcggggcgcccgttcggcctgctgttcccgagcacgtcgtcgtcgggcggcacgcccgagcgcacggcgccggtgcgcgtcccgcagaaacggacctacctgagtgccgagccgcaggctgtgagccccaacaagaagcactgcggcgcgggcaggaaggcgagcaaggccaagctcgcgtccacagccccaaccaaagatccccagagcctcgcggccaagaaccggcgcgagcggatcagcgagcggctgcgggcgctgcaggagctggtgcccaacggcaccaaggtcgacctggtcaccatgctcgagaaggccatcagctacgttaagttcctccagttgcaagtcaaggttctggcaacagacgaattctggccggcacagggagggaaggcgccggagatctcccaggtgagggaggcgctcgacgccatcttgtcgtcggcgtcgcagtctcagagggggcagctgaattag

SEQ ID NO: 128889 - DNA, 2484 bp, Zea Mays
atgggtgacgaagccaaatgctccgtcgatgtcgccgagggcgcctacatcatggccagcatcatggccgtctccggcatcatggtcactgtcctcgtgctctcggccctcttccattttgtgcttcgacgtctcggacagcccagcgttatctcccacatcctggcaggcatcgtggttggcccgacggtgcttggccgtgccatggacctccgccagctggggatgcgcgacgcgggcgacgcgcttgggggcacaatttacttcgtccgcatggtgttcatgttcttcatcggcctggagctggacctgcgctacctgcgccgcaacctacgtcgctcgctagttgtggcctgcggcggctccgggttctgcttcgtcctcgccgtgctgaccgggcccttcacctacggcttcctgcacccgggccagggccacttccagcccagcaacatctacgcctccaccgcgctcttcgcgatcgtgatcaccagcaccgcctcacccgtcctcatccgcatcgtcaccgagctcaagctcagcggttccgagaccggccagatcgccatcggcgccgccttcgccaacgacatggctagcctcaccgctctgagcgtcatcgtcgtcacccacaccctgtatggcacgatgcccaatgagaaggagtcctcgccgccggccaaggtcgcggtggtggcgtggatggcgctgacggtgtggatggccgttaaccttgcggcgtgggtggctcgcatgctcaaccggctcaagcgcgggaggcagtacatcagcaagtacgagctgtgcggtatgctgctcctcatcgtgggcctctcgcttctagagcagatcatgggctacagcgcctccatgacggccttcctcatcgggctcgccatgccacgcgagggcccaaccgcgaggacgctaatggaccgcctcgcctaccctgtgcaccagctcttcatgccactctgcttcgcggccatcggtgctcgcctcgactttgccaagatcggcaagttcacggtggtccagctcgtcgtggccgtcaccttcactacgttgctgagcacggcggggaaggtggccggcaccttgctggcggggcgggcgctgggaatcgcgacccgagaggccgtcgtgctgggtgcgctgctcaacgtcaagggctactctgatatcctcgccatcaactttgggaacaagatcaacgtatggggcgagaccatgcaggtggtgcttctcgtatcatccatcatcaacacgttcatggccgggccggcgtccgccgccatcgtccgccagcagcgtcgtgcctaccactatcgctcacgctgcctcgaggaccttagcctggcccacgagcttcgtatgctcgtatgcacccacggtgccactagcgtctactcgatgctcacgctcagtcacctctccaggggcagggcaccagtcgtcgccgtgtacctgttgcaccttgtcgagctcgcgacatcgcgcaagtacgccatcacgcagcagctataccacgcccgggatggtggcgaggatgaggacgagtggggctacgcacgtgagatcgagcatgtggcctccgccgtggccaccttcacctatgacaatgccatcctcgtgcggcagatgacggccatatccagcttgggctctatggacacagacgtgcgcaactgtgtggaggatgcgcgtgcgtcgctggtgatcatgcccttccacaaggagcagcgctacgatgggcgcatggtgtgccggcatgaggggcggcggcaactgaaccagcggatcctgcataggcctccttgcacggtggggatccttgtggagcgttgctttgctcatgaggtcacgggagagcatcatcaggtggtggcgttgttcctgggcggggctgatgacagggaggcagtgtcattcgcgatacggctggcagtggaaccgttagtgattgtgactgtgtgccggctccttcttccaagcggaaggggcttggtgggcaatccggagatgatggaggagaacatggaagacgaggaattcatggcagacctatgcgcaaggtttgtggcaccaggtcaagtatcatacatggagaagtacgtgagcaatggcgcggagaccgtaaacacgcttaggtccatggtgggtacatgctcactcttcgtcgtgggaaagggtgatagggcccatggcaacagaggtgtgatgacaagtgacatggggggctgggatgaagaatgcgaggagctaggccccattggtgagctcctgtcctcggacgacttggtaggttgtggttccgttctagtgctacagcagcataacaagtacaaaatgaagacatgggacaaggacaaccaacaacaatgtcatcacgctagtgtagtcgatggcgatgctgttgttgacatcattggatcctcctccgtcacaagcagcagtactagtcattcacggcgaccaaattga

SEQ ID NO: 128890 - DNA, 1632 bp, Zea Mays
gtcgatggaggaacaacacatggctgggccgccgtaccgctaccgccttcagcatcgccggctgatggacatagcacccgcaagcgcgagcgacgacgattcagggcatcacggctccaacgggatggccatcatggtgtcgatcctggtggtggtcatcgtctgcaccctcttctactgcgtctactgctggagatggaggaagcgcaacgctgtcaggagagcgcagatagagaggctgaggccgatgtccagctcggacctgccgctcatggacctgtcctccatccacgaggccaccaacagcttctccaaggagaacaagctcggcgaaggcggtttcgggcccgtctatcggggcgtgatgggcggcggcgcggagatcgccgtgaagcggctgtcggctcggtcgcggcagggcgcggcggagttccgcaacgaggtggagctgatcgccaagctgcagcaccggaacctggtccgcctgctgggatgctgcgtcgagagggacgagaagatgctcgtctacgagtacctccccaaccgaagcctcgactccttcctcttcgatagcaggaagagcgggcagctggactggaagacgaggcagagcatcgtcctggggatcgcccgcggcatgctgtacctgcacgaggactcgtgcctcaaggtcatccacagggacctcaaggccagcaacgtgctcctggacaacaggatgaaccctaagatctccgacttcggcatggccaagatcttcgaggaggagggcaacgagcctaacacgggccccgtggttggcacctacgggtacatggctccggagtacgccatggagggcgtcttctcggtgaagtcagacgtcttcagcttcggggtgctggtgctagagatcctcagcgggcagcggaacggctccatgtacctccaggagcaccagcacaccctgattcaagatgcctggaagctgtggaacgaggacagggcggcggagttcatggacgcggcgctggcggggtcgtacccgcgggacgaggcgtggcggtgcttccacgtggggctgctgtgcgtgcaggagagcccggacctccggcccaccatgtccagcgtggtgctcatgctcatcagcgaccagacggcgcagcagatgccggcgccggcgcagccgccgctgttcgccagcagcaggctcggcaggaaggcgtccgcgtcggacttgtcgctggccatgaagacggagacgaccaagacgcagtccgtcaacgaggtgtccatctccatgatggagccacggtgagacgagggggggcgggggggcttgcttgatcgtcaaccaacaagtgtccgtctccgtctccgtcccatccgcatgagaaacccttactcggggagccgtcgtgatttgcttggttctttgatcagcaacggcggcaacaacagcaggcacacttttcgtcgaggatacgctgtgcgtcgtcgtcggtgcgcgcgtgtatgtgtgtgtgatggttacggatgtcttgcgagccgtaatcgcgctgggaaagtcccagcctttgtcgcggggaaaatcttgtagccatgacatgtgcagcgagaaaaacgcctttgagtttgagactagaaagaaaa

SEQ ID NO: 128891 - DNA, 1471 bp, Zea Mays
gtcgatggaggaacaacacatggctgggccgccgtaccgctaccgccttcagcatcgccggctgatggacatagcacccgcaagcgcgagcgacgacgattcagggcatcacggctccaacgggatggccatcatggtgtcgatcctggtggtggtcatcgtctgcaccctcttctactgcgtctactgctggagatggaggaagcgcaacgctgtcaggagagcgcagatagagaggctgaggccgatgtccagctcggacctgccgctcatggacctgtcctccatccacgaggccaccaacagcttctccaaggagaacaagctcggcgaaggcggtttcgggcccgtctatcggggcgtgatgggcggcggcgcggagatcgccgtgaagcggctgtcggctcggtcgcggcagggcgcggcggagttccgcaacgaggtggagctgatcgccaagctgcagcaccggaacctggtccgcctgctgggatgctgcgtcgagagggacgagaagatgctcgtctacgagtacctccccaaccgaagcctcgactccttcctcttcgatagcaggaagagcgggcagctggactggaagacgaggcagagcatcgtcctggggatcgcccgcggcatgctgtacctgcacgaggactcgtgcctcaaggtcatccacagggacctcaaggccagcaacgtgctcctggacaacaggatgaaccctaagatctccgacttcggcatggccaagatcttcgaggaggagggcaacgagcctaacacgggccccgtggttggcacctacgggtacatggctccggagtacgccatggagggcgtcttctcggtgaagtcagacgtcttcagcttcggggtgctggtgctagagatcctcagcgggcagcggaacggctccatgtacctccaggagcaccagcacaccctgattcaagatgcctggaagctgtggaacgaggacagggcggcggagttcatggacgcggcgctggcggggtcgtacccgcgggacgaggcgtggcggtgcttccacgtggggctgctgtgcgtgcaggagagcccggacctccggcccaccatgtccagcgtggtgctcatgctcatcagcgaccagacggcgcagcagatgccggcgccggcgcagccgccgctgttcgccagcagcaggctcggcaggaaggcgtccgcgtcggacttgtcgctggccatgaagacggagacgaccaagacgcagtccgtcaacgaggtgtccatctccatgatggagccacggttctgggcagacccgggcacgagcaacggcgcagcgacatcccaccctgccaccggggcatgcaaaaagcgagggggtcaggggggcgataggaacgtcaaggatggtttggccgcccgtacacctacccaccagcccgttgcccggtggcatcatgatcggcggatcgtggattga

SEQ ID NO: 128892 - DNA, 1247 bp, Zea Mays
actctcactcggcctcggccaccctctcaaaccaaacagaacccacacgcgtgcacggacacggagcacgcgtgcgcgccccacgagcgatgtctccccttcgccgcgcgcgctctaccctgctcctcctccactacgtggccgcctcccacttcctgctgtgcgcgccgatccagcgcaccgccgcggccacattgccggaccccgcgccactcgacccggcactgatcctcccctcggcgacctcggtgcagcccaccgccactaccattcccgggggcacgatcccggcgttccccgagcagtcggactcgctagcggggtcctcgtccgcgtgcccgctcgccccttccccggcgctcctcccggccgtgcggtcctcctgcgccaccgacgacggcgcgctgccgccgaggctgcgctgctgccccgcgctggccgcgtggctgttcgccgcctacgcgcccaccgcgctagcggagcggcccccggccgcggccgcggccgctgctaccgtggacatgccgctgccgcccgacgactccgagacgtgcgcgggcgccgcggaccgcgcgctgcgtgcggcgggagcggcgctgccccgcccccctggcgctggcggcaacgggacgtgcgacgtggcgttctgctactgcggggtgaggctgaggcggctggcctgcgggtccccgccggccgagggcgggatgtggtcgccagctgacgccgcggcgagggagctggagaaggactgcgcgcagccgggcgtccccggctgttccaaatgcctccttgctcttaccacgataaaggccacgaatcccgagggtggcgccggcgcgaaggcaccgggcaagaagaaggagcagatcgaccgatcgaccgcgagtgaccgtgactgcgagctcatggggctcatgtgggtgttgcagcgcaacgccacacggtacggagcggcggccacgaccgtgatccaggccctaatggctgtggatgaggcgttcgccgcaggggtcacggtggcggcagatgatacgggggtagccgcggcgtgctcgctgcccgtggacgacgacatgcccctcccggccgagtacgcgcaggtcagcagggccagcgacgcgcctcgtctctactacttcctgctcgtgctgctctccattctaagctttcgttttgtgtactcgttgtaatactttgcgatttaattgaagttcgttatacggtttaccgtgattttttttctc

SEQ ID NO: 128893 - DNA, 252 bp, Zea Mays
ataaaaaaggtgcttgctaatggccattatgagttgaaggagtacacaattgacgctattgaaggagaaggggaacacagcactatgcttgctaggaaaccacaccctatatacccgtcgaaagcgggattaaaacctagtctgcttggcctttcaatctctagggccttgaagatattgagcccagatgttgatccagtgcctcccgatgttctcgttgaattcaacttgcctaatctctttgatcaatag

SEQ ID NO: 128894 - DNA, 2394 bp, Zea Mays
tttagggcagttaaaagtcattgcatttttctgatgcttgggcgtactgtgtgtcttggatatttctgattttgtaaataatgcattcaatgacaattttggttaattttaggcttacatgggaattcacaaacctaaggatcgatctgaagctgattttgctcgaagaaggcttatatttgatgatttcttttacctccagttaggaagactatttcaaatgcttgaagcagttggtacgcgggttgagaaggaggaattgttatacaagtgcaaaagtcatgagctgaatactgttggtgtagatgattggtctcctcttacaaagaaattgttgagggctcttccttattggcttactcctagtcagttggatgctgttcaagagattatatgggatctcaggagaccagttcccatgaacagactcttgcagggggatgttggttgtggaaagaccattgttgctttcctggcatgtatggaggttgttaattcaggatttcaggctgctttcatggttccaacagaggtgcttgctgtccagcattatgaacacctaacttcattgctagagaagtttgatggagatgagaaaccaaatattgccttgctaactggttcaacgtccacaagggagtcaaggataattcgagatggtctgaaaactggagagataggcatggtcattggaacacactgcttaatagctgataaaactgaattttcagctttacgtatctctgttatagatgaacagcagcgctttggagttgtacagagaggcaggtttaacagtaagctatatacttcttcctcaaagttgagtggtgaaaatacaagttcagacgaggcttctgattctgaaacatttatggctccacacgttcttgcgatgtcagctacccctattccaagaacattggcacttgctttatatggtgatatgtctcttactcagatcacggacctgcctcctggaaggcaacctattaaaacccttgctcttgaaggaaatgatgtagggtttgaagctgtcttccagatgatgagggatgaactgatagacgggggcaaggtctaccttgtgtatcctatcatagatgagtctgagcacttgccacaactccgtgctgcaacagctggatttgattccataaagcaaaaattcgaaggctatccctgtgggctattacacggccgcatgaggagcgatgagaaggaagaaactctcaacagttttagaagcggagaaacacgcattctcctgtcgacacaggtgatcgagatcggggtcgatgttcctgatgcttccatgatggttgtcatgaacgctgagcgatttggaatctctcagctgcatcagctgcgagggagagtaggtcgcggtgagaggaaatccagatgcatattcctggcttcaacttcgagcacgctgccaaggctgaaggtgctcgagaagtcctccgatgggttttacctggctaatgcagacctgctgctccgtggccctggcaatctactaggtaaaaagcaatctggtcatcttccagaatttccaatagctagattggaggtcgatggtggtattttacaagaggcccatcttgccgctctgaaagtgctggtcgcaagcaacgacctagcgttgtatccacggctgaaggtggagctcagcatgaggcagccattgtgcattcttggagattgacatgtcaacagtactgctcgtaggctcgtagcattgggcgacgcgtgtactgtggataactattggtcgtaggctcgtagcgtcggcaaagttgacatgccgtctggtgagcgaggcgtgtaccatgaataactgttagactgattgtgtgagtgtgtgtgggctggtaccattgttaggctgccggttcattagggttagagttgagtctatatattgtaaccccttctctatgcaatacaatgatccacttcactattctacatgttattagactaggttagggttttctgaaacccacagtagccaccggtcgcctcccaccccacagcagccgccaccacctgagccgtcgtcgccctccaggaggctcctccctctcggggcggcacttgcccctggcgcggctgtgcatgggcgcggcccctcgtagctcggcgcgggagtggcagcccctggcctcgacggcgcgaggcgcgaccccctggcagtgtggacgcgacggtccgtccatggcggcgcggccacgccggccccggcgcgggaaacggctcggcggcgcacgacacggagcctcatcacgaggcaatggtggccacggcgccgccctggcggctggctcctccggcgaggtacagcctcggcgcgacctaggcgcgagcgtaggctcgtgggcctcctct

SEQ ID NO: 128895 - DNA, 2481 bp, Zea Mays
tttagggcagttaaaagtcattgcatttttctgatgcttgggcgtactgtgtgtcttggatatttctgattttgtaaataatgcattcaatgacaattttggttaattttaggcttacatgggaattcacaaacctaaggatcgatctgaagctgattttgctcgaagaaggcttatatttgatgatttcttttacctccagttaggaagactatttcaaatgcttgaagcagttggtacgcgggttgagaaggaggaattgttatacaagtgcaaaagtcatgagctgaatactgttggtgtagatgattggtctcctcttacaaagaaattgttgagggctcttccttattggcttactcctagtcagttggatgctgttcaagagattatatgggatctcaggagaccagttcccatgaacagactcttgcagggggatgttggttgtggaaagaccattgttgctttcctggcatgtatggaggttgttaattcaggatttcaggctgctttcatggttccaacagaggtgcttgctgtccagcattatgaacacctaacttcattgctagagaagtttgatggagatgagaaaccaaatattgccttgctaactggttcaacgtccacaagggagtcaaggataattcgagatgcaagctgttctccctagttctttcactcactctcaagttccacatgcatatattaatatctccgctctattcgtattctattacagggtctgaaaactggagagataggcatggtcattggaacacactgcttaatagctgataaaactgaattttcagctttacgtatctctgttatagatgaacagcagcgctttggagttgtacagagaggcaggtttaacagtaagctatatacttcttcctcaaagttgagtggtgaaaatacaagttcagacgaggcttctgattctgaaacatttatggctccacacgttcttgcgatgtcagctacccctattccaagaacattggcacttgctttatatggtgatatgtctcttactcagatcacggacctgcctcctggaaggcaacctattaaaacccttgctcttgaaggaaatgatgtagggtttgaagctgtcttccagatgatgagggatgaactgatagacgggggcaaggtctaccttgtgtatcctatcatagatgagtctgagcacttgccacaactccgtgctgcaacagctggatttgattccataaagcaaaaattcgaaggctatccctgtgggctattacacggccgcatgaggagcgatgagaaggaagaaactctcaacagttttagaagcggagaaacacgcattctcctgtcgacacaggtgatcgagatcggggtcgatgttcctgatgcttccatgatggttgtcatgaacgctgagcgatttggaatctctcagctgcatcagctgcgagggagagtaggtcgcggtgagaggaaatccagatgcatattcctggcttcaacttcgagcacgctgccaaggctgaaggtgctcgagaagtcctccgatgggttttacctggctaatgcagacctgctgctccgtggccctggcaatctactaggtaaaaagcaatctggtcatcttccagaatttccaatagctagattggaggtcgatggtggtattttacaagaggcccatcttgccgctctgaaagtgctggtcgcaagcaacgacctagcgttgtatccacggctgaaggtggagctcagcatgaggcagccattgtgcattcttggagattgacatgtcaacagtactgctcgtaggctcgtagcattgggcgacgcgtgtactgtggataactattggtcgtaggctcgtagcgtcggcaaagttgacatgccgtctggtgagcgaggcgtgtaccatgaataactgttagactgattgtgtgagtgtgtgtgggctggtaccattgttaggctgccggttcattagggttagagttgagtctatatattgtaaccccttctctatgcaatacaatgatccacttcactattctacatgttattagactaggttagggttttctgaaacccacagtagccaccggtcgcctcccaccccacagcagccgccaccacctgagccgtcgtcgccctccaggaggctcctccctctcggggcggcacttgcccctggcgcggctgtgcatgggcgcggcccctcgtagctcggcgcgggagtggcagcccctggcctcgacggcgcgaggcgcgaccccctggcagtgtggacgcgacggtccgtccatggcggcgcggccacgccggccccggcgcgggaaacggctcggcggcgcacgacacggagcctcatcacgaggcaatggtggccacggcgccgccctggcggctggctcctccggcgaggtacagcctcggcgcgacctaggcgcgagcgtaggctcgtgggcctcctct

SEQ ID NO: 128896 - DNA, 3455 bp, Zea Mays
tatagcaggagcacgccctcttcacctccttcccgtcctcgagatcgttctgagtttctgacctccttcccccgcgtgctcctccagccactccgcaccccagatctccgaaccctaaccccttgcacatgttattgcactgaacgcagctggtagccacaagccatgtcgcagccccgcagttacggaatcctcgtcgccgtccttgtcgcggcggccgtcgccgtcccgccggcgaccgcggcggtggcgagcatcgacctcggctcagagtggctcaaggtcgctgctgtgcatcttgccccaggccgtgctccaatcgctgttgccatcaacgagatgtccaagcgtaagtccccggcactcgcctcgctcgccgacggcaaccgtctctctggggaggaggcggcaggcatcacggcgcggcacccgtccaaggtgttcgcccgcgcgcgggacctcttggccaagcccttgtcctacgtgcagtccgtcacggactcgctcttcctcccctacgatctcgtccccgacgcgcgcggcgccgccgcggttcgcgctgatgacgggcaggtatactccctcgaggagatcgtcgccatggtgctccactacgccgcggggctcgccgatgcgcacgttggggcgcccgtgcgggacgcggtgatcgccgtgccgccctactttgggcaggccgagcgccgggcgttgacgcaggctgcgcagctggctggaatcaacgtgctttctctcatcaacgagcacgctggggccgcgcttcagtacgggattgacaaggacttctccaatgcgtcgcggcatgtcatcttttacgacatgggcgctggtagcacttacgctgcattagtgtactactctgcatacaacgccaaggagttcggaaagacagtgtccgttaaccagttccaggttaaggacgtaagatggaactctgagcttggaggcgttcaaatggaaatgcgtctggtcaactattttgctgcccaattcaataagcagctcggtgatggggttgatatccgtcagtctcccaaggcaatggctaagttgaaaaagcaagtcaagcgcaccaaagaaattcttagtgcaaacactgcagctccaatttcagtagaatctctgtataatgatgttgatttcaggagtaccataacacgtgagaaatttgaagagctgtgtgaggatttatgggagcaagctctaactccagttaaagaagtgctgacacattctggcatgaagatcgatgacatctatgctgtagaactaataggaggagctacccgggttccaaaactgcaggctaagctgcaggaatttctgggtaggcgtggcctggataaacatcttgatgctgatgaagcaattgttctcggagcttcacttcatgctgctaacctgagtgacgggattaagttgaaccgtaagttgggaatgattgatggctctacttatgcttttgtacttgagatagatggcctagattatgtcaaggatgaaagtattgaccaaattttggttccaagaatgaagaaaatgccaataaagatgtttagatccatcagacatacaaaggacttcgatgtctctctcaactatgacaaagcttatgaactgcctccaggcattccatcacacaagtttgcagagtattccgtatcaggactgacagatgccagtgaaaagtatgcaaaccgtaatttatctgcacccatcaaagcaaatctacatttttctttgagtagaagtggaattattgctcttgatagagcagaagcagtaattgagataactgaatgggttgaagttccaaagaagatattgactctagagagtaacatcaccaatcagaattcttcttctgaagtaggagcagctaatagcacaacagatagtaaggaaaatctgagttctggcagtaatactaattcgagcactcccattgatgagagtaatgctcaagaaattattacagagaaggtgctaaagaaaagaacttttagggttccattgaaggttgtggaaaaaacaactggtgctggaacaattctttcgaaggagttgtattctgaagcaaaaaataggttagaggcactcgataagaaggatgcagaacggaggaaaactgctgaacttaagaataacctagagtcatacatatattctatgaaggagaagctggaagaaagcgcagatattttgactgtctcaactgaacaggagagggaatcctttgctgagaaacttagtgaggtgcaggattggttatatatggacggtgaagatgctcaagctaatgaattcaaagagcgtcttgaccaacttaaagccattggtgacccaattcttttcagattgaatgaattaaaaacccgaccaacggcctgtgaaaatgctcgattgtatcttgatgagctgcaaaagattgttaagaactgggagacaaacaaaccatggctcccccaaaagagagtagatgaggttgtaagtgaagcagagaaagtgaaagcttggctgaaggagaaggaaaacctgcagaaaaatacccctgtctttaacccaccagttttcacatctgaagaagtttctgagaaagttctggacttacaagataaggtctcaagtgtcaataggattccaaaaccaaaaccgaaggtcgagaagaaaacagcaaaggaggaagaacctgctagcaaggagaaaaccacctatacggaatctgcacccgacgagggtgaatacaccgaaacgtctcagaaatctaaggctcaagaagaggatcagtctgcatcagccaacactagtgattcagaacctgaacctcatgacgagttgtgagaagcagaatccataggaacaggtcgggacgacgcattacgcatgtactacaagaaggcagtttgaggataaattttggttgctcatttttttccaaaattttatttgacgaccgaaagacgaggctatgtaggtgttgaggaacactagatgctgtagggccaaaaatattttatcggtagtttctgattgctgtatagcagcctcatcgttgtgtaagttactcgcctcgaaggcgtagttcaggatctagaatcgctttgttatactgaactcatttcattttttaatgaagaatgctatataggattttacgtcagtaaggtattgttgtactgagctgatttgattttttaaataaataatttcatagattgtacgtcaatccttgctgtgtttaaatatataattagatctatacccgtcggtggagcaagagtttaatatataattagatgtatacccgcataggttcaaacttccatttggctacatctgccctttacctagataaatgattcttgattttttccccattcattaaactttatatggaaatgaaaggaatccagaataacaaatgaaaaaaataaaaa

SEQ ID NO: 128897 - DNA, 3957 bp, Zea Mays
gccgaaaccatgccaaacggaagacgtgctgggagcttaaaatgtcaagaaaccaaacaatttttacctggtacgtcagaatgcacttttacgcctagaatgttgcattgataattatgcaaatacataaaagaaacagctacctaaattgcagccagacagctgcaagcaacaaaattcatgaaacaaaaaaaggacacaaaagatattaaaaaagaccacaactgacgctctagtcattcttcaaggaaatatttcttctatgctctatggataacctgggcaaactctttcttgaaaaaggcttagccatttgatacagacggtagaatttcttggaagatgttccagctcactccttgagacccaaatgctccagctgattaatatgataatttcaatgtagaaactagaaagggacttccaactgttgtttgaaacgttgcagagtgataaaaggctcaacctcattgtcaacactgagatcgcaccaggttacccatacgagggagcacaacaaactaatgtgccttccattttgcaagcaggtgatcatggatctctcctttcttaatcctctgcaggcgctgcttcagcttggacagtgtcgctgaactcaacttgataccccgatcaatcatgtcttctgcatatttgcatgcctcaggtagcctgtcatccttcagctttgctacaagcatgttcccacactcctgtaaaggtggcaagccattctccaccatgcagcaccagactttgatcccagtctcccaatagtgtgtatccaaaaacatgcgaagtgcaagtgaacaatttccctcgtttggccaacattcgttcttgaccatctcgctaaatattgcggctgcctctcggtgcttctttcccttcaacaaaagctggaggaccacattgtatgtgttggtatcagggaagactccattggagatcatgtcgtcgagataacccactatcagctcagcatgcccgagactgccctgcagcttgatcattgtgttgtacatttccatatctgggacgagtcctcgacgcccaacaaagtcatcccagagattcatggctccgcgcaattgtcgtgcatcaaggtgtgcagcaagagcagcacggaagaacttctctcctggcgaacagccgtgcctgctcaagacatttaggtactccattgcttccggtagcgccgtggaggagtcacttgaaacaagcgtagtgaggaaggagtcataggcaggcacgttgtcaggataaaatccaatggcctgcaccatttcgtcgaacacctcgcgcgcaacccgcaggtcggcggcggcctcgctgccctcgaggaggatggcgtaggagtcggcatccgggcgcgtgccagcctcggcgcgggctactgggatcgcggcgcgagcgtcgtcgaggcggttggcacgacacagcgcggagaggagcgagttgagcgccggcgtgtcgcgggtcatgccgtagcggggcatgtccatgaacgccttgagcggggaaccgccgggggtcgccgccagggaggagaatatggaggcgaaagtggcgagcgagagcagctgctgcgactgcatagatttgactgtgtcccacatgggctcgaagaggcgattcttaccgaggatgtcgacgaggaggttccacgagtagggggagtgctcgtggccgaggtaccggtatcccgcccagcgaaagaaggcggcggcggcgcgcgggtgcgcgtaggagaagcggagcacctgctcgacgtcagcgatgcttacgcggatgtcggccttgtcgagctcggcattcagttcctcgtcgtcggcgcgggaggccaggatgtcgcagaagatgcgggtcttgggggccatgtcgggagcttccttgttcgtgggtaacgccggcgcgggcgggtcgcgggcgcgcttcgccgccggcgatgccacagtggctgcgccgtcggacggccgcttcgctcggtgatcggacatcgcggcggggagctcgcgtgatcggtgggattcaggagaggttgcaagtcggacggggaggggatactggagtggagatctttatgtcctgaccctgacccttatcctaataactaaggcggagtcgagtcgacccgaacaggaacctccgaaaccctgaccaaatcgcgaggcaaagccgcgtcggcggcggatggcgccgtccttggtcgtctcggcgaggcatgcccacgctgtgccccaccggagaggtcgcaggcagcgtgtggtcgtcgccagttccggtggcgccggtccgccgccgaagctggtgaccttcctcgggaagggcggctccggcaagactaccgcggccaccatcgccgctcaggtggcaaatttgctccgtgactctatcccttgatcgtatttgtcattattttgatgacaaatcttagttttggtgtgaactcgctgccgcgtcgaggacttcgactggaaatctgcaatgttgctctggggaacagcaatgatgctgtggtattatgcaagtgaaggcttcaagacatgcctggttgttcagtcccaagatcctactgcggagcacttgatgggcagtaaaattgggaattctctgaccgagtgtgtggccaatctctcggccataaagctggagactggtaagttgctgcttgaacccctagaccgactgaagaaggtagacgcccaggtcaattttactcaaggaatccttgaagggattgtaggagaggagcttggagttttacctggaatggattcgatctgtttagtcttagctcttcagaagctccttaatttcttttcatctggaaggagtaattcacaatcagaatttgatgtgatcgtgtatgattgcaacaatacagaggaaattctacggctgataggtgctgctgaccgggcaagatcttacttgaggtatgtgagggaccttgctgagaagactgacatcggaagacttgcttctccttcattactgaaactaatatatgattctgcaaggccaaatggcaaaattagtgaggggagacttagtacagagatatggaatgaaattgaacaactacttgagaaaatctcagtatggtttgccgatccttcaaaacttgcatgcttccttatcatggatcctaggacatcaatctctgtatcctctgcattgcggtattggggttgtaccactcaagctggcggtcaaatatgtggggcatttggatacactgaagacccttctgaaatgcaccgagaagttgctcaaaagttcgtgccgttgtctttgtcttttctgccatttctcccgaatgattcttccgtggattggagcagagcactaagctcattgagccaaaatacaaaggaacagctgaggaatgcgtccacctgggtgtacccttcagtcagttttgattctgttcagaaatctgtaaccctcttcatgccaggctttgataagtctgaaatcaagctatatcaatatagaggtggatcagaactgttgatcgaagctggagatcagaggcgcgtcataaaattgccacttacgatgcagggaaaggtccaaggtgccaaattcgttgacaggaacctcgttgttagcatccggtagcagaatcgctggcgccggctgccggctgggattggagcaccccacttcagattggcagtttactgccgactaatgagcaggaccatcgggattgcatgtctgtttctgttcgtagcctgaattttgtggtgctgttcgtttcaactttcaaccagagtgaagctgcatagtcctactatttttgaaggggttcgcgatactcgagtaaatagtaaactggcagttttttgcactgcttttgtgatcaggaaagaacggtgttctaggggattctctttccaaaaaaaaaatgttcccctcccccactttattatcagcaaagcgtttaac

SEQ ID NO: 128898 - DNA, 3807 bp, Zea Mays
gccgaaaccatgccaaacggaagacgtgctgggagcttaaaatgtcaagaaaccaaacaatttttacctggtacgtcagaatgcacttttacgcctagaatgttgcattgataattatgcaaatacataaaagaaacagctacctaaattgcagccagacagctgcaagcaacaaaattcatgaaacaaaaaaaggacacaaaagatattaaaaaagaccacaactgacgctctagtcattcttcaaggaaatatttcttctatgctctatggataacctgggcaaactctttcttgaaaaaggcttagccatttgatacagacggtagaatttcttggaagatgttccagctcactccttgagacccaaatgctccagctgattaatatgataatttcaatgtagaaactagaaagggacttccaactgttgtttgaaacgttgcagagtgataaaaggctcaacctcattgtcaacactgagatcgcaccaggttacccatacgagggagcacaacaaactaatgtgccttccattttgcaagcaggtgatcatggatctctcctttcttaatcctctgcaggcgctgcttcagcttggacagtgtcgctgaactcaacttgataccccgatcaatcatgtcttctgcatatttgcatgcctcaggtagcctgtcatccttcagctttgctacaagcatgttcccacactcctgtaaaggtggcaagccattctccaccatgcagcaccagactttgatcccagtctcccaatagtgtgtatccaaaaacatgcgaagtgcaagtgaacaatttccctcgtttggccaacattcgttcttgaccatctcgctaaatattgcggctgcctctcggtgcttctttcccttcaacaaaagctggaggaccacattgtatgtgttggtatcagggaagactccattggagatcatgtcgtcgagataacccactatcagctcagcatgcccgagactgccctgcagcttgatcattgtgttgtacatttccatatctgggacgagtcctcgacgcccaacaaagtcatcccagagattcatggctccgcgcaattgtcgtgcatcaaggtgtgcagcaagagcagcacggaagaacttctctcctggcgaacagccgtgcctgctcaagacatttaggtactccattgcttccggtagcgccgtggaggagtcacttgaaacaagcgtagtgaggaaggagtcataggcaggcacgttgtcaggataaaatccaatggcctgcaccatttcgtcgaacacctcgcgcgcaacccgcaggtcggcggcggcctcgctgccctcgaggaggatggcgtaggagtcggcatccgggcgcgtgccagcctcggcgcgggctactgggatcgcggcgcgagcgtcgtcgaggcggttggcacgacacagcgcggagaggagcgagttgagcgccggcgtgtcgcgggtcatgccgtagcggggcatgtccatgaacgccttgagcggggaaccgccgggggtcgccgccagggaggagaatatggaggcgaaagtggcgagcgagagcagctgctgcgactgcatagatttgactgtgtcccacatgggctcgaagaggcgattcttaccgaggatgtcgacgaggaggttccacgagtagggggagtgctcgtggccgaggtaccggtatcccgcccagcgaaagaaggcggcggcggcgcgcgggtgcgcgtaggagaagcggagcacctgctcgacgtcagcgatgcttacgcggatgtcggccttgtcgagctcggcattcagttcctcgtcgtcggcgcgggaggccaggatgtcgcagaagatgcgggtcttgggggccatgtcgggagcttccttgttcgtgggtaacgccggcgcgggcgggtcgcgggcgcgcttcgccgccggcgatgccacagtggctgcgccgtcggacggccgcttcgctcggtgatcggacatcgcggcggggagctcgcgtgatcggtgggattcaggagaggttgcaagtcggacggggaggggatactggagtggagatctttatgtcctgaccctgacccttatcctaataactaaggcggagtcgagtcgacccgaacaggaacctccgaaaccctgaccaaatcgcgaggcaaagccgcgtcggcggcggatggcgccgtccttggtcgtctcggcgaggcatgcccacgctgtgccccaccggagaggtcgcaggcagcgtgtggtcgtcgccagttccggtggcgccggtccgccgccgaagctggtgaccttcctcgggaagggcggctccggcaagactaccgcggccaccatcgccgctcagtattatgcaagtgaaggcttcaagacatgcctggttgttcagtcccaagatcctactgcggagcacttgatgggcagtaaaattgggaattctctgaccgagtgtgtggccaatctctcggccataaagctggagactggtaagttgctgcttgaacccctagaccgactgaagaaggtagacgcccaggtcaattttactcaaggaatccttgaagggattgtaggagaggagcttggagttttacctggaatggattcgatctgtttagtcttagctcttcagaagctccttaatttcttttcatctggaaggagtaattcacaatcagaatttgatgtgatcgtgtatgattgcaacaatacagaggaaattctacggctgataggtgctgctgaccgggcaagatcttacttgaggtatgtgagggaccttgctgagaagactgacatcggaagacttgcttctccttcattactgaaactaatatatgattctgcaaggccaaatggcaaaattagtgaggggagacttagtacagagatatggaatgaaattgaacaactacttgagaaaatctcagtatggtttgccgatccttcaaaacttgcatgcttccttatcatggatcctaggacatcaatctctgtatcctctgcattgcggtattggggttgtaccactcaagctggcggtcaaatatgtggggcatttggatacactgaagacccttctgaaatgcaccgagaagttgctcaaaagttcgtgccgttgtctttgtcttttctgccatttctcccgaatgattcttccgtggattggagcagagcactaagctcattgagccaaaatacaaaggaacagctgaggaatgcgtccacctgggtgtacccttcagtcagttttgattctgttcagaaatctgtaaccctcttcatgccaggctttgataagtctgaaatcaagctatatcaatatagaggtggatcagaactgttgatcgaagctggagatcagaggcgcgtcataaaattgccacttacgatgcagggaaaggtccaaggtgccaaattcgttgacaggaacctcgttgttagcatccggtagcagaatcgctggcgccggctgccggctgggattggagcaccccacttcagattggcagtttactgccgactaatgagcaggaccatcgggattgcatgtctgtttctgttcgtagcctgaattttgtggtgctgttcgtttcaactttcaaccagagtgaagctgcatagtcctactatttttgaaggggttcgcgatactcgagtaaatagtaaactggcagttttttgcactgcttttgtgatcaggaaagaacggtgttctaggggattctctttccaaaaaaaaaatgttcccctcccccactttattatcagcaaagcgtttaac

SEQ ID NO: 128899 - DNA, 3332 bp, Zea Mays
agggagcacaacaaactaatgtgccttccattttgcaagcaggtgatcatggatctctcctttcttaatcctctgcaggcgctgcttcagcttggacagtgtcgctgaactcaacttgataccccgatcaatcatgtcttctgcatatttgcatgcctcaggtagcctgtcatccttcagctttgctacaagcatgttcccacactcctgtaaaggtggcaagccattctccaccatgcagcaccagactttgatcccagtctcccaatagtgtgtatccaaaaacatgcgaagtgcaagtgaacaatttccctcgtttggccaacattcgttcttgaccatctcgctaaatattgcggctgcctctcggtgcttctttcccttcaacaaaagctggaggaccacattgtatgtgttggtatcagggaagactccattggagatcatgtcgtcgagataacccactatcagctcagcatgcccgagactgccctgcagcttgatcattgtgttgtacatttccatatctgggacgagtcctcgacgcccaacaaagtcatcccagagattcatggctccgcgcaattgtcgtgcatcaaggtgtgcagcaagagcagcacggaagaacttctctcctggcgaacagccgtgcctgctcaagacatttaggtactccattgcttccggtagcgccgtggaggagtcacttgaaacaagcgtagtgaggaaggagtcataggcaggcacgttgtcaggataaaatccaatggcctgcaccatttcgtcgaacacctcgcgcgcaacccgcaggtcggcggcggcctcgctgccctcgaggaggatggcgtaggagtcggcatccgggcgcgtgccagcctcggcgcgggctactgggatcgcggcgcgagcgtcgtcgaggcggttggcacgacacagcgcggagaggagcgagttgagcgccggcgtgtcgcgggtcatgccgtagcggggcatgtccatgaacgccttgagcggggaaccgccgggggtcgccgccagggaggagaatatggaggcgaaagtggcgagcgagagcagctgctgcgactgcatagatttgactgtgtcccacatgggctcgaagaggcgattcttaccgaggatgtcgacgaggaggttccacgagtagggggagtgctcgtggccgaggtaccggtatcccgcccagcgaaagaaggcggcggcggcgcgcgggtgcgcgtaggagaagcggagcacctgctcgacgtcagcgatgcttacgcggatgtcggccttgtcgagctcggcattcagttcctcgtcgtcggcgcgggaggccaggatgtcgcagaagatgcgggtcttgggggccatgtcgggagcttccttgttcgtgggtaacgccggcgcgggcgggtcgcgggcgcgcttcgccgccggcgatgccacagtggctgcgccgtcggacggccgcttcgctcggtgatcggacatcgcggcggggagctcgcgtgatcggtgggattcaggagaggttgcaagtcggacggggaggggatactggagtggagatctttatgtcctgaccctgacccttatcctaataactaaggcggagtcgagtcgacccgaacaggaacctccgaaaccctgaccaaatcgcgaggcaaagccgcgtcggcggcggatggcgccgtccttggtcgtctcggcgaggcatgcccacgctgtgccccaccggagaggtcgcaggcagcgtgtggtcgtcgccagttccggtggcgccggtccgccgccgaagctggtgaccttcctcgggaagggcggctccggcaagactaccgcggccaccatcgccgctcagtattatgcaagtgaaggcttcaagacatgcctggttgttcagtcccaagatcctactgcggagcacttgatgggcagtaaaattgggaattctctgaccgagtgtgtggccaatctctcggccataaagctggagactggtaagttgctgcttgaacccctagaccgactgaagaaggtagacgcccaggtcaattttactcaaggaatccttgaagggattgtaggagaggagcttggagttttacctggaatggattcgatctgtttagtcttagctcttcagaagctccttaatttcttttcatctggaaggagtaattcacaatcagaatttgatgtgatcgtgtatgattgcaacaatacagaggaaattctacggctgataggtgctgctgaccgggcaagtcagatcttacttgaggtatgtgagggaccttgctgagaagactgacatcggaagacttgcttctccttcattactgaaactaatatatgattctgcaaggccaaatggcaaaattagtgaggggagacttagtacagagatatggaatgaaattgaacaactacttgagaaaatctcagtatggtttgccgatccttcaaaacttgcatgcttccttatcatggatcctaggacatcaatctctgtatcctctgcattgcggtattggggttgtaccactcaagctggcggtcaaatatgtggggcatttggatacactgaagacccttctgaaatgcaccgagaagttgctcaaaagttcgtgccgttgtctttgtcttttctgccatttctcccgaatgattcttccgtggattggagcagagcactaagctcattgagccaaaatacaaaggaacagctgaggaatgcgtccacctgggtgtacccttcagtcagttttgattctgttcagaaatctgtaaccctcttcatgccaggctttgataagtctgaaatcaagctatatcaatatagaggtggatcagaactgttgatcgaagctggagatcagaggcgcgtcataaaattgccacttacgatgcagggaaaggtccaaggtgccaaattcgttgacaggaacctcgttgttagcatccggtagcagaatcgctggcgccggctgccggctgggattggagcaccccacttcagattggcagtttactgccgactaatgagcaggaccatcgggattgcatgtctgtttctgttcgtagcctgaattttgtggtgctgttcgtttcaactttcaaccagagtgaagctgcatagtcctactatttttgaaggggttcgcgatactcgagtaaatagtaaactggcagttttttgcactgcttttgtgatcaggaaagaacggtgttctaggggattctctttccaaaaaaaaaatgttcccctcccccactttattatcagcaaagcgtttaacaagactgaagagttccaagcttacaga

SEQ ID NO: 128900 - DNA, 514 bp, Zea Mays
agggcaacagaccccggcgagagaagacgaagaaactagcatgtcgctggcgctgtctcgcatgatgctcgacaggttcttccccgacgccgccgggggcgcgcggccgcccacggactggaaggagacgcgggacgcgcacgtgttcaggatggacgtcccggggctggccagggagcaggtggccgtggagctggtggacggccgcgtcctccgcgtccgcggcggcggtggcaagcaggacggcgacggcgcggcggcgggccacgaggaagaggaggggggcggcgacggaggcggcgacgcgagcgtgaggtggcactgcagggagagggccggcgcgcgcgcgttcgagacgcagttccgggttccggacgacgcggccgcggacgaggcgcgcgcggccatggcggacggggtgctcacggtgaccgtgcccaagcggaagggcggcagcggcaagaagcggcgccacggcggcagcgggcccgctgcggcctggaagccccagcag

SEQ ID NO: 128901 - DNA, 684 bp, Zea Mays
atgcaatgcaggtacatgctctctcgggcatctgttccacgccatgccattattaaaaagcttgcaggagaggatattgcacatttagatgaccttattgcagttctttcaaaattgtctaggggaacacgagtgcctctagaatacgtcaaataccctgaccgtcacaggaacaaatctgtactggtgacaatagatcaacatgaatggtatgcgtcacctcagttatatactcgaaatgatgcaactggcttgtggactggaaaaccagctataccaccagaatctccgtttttagctctagctcatcatgctagtcatgtggacacaaactcaaacgctgtttcatctttatccgaatctagtcctatggatctcaagtgccagtatgattctgagaacctggcagacggatgcatcaaaatgcaaactgatgatgagattgttgtggatggatctcattctaacgaagattctgttattgagaaaaaaaggcgacgtgtggtcgaggagatagctgccgacggaactttaccatcttatggagatctagaggatgtaaaaggtggttctttgaggcatccttctaatgcagatggatctgaacttgctcgaacaatatcaagcaatgcatcattggcagaacaagtaattgaaccagcccttgtgatgtttgaggtttaa

SEQ ID NO: 128902 - DNA, 931 bp, Zea Mays
cttccgaaatctcgtgcggcggccggcaagttcgcacttcgcagcgcattcaccaccagcttcactcccaactaccgctgatctcactcacgctcaccccagccggccagccccgtccccatccggctagaggttcacatcacctgcgtgacgataaacatcctcttccaaatcgtagtctagcccgtgcccaaaaccctagcgaccgccggagagctcgtccgaatcgaggccaccgaggggaaattagatcgcggcggacgatggagagccctgcgaaagaggaggccgggggagagctggcaatggagatcgagtcgtcggtcacggcggaggactggcgccgcgcgctttctcgcgtcgtgccgtccgtcgtcgtcctccgcaccactgcgccgcgcgcctttgacaccgaggtcgcgggcgccagctacgccacgggtttcgtcgttgacaagtcccgcggcataatcctcactaaccgccatgtcgtcaagccagggacctgtggtcgcggaggcccatgttcgtgaacagggaagagatccctgtgtacccactgtacagagatcctgtacatgattttggtttttttcgctatgatccaggtgccattaagtttcttaagtatgatgagattccgctggcacctgaagcagcatcagtcgggctagaaatccgggttgtcggaaatgacagcggggaaaaggttccatgaattatatcttaaattctgctgttatgtacccctaaaatatacgtccttgttagacaccacagaccacagcagttgcatatttttttgcattgttccctgtcaaaccttagtgccttagatttctcctttttgtgcactgtgaaacaaatcttctgcttttgcaatatccagaactcacggaactaaggttccacccatcatacactccatcaa

SEQ ID NO: 128903 - DNA, 917 bp, Zea Mays
tgcggcggccggcaagttcgcacttcgcagcgcattcaccaccagcttcactcccaactaccgctgatctcactcacgctcaccccagccggccagccccgtccccatccggctagaggttcacatcacctgcgtgacgataaacatcctcttccaaatcgtagtctagcccgtgcccaaaaccctagcgaccgccggagagctcgtccgaatcgaggccaccgaggggaaattagatcgcggcggacgatggagagccctgcgaaagaggaggccgggggagagctggcaatggagatcgagtcgtcggtcacggcggaggactggcgccgcgcgctttctcgcgtcgtgccgtccgtcgtcgtcctccgcaccactgcgccgcgcgcctttgacaccgaggtcgcgggcgccagctacgccacgggtttcgtcgttgacaagtcccgcggcataatcctcactaaccgccatgtcgtcaagccagggacctgtggtcgcggaggcccatgttcgtgaacagggaagagatccctgtgtacccactgtacagagatcctgtacatgattttggtttttttcgctatgatccaggtgccattaagtttcttaagtatgatgagattccgctggcacctgaagcagcatcagtcgggctagaaatccgggttgtcggaaatgacagcggggaaaaggttccatgaattatatcttaaattctgctgttatgtacccctaaaatatacgtccttgttagacaccacagaccacagcagttgcatatttttttgcattgttccctgtcaaaccttagtgccttagatttctcctttttgtgcactgtgaaacaaatcttctgcttttgcaatatccagaactcacggaactaaggttccacccatcatacactccatcaa

SEQ ID NO: 128904 - DNA, 1042 bp, Zea Mays
acttgacctgaccaccaccagcaacagcaccacgcacgcacgcacgcataactcacacgcgagccacaggaacgacaggacagagagacattgccgcgctgcgttgcgtgccacagccacacacacgaactccagcggctgtgttcctgtgcgagcgaggcaatgcaagcaagcaggagcaggagcaggagcaggatgggttctttgcaccacccgcggtcaccggaggagaactacgtgaggctgcagggccggcgggggcggcggcgggggtttcggctgtgcccgaggaaccgcttcttctccgtgcggcggctgcgggtcgagctgctcacgttcctgggcctcgtcggccgctacgtgcgcctgctcgtgcggaagctgtcggctagcagcagcggcggcggtggcggctgcgcgcggaggaccggcagcagaagggttctcgtcgtgacgacgacgacgacgactgccgggaagaaatacaaggcgccggcgccggcgccgatcgtgcggtccaactccttctactcccaggccatcgccgactgcctcgagttcatcaagcgcaactccgtgcccgccgaggactacggcagcctcagcgcccggaggtaagtagcctagtaggcagctaggcgctccagggctccaggctccgtcgtccgtctggagcagctggcagcaggacaacaggatcgaagaagaagaaacacgcttacacgctacccgagtggcgtggccgtggcacatacatatgcgtgttcccatcggagccatacagatgtggatcttctggtacatacacacgtacggatgtaatagagtgtttgaaacttctagagttgcaaatgcatgttgaacttttttttgatggcatgttcgtctgcacacgcttgccatacatttaccatctatcgtgtcgtcgctcaatggcctgtagaggggagtggtggcggtacgagtacgatcgacgctggagccatttcttaattttcgtcatgacccgtgcgtttattcctttttttcctgaataaaataa

SEQ ID NO: 128905 - DNA, 1272 bp, Zea Mays
atgagcacccagggaaactgtgagacgcatggtgcagcagtgccaggaactaaggatgcaggcacaggaaaggcagggcaatcaagtggcgatcaacaagaggagaagttacccaagtgtgagcaggtcgactatggaagtgaagttgaaggctgcacagatgatgagaaccctggcaagagggctgctttagttactttagttggaaatgaatattgcggcgacgaggatgagagagttcaagtgctcaccattgtcaagaaggacgagcctgcagatgacattgtcgaccattttaatcctgggacagttgcagggtacagtgaagcgaagggtgctgtaggcgcttctgccgccacttctgcggtgcgacctgctggctcccgatcgtcaagtttccatggtgtgactaggcatagatggagtgggaaatatgaagctcatctgtgggacagttcttgcagagtagagggacatagaaggaaagggaaacaagtcccacacatgtttgttatgatatttatgtgccctatattggttggttcacttagtatttctggcatttcacacttgaggtatgagcttggccgccagcctgctaacaccaaactgtctagcaataagacagttaggagggtctgtgtccgtggaggcaacgtgaagtggagggctctccgattggatacaggtaactactcatggggaagtgaggctcttacccgcaagactcgcatcttggatgtggtctataatgcatcaaacaatgagcttgtgaggactcagactcttgtgaagagcgccattgtacaagttgatgctgctccattcaagcagtggtacctcactcactatggagtggacatcggtaggaagaagaaggtgtctgtcgctaagaaggatgcgactgaggtgcctgtcgctggagctcctgtgcgaggtggtgcgggacacgtcgagctccttcacctcccggtttgtgtcagtgcagtttctgtggttttctcacttgaggatggccatgtggtaacatctggtgagccattggagtaccactatgatggcatacttgtcaattctattgaggcaagaccagtattcttaaggccccactcagaagcatttcaggttgacagctttattgctagaagttaccatgaagatgtgaagattagcctgcatgtgaagatcagctttattgctaaaagttaccatgaagatatgattgaatggttgactcagataagtatgtcaacaacaactgctttacaatag

SEQ ID NO: 128906 - DNA, 769 bp, Zea Mays
actgaatacattcttttgcaggtgggtaattgagccacctttggaaatcgtcgtccccgcaaagcgcactccatggcctgaaaccaccaccgagcttccatctgagttattggatgacaagcaaaagctggaggataggcacttgtcaagaggcaacaaattgtctcggccccgaggcaccacgaaacggaagggcgaccctcaagggcaagataactgatggagaacgcactggcattgtaatgtatatctcttgcaccctgcaagaacacggtaggaagcatatcgggttactctggcgtggtggtgttttttttctgatgtttttgctcttgtggcgatggtccacgcttgggtgtgttatctgtagagtgcagatttctaaagtagttgtacctgttgtgttgtaatgtaactgcattgggaactaaaaaaatgggggctagattctggaagcctatctatgcttgtgaagggaggtctgaacactcttgggtgctgcagcacgggctgatggctggttgagcatatgaatcttctctcaggaagagattccttctttctttatttattttattattgttactaaggactcttagatcaaatccatgtgtgttgagtgagaattgagatgggcagggattactccaaatccctttgttttggacggggacttggtttgttttctccaacaattccagcctgccctgattgcctgtctgagaaatggtcgtggttgtactgttggagacttggtttgttttactgg

SEQ ID NO: 128907 - DNA, 1954 bp, Zea Mays
aggcaatcacaattccctttcccctcgccgccgcctcgctctctgccttttccacctcccccattcccacccgccgattcactcaccttggggcctcacgcggtcgcgcctccagcctcccctacccctactcccctcgcgcccagggaggagcccgagtcgcggcgagcgaagattccctccgattgctctcctcctagaacttccgatcggctcgtgatggccatgcagcagcacgcggcgtcggcgtcgagctccagcttggggctgcaccttctcgcctcgccctcgtccatcagggaggccacccacaccaaggttttcgtgggcgggctcgcctgggagaccagcagcgacaggctccggcgcttctacgagcgcttcggggacattctcgaggccgtcgtcatcaccgaccgccactctggccgctccaagggatacggattcgtgacattccgtgaagccgagtccgcgagcaaggcctgcgaggaccccacgccggtgatcgatggcaggcgcgccaattgtaacctggcatctttgggtcgagcccagcatcccgtgccccctgggcggccaagatcagctgggtcctatttgggtgtcccagttccaaaggccttctatttagggggttacagccaccaccgaccgtttccacttgggtactaccaaggatttcctgttccccagtacagttacccttcatatgggaccgaatacatctatccacaggttgaagccttaaaagctatcagcttttatatatttgtgctgcataagacagttacacaaatctttgcctattctgacagatgttctctttgtagggtacattaaactcatattccggtcagcaatatcttcctatttatggagtctcagctgcagcgaacacatccaaccaagcatttagccagctgagtccatccgtttccggtggtggcaatggttatttgtcggttcatagttacaacgtgcctggaaatcaatatgtgcagctcactggatccaacttcagcggtgcatcaccaaccgctcgaccttccattcagacttcttttttagtagcaacacccgttcctgcacatccacacctaataattccagccccctcaccccagtttacacaagctagtggttcagaccaaagtgcaagttgaactgtgcatccaaacatttgtaccttgaggtacccttagattgcagcaggactaaaaagagcagtgttgctgtattcacagcatttgttcttgcctggcaagcaatcatccttgcattcataaggttgtcgttatcatggtcaacagatgtacctggaaaccatgaagttgcccctatggatggggcaagtgatccaagagtaacagttgctcttgcagtttcgctcagtttaaatcgcaagcgtgatggaaatgtagcttatgctggaatggagtccagcatatgtaagatggattaatccaatggagatcagccttcaggtgattgtgcatctgaaaattcgtgttggtgtgtggtccctagtcccagtcaccgtgcacagggtctgatgatcaagaagtgtgtcctgtcctgtacaagtctgcagtcatcaactcatcaccccgttgtctgcatgactagggcctgtttggtttggtgtctaacttgccacactttgcctaacttttctgtctaaggttagtttttcaattcgaaggactaaccttaggcaaagtgtggcagatttagccaccaaccaaacagcccctacattcatcagcggtcagcctttggaccaaactctggaagacctagctactctcttttcctgagagttaccagtaagtgtatccagttctgtatgcagtcatcatcgtgttgtttacaccactgggttgtagccagtgatgatatgatcattcgtctgtaccaaatttttattgttgcaactaaggtgtgatctagc

SEQ ID NO: 128908 - DNA, 2017 bp, Zea Mays
aggcaatcacaattccctttcccctcgccgccgcctcgctctctgccttttccacctcccccattcccacccgccgattcactcaccttggggcctcacgcggtcgcgcctccagcctcccctacccctactcccctcgcgcccagggaggagcccgagtcgcggcgagcgaagattccctccgattgctctcctcctagaacttccgatcggctcgtgatggccatgcagcagcacgcggcgtcggcgtcgagctccagcttggggctgcaccttctcgcctcgccctcgtccatcagggaggccacccacaccaaggttttcgtgggcgggctcgcctgggagaccagcagcgacaggctccggcgcttctacgagcgcttcggggacattctcgaggccgtcgtcatcaccgaccgccactctggccgctccaagggatacggattcgtcggtgcctctcgatttcactcctttttcgctgctaattttgcttctgtgtatgtggcgttcccgtgcgtatgtgcgcgcgcgatagatgtgctgcgacgacttgtgtacgtgtaactacttaactgtgttgatttttgctctcccttcttccacaggtgacattccgtgaagccgagtccgcgagcaaggcctgcgaggaccccacgccggtgatcgatggcaggcgcgccaattgtaacctggcatctttgggtcgagcccagcatcccgtgccccctgggcggccaagatcagctgggtcctatttgggtgtcccagttccaaaggccttctatttagggggttacagccaccaccgaccgtttccacttgggtactaccaaggatttcctgttccccagtacagttacccttcatatgggaccgaatacatctatccacagggtacattaaactcatattccggtcagcaatatcttcctatttatggagtctcagctgcagcgaacacatccaaccaagcatttagccagctgagtccatccgtttccggtggtggcaatggttatttgtcggttcatagttacaacgtgcctggaaatcaatatgtgcagctcactggatccaacttcagcggtgcatcaccaaccgctcgaccttccattcagacttcttttttagtagcaacacccgttcctgcacatccacacctaataattccagccccctcaccccagtttacacaagctagtggttcagaccaaagtgcaagttgaactgtgcatccaaacatttgtaccttgaggtacccttagattgcagcaggactaaaaagagcagtgttgctgtattcacagcatttgttcttgcctggcaagcaatcatccttgcattcataaggttgtcgttatcatggtcaacagatgtacctggaaaccatgaagttgcccctatggatggggcaagtgatccaagagtaacagttgctcttgcagtttcgctcagtttaaatcgcaagcgtgatggaaatgtagcttatgctggaatggagtccagcatatgtaagatggattaatccaatggagatcagccttcaggtgattgtgcatctgaaaattcgtgttggtgtgtggtccctagtcccagtcaccgtgcacagggtctgatgatcaagaagtgtgtcctgtcctgtacaagtctgcagtcatcaactcatcaccccgttgtctgcatgactagggcctgtttggtttggtgtctaacttgccacactttgcctaacttttctgtctaaggttagtttttcaattcgaaggactaaccttaggcaaagtgtggcagatttagccaccaaccaaacagcccctacattcatcagcggtcagcctttggaccaaactctggaagacctagctactctcttttcctgagagttaccagtaagtgtatccagttctgtatgcagtcatcatcgtgttgtttacaccactgggttgtagccagtgatgatatgatcattcgtctgtaccaaatttttattgttgcaactaaggtgtgatctagc

SEQ ID NO: 128909 - DNA, 1966 bp, Zea Mays
aggcaatcacaattccctttcccctcgccgccgcctcgctctctgccttttccacctcccccattcccacccgccgattcactcaccttggggcctcacgcggtcgcgcctccagcctcccctacccctactcccctcgcgcccagggaggagcccgagtcgcggcgagcgaagattccctccgattgctctcctcctagaacttccgatcggctcgtgatggccatgcagcagcacgcggcgtcggcgtcgagctccagcttggggctgcaccttctcgcctcgccctcgtccatcagggaggccacccacaccaaggttttcgtgggcgggctcgcctgggagaccagcagcgacaggctccggcgcttctacgagcgcttcggggacattctcgaggccgtcgtcatcaccgaccgccactctggccgctccaagggatacggattcgtgacattccgtgaagccgagtccgcgagcaaggcctgcgaggaccccacgccggtgatcgatggcaggcgcgccaattgtaacctggcatctttgggtcgagcccagcatcccgtgccccctgggcggccaagatcagctgggtcctatttgggtgtcccagttccaaaggccttctatttagggggttacagccaccaccgaccgtttccacttgggtactaccaaggatttcctgttccccagtacagttacccttcatatgggaccgaatacatctatccacagggtacattaaactcatattccggtcagcaatatcttcctatttatggagtctcagctgcagcgaacacatccaaccaagcatttagccagctgagtccatccgtttccggtggtggcaatggttatttgtcggttcatagttacaacgtgcctggaaatcaatatgtgcagctcactggatccaacttcagcggtgcatcaccaaccgctcgaccttccattcagacttcttttttagtagcaacacccgttcctgcacatccacacctaataattccagccccctcaccccagtttacacaagctagtggttcagaccaaagtgcaagttgaactgtgcatccaaacatttgtaccttgaggtacccttagattgcagcaggactaaaaagagcagtgttgctgtattcacagcatttgttcttgcctggcaagcaatcatccttgcattcataaggttgtcgttatcatggtcaacagatgtacctggaaaccatgaagttgcccctatggatggggcaagtgatccaagagtaacagttgctcttgcagtttcgctcagtttaaatcgcaagcgtgatggaaatgtagcttatgctggaatggagtccagcatatgtaagatggattaatccaatggagatcagccttcaggtgattgtgcatctgaaaattcgtgttggtgtgtggtccctagtcccagtcaccgtgcacagggtctgatgatcaagaagtgtgtcctgtcctgtacaagtctgcagtcatcaactcatcaccccgttgtctgcatgactagggcctgtttggtttggtgtctaacttgccacactttgcctaacttttctgtctaaggttagtttttcaattcgaaggactaaccttaggcaaagtgtggcagatttagccaccaaccaaacagcccctacattcatcagcggtcagcctttggaccaaactctggaagacctagctactctcttttcctgagagttaccagtaagtgtatccagttctgtatgcagtcatcatcgtgttgtttacaccactgggttgtagccagtgatgatatgatcattcgtctgtaccaaatttttattgttgcaactaaggtgtgatctagcgtgtagtgctctgtgtttggtggtttcaagtatagagcgcttctcttgtacttcaaaataaacccgtttacccatgatgatgctatatttagtagatttctcttctg

SEQ ID NO: 128910 - DNA, 437 bp, Zea Mays
gcattcctagggcttatattattgattctctaccatgtgacaccagcctcttaaaaatgttcccttgtccagtcgtccttaagattacctgtacatatataggtagtgtttgtttatttgagttgaataagtcacattactcggactacatacactcagtagccaaggtacccttagattgcagcaggactaaaaagagcagtgttgctgtattcacagcatttgttcttgcctggcaagcaatcatccttgcattcataaggttgtcgttatcatggtcaacagatgtacctggaaaccatgaagttgcccctatggatggggcaagtgatccaagagtaacagttgctcttgcagtttcgctcagtttaaatcgcaagcgtgatggaaatgtagcttatgctggaatggagtccagcatatgtaagatggattaa

SEQ ID NO: 128911 - DNA, 3888 bp, Zea Mays
atggaggactacccggaggagctgcggacgccgccggtgtcgctagtgtccatcgtggggtgcccagagcttcacccctcgatctcgacggcactcagctcccagcagcctcccatgaacacactggccctcccggacttcgccaaggcctctattctggcccgcagcgttaagccccgcgaccctctcgcaccgccgcaaccccccgcgggaatcctcaagaaggactggctacttaagcaccgcacccgcgtcccggccgccgtcgccgcgctgttccgtgccgaccaggtctccggcgaccccgcccagtggctccaggcctgctccgatctcgaaaacctcaagtctgcaattcaggggaaaaacactaaatcagtggtggtccttgtgcaggctcaagctaatgatgagctgagtgaggatgtaattgttgccctgagaaaacgtgctgaaatcgattccaagcacttggttgtgctagttgagcacgatgaagcagaatggaacagatctctgaacaaattgaagaatgtctttgtggagttatgtgcagcattctataaagaggaagggcgaaggataaaggctcgcattgagaaaaagaactttgcttctgttgagctgagcatccggtactgtttcaaggttgctatttatgcggagttcagaagggattggccagaagcattgaagttctatgaggaaggtgttcgtgttttgcgtgagatgattggaacttcgacaaggttgcctccaacccaacgcctggttgagataaaagcagttgccgagcaatttcactttaagatatcaaccttgctacttcatgccgggaaagtggtagaagcaatcacatggttccgtaagcatatcaaaagctatgaacgggttgttggaacaccagaagttgcttttcttcactgggaatggtttagcaggcagttccttgtctttggtgagctgatcgaaacaacatccacaactattccagatacactatctcctcgatttggcactgcagacaacacattgactgagtgggaatttcagccagcatactactatcagttagcggcaacttacttgagggagaagaggtatgccatcgaatgctcgtcatcaatggctaaccttacaacagaagttaatggagtacctgagtcagtaatgccttctgtatatgttggccaatatgtgcgcttgtttgagcaaggagatacagttagtctactaccctatgctttgtcagaagctgaaaggtttcaagattcttatgagataatagcattgttcagaaaagcttatgaatcatttcagagcctaggtgctacaagaatggcttctgcctgtagcagtggaatggccatagaatattatgcagctgctgattttagcaacgcaaaacagctttttgatagtgttgctggtctataccgtcaagagggttggaccagtttgctctgggagaacctaggatacttgagagagtgctcaatgaaacttaattctcccaaggattttatcagctattccctagagatggctgcattaccattattttctggtagtggagaggaaaatcgagaaaacaaaattaagagtgggcctgcaggttcccctaccatttccaggagagagaatatacagcaggaagttattaatgttttggaaagaaaacagtcatcagaaggaacatatgatggatttaataatgcgatagaagaagttactcaccttgatattgatcagataagtccgctaagaatggtgcttactgcatctgttgcttttcatgatcaatctgtaaaacctggttcacctctgcttgtcagcgtgtcactcttatctcatcttccttctccagttgtggttgatcagttggaggttcagttcaatcaatctgactgtaactttgtgatgcatagtgcacaggaagactcactcccttcatattcaaatttgcatggccaagttattcaagatacttcttctcttactctcttcaccaatagatggatgcggttgacacatgaagtaaaatcaggaaagagtggaaagctagaatgtttgtctgtgaaggcgacaataagcaaacaccttgtgatttgctgccatgctgaaagccctgcttccatggaagacttcccattatggaaatttgagaaccaagtggagacactgcccacaaaggacaccactcttgccttctctggacagaaacttattcaagttgacgagccagatgctcaagttgaccttgtcttaaattctgctggccctgctttagttggagagttatttactttaccagtgatcatagagtcaaaaggacatgcagtccattctggtgaactgaaaattaacctcattgatgctagaggtggtggtctgttgttgagtccgagggaagcagaagattctgaaagtcatcatgttgaacttcttggtgtctcaactgtgtctgaggataaagagtcaaaggaagaggctgatagcataagaaagatccagtattcatttggggttgtatctgttcccacattgagtgtgggtgattcctggtcatgcaaattagaaatcaaatggcatcgagcaaaatcagtcatgctttatgtttcacttggttactccctaggctcaagtgaagaagaagcattgcaccggcttaacgtccatagaagcttgcaaattgaagggcagatccccttattagttagtcatcagtttttgagatcatttaggcgagaaccgttgttgctatcagggatcaggtccttaggaagtgatgataaaaaatgttctcttgctatgaatgagtctaacatgctaattgtgactgcaagaaactgcactgaagtgcctttgtgtttgcattcaatgaccattcaacctgatggtgattcagagcagctgtgttcagtgcaacagatcagtggaatttccaatcgtcatgcaattgttgctcctagggaggaatataaaggaatattttcggtcaatccacgggctatcagtacaaacttcagactaggtgaaatttgcctgaattggtcaagagattcaagcctcggtgaggatcaagataggcttattatcatgaaagtacagttacctgaggtcaacattgaggagccgccgcttgttgtgggcatggagtgccctccctatgcaatcctcggcatccctttcactatctatgtgaagattcacaattcaacgtctttgcttcaggaaatcaagtactcccttgttgattctcagaatttcgttttttctggtgctcacaatcatgctgctttcattctaccgaaatcagagcacactgttagtcataagtttgtaccgcttggttctggctctcagcagttgccaaggatcacagtaacttcagtgcggtattctgctgcattgactccttcagcctcagcagcgactgtctttgtgtatcccagtgagcctaaattcaacttggaaactagccattcaacatccgatgaggtcgtgagttgagacctaagcagcctgaagtctcccctctcctgacacttagctcgacccgggcttcatgtgaggtaaggtatgctactggaaagaccaccagcttgacatttcatgttgattgttgaagaaacgaatcagattcctgtcggcgagaaggtcgctgtgcaaaagttttggcattatatttcgaggtttcgattttgtagcgcttctcgattaaccacatatgtgtaacttatgattacttcattgtttttggttcaatggtgcaacatacacaggaagataggctcttgtaaattaccatcccaccagtaaagtgggggaacaaaccagccccatgtcagtttttactctttgatgcttgccaactcgtcaatttgt

SEQ ID NO: 128912 - DNA, 1432 bp, Zea Mays
tcttccaaaaatcaagcaaagaaaatattcgcagtgttgcgcacttcgcgtctcgataaagccgaccgcccgacccccaactgttccgtcaaagcagagtctgcccctccccgcgccgttctttttggttccccactccccagtccccgccgccgccgaaacccgcagatggaggtcgtcgtcgccgcgaagcagaaggcgaagaaacacatacacctcttctactgctcagaatgcgaggagctcgccctcaagatcgccgccagctccgacgccatcgagctccaatccatcaactggcggagcttcgacgacgggttcccgaacctgttcatcaacaaggcgcacgacatccgtgggcagcacgtggcgttcctggcctccttcagctcgccgtcggtcatattcgagcagatctccgtcatcttcgcgctgcccaagctattcattgcctcattcactctcgtgctgcctttcttccccacgggctcattcgagcgcgttgaggaggagggcgatgtcgccaccgcgttcaccctcgcgcgcattctctcgatgatccccaagtcgcgcggcgggcctaccagcgtcgtcatctacgacatccacgcgctccaggagaggttctacttcggggacgacgtcctgccatgcttcgagacagggatcccgctcctgctgcagcgcctccgccagctcccggacgcagaaaatatcaccattgcctttccagatgacggtgcgtggaagcggttccacaagctgttacagcactttccaatgatagtctgtaacaaggttcgggaaggtgacaagagaatagttcgtataaaggaaggactacctgaaggccgtcatgttgttattgttgatgatttagtgcaatctgggggaactcttagagaatgccagaaagttctagctttgcatggcgctgcaaaagtcagtgcttatgtgactcatgctgtgtttcctaagcagtcatatgaacgtttcatggcgtctagttctggtaattggcaatttgcttacttctggatcacggactcatgcccacacacagtaaaagctattgggcaaagacctccatttgaggttctgagcctcgctggctcaattgcagatgctcttcagatatgagcgtacactggtggaatgctcccgcttttcctaaatgtaagagttggtttccagttcctggaaaagcaaataatgtgtagtaagttaagtacctgaaggttccataaacagccctgtggtttgtaataaaatcaggcattggatactcaattgttgacagctgtgtatttgtcaatgttcacttctgtttgaagtgcgcgagaccagtgctttactttcctgacccgtcggagtatcggtttagcaacttcaggtactgggctttgttgtgaacaaatagtgcaatgtaact

SEQ ID NO: 128913 - DNA, 1580 bp, Zea Mays
tcttccaaaaatcaagcaaagaaaatattcgcagtgttgcgcacttcgcgtctcgataaagccgaccgcccgacccccaactgttccgtcaaagcagagtctgcccctccccgcgccgttctttttggttccccactccccagtccccgccgccgccgaaacccgcagatggaggtcgtcgtcgccgcgaagcagaaggcgaagaaacacatacacctcttctactgctcagaatgcgaggagctcgccctcaagatcgccgccagctccgacgccatcgagctccaatccatcaactggcggagcttcgacgacgggttcccgaacctgttcatcaacaaggcgcacgacatccgtgggcagcacgtggcgttcctggcctccttcagctcgccgtcggtcatattcgagcagatctccgtcatcttcgcgctgcccaagctattcattgcctcattcactctcgtgctgcctttcttccccacgggctcattcgagcgcgttgaggaggagggcgatgtcgccaccgcgttcaccctcgcgcgcattctctcgatgatccccaagtcgcgcggcgggcctaccagcgtcgtcatctacgacatccacgcgctccaggagaggttctacttcggggacgacgtcctgccatgcttcgagacagggatcccgctcctgctgcagcgcctccgccagctcccggacgcagaaaatatcaccattgcctttccagatgacggtgcgtggaagcggttccacaagctgttacagcactttccaatgatagtctgtaacaaggttcgggaaggtgacaagagaatagttcgtataaaggaaggactacctgaaggccgtcatgttgttattgttgatgatttagtgcaatctgggggaactcttagagaatgccagaaagttctagctttgcatggcgctgcaaaagtcagtgcttatgtgactcatgctgtgtttcctaagcagtcatatgaacgtttcatggcgtctagttctgctggggccaggtgacagatttgcttacttctggatcacggactcatgcccacacacagtaaaagctattgggcaaagacctccatttgaggttctgagcctcgctggctcaattgcagatgctcttcagatatgagcgtacactggtagatgggcatgggcttggattgttgatgcccaccagattgaaacttgtactatgaggtggaatgctcccgcttttcctaaatgtaagagttggtttccagttcctggaaaagcaaataatgtgtagtaagttaagtacctgaaggttccataaacagccctgtggtttgtaataaaatcaggcattggatactcaattgttgacagctgtgtatttgtcaatgttcacttctgtttgaagtgcgcgagaccagtgctttactttcctgacccgtcggagtatcggtttagcaacttcaggtactgggctttgttgtgaacaaatagtgcaatgtaactgaacatgaacctaattgaatttctattagattggatggtcatattgcaaccatgacatgttggcctccttgaattttactgtt

SEQ ID NO: 128914 - DNA, 1107 bp, Zea Mays
aaatagcagcaggcatttgacatggaacccaaactcgcggtcgcggtgttcgtcctgttcctagcgtttgcagcctgttccgcgaaccaccaccgagacccctctgtcgtcggatactcccaggaagacctcgcactgcccagcagcctcttcagatcctggtccgtgaagcacggcaagctctacgccagcccgacggagaagctggagaggtacgagatattcaagcagaacctgatgcacatcgcggaaacgaacaggaagaacgggagctactggctgggcctgaaccagttcgccgacgtcgcccacgaggagttcaaggccagttatctgggactgaagcgagcactgccaagagcgggcgcgccacagacacgcaccccgacagcgttcaggtacgcggccgcagccgcaggcagcttgccctggtcagtcgactggaggtacaagggagccgtgacgccggtcaagaaccagggaaaatgcgggagctgctgggccttctcgtcggtggcagcagtcgaagggatcaaccagatcgtgacgggcaagctggtgtcgctctcggagcaggagctggtggactgcgacaccacgctggatcacggctgcgaaggggggaccatggacttggcgttcgcttacatgatggggagccaggggatccacgccgaggacgactacccgtacctcatggaagaaggctactgcaaagagaaacagccatgtgtattgggaataaccgaacaagacctaactggattcgaggatgtcccggagaacagcgagatcagcctgctgaaagcgctggcccatcagcctgtcagcgtcggcatagctgcagggagcagggacttccagttctacagagggggggtgtttgacggggcctgcagcgtcgagctcgaccatgcgctgacggccgtcgggtacggctcatcgtacggccagaactacatcaccatgaagaactcgtggggcaagaactggggggagcaaggctacgtcaggataaagatgggcaccgggaagccggagggtgtctgcggaatctataccatggcctcctatcccgtgaaaaatgcaacacgctggggtgcttaa

SEQ ID NO: 128915 - DNA, 1972 bp, Zea Mays
cgtccacttcacaaatttgcagtagagagtccagtccagactccatcgagttggtctttggtcgtgcatcgtgctgaactgctgacgcttcgcgcgggtccgaggtcaggcagcagcagcacggagtagcaccagggcgaccgcccaggttatcgtcggccgccggcgacctgtaccccggcgaggagatgcatctgagcgcgaacgaggggatcgagggtctgcgattcgcggtgacgggcgggcagggcttcgtcggagctgccctcagcctcgagctgctccgccgcggtgcccgcgaggtccggtccctcgatctccgcgcctcctcctcctggtcccagcagctcctcgacgccggcgtccgaatcatccaaggggacataagaaagaaggatgatgtgcggagggctttccgtggagtggactgtgttttccaccttgcttcttatggcatgtcagggaaggagatggtgcagactgcgagatctgatgaggttaatataaatgggacctgcaatgtactggacgcttgccatgagcaaggtgtcagaaggcttgtgtatgtaagcacatacaatgtggtatttggaggaaagccgattgtcaacggaaatgaggcgttgccttattttccgattgaagaccatgttgatgcttatgggcgcagcaaatcagttgctgaacagctggtactgaagagtaacgggcggccagctaagagtgataaaagtagtcgtctttatacatgtgcaattcgccctgctgctatatatggaccaggtgaagagcgtcattttccaagaatcctgtcccttgcaaagttgggattagctttcttcaaaattggggacccaggtgtcaagacagattgggtttatatagataatctagttcttgctctgatattggcaagcatgggacttttagatgacattcctgacaggaagggaactcctgtagcagctggtcaggcgtatttcatatgcgatggatcaccatgcaatacttttgaatttatcatcaagcccctttttcaaagtttgggttattccgttcctcaagtggtgctggatacctccgttgcccttgccgtttcaagaatatttttattcatatctacactgttctacccatggcttgatagtaaatggatgcctcagcctctaattctccccgctgaagtttacaaggttggtgtcacacactacttttcgttcttgaaagctagagaggagctcggctacgtgcccattgtgaggccccacgaaggcttggccgcaacgatctcgtactggcaagagcggaagagaatggagctggatggcccgaccatatttacttggctggccgtaacgatcgggatgctggccgtgttttctgccgcctgcctcccgccagtcggcccgttgaaatgggtgctcgacgtccacatgtttgttttccgctcgatgctcgtgatccggctggtcttggcggtagcgatcgcactgcatgctggcgaagccgtgtacgcctggttcttggcgagaagggttgacccgaggaacgctgccgggtggttctggcagaccttcgctctggggtacttctccctccggtaccttctcaagagaggcagagcgtgaattcgtgtttggttcacatgtacgtacactgcggatcctgtaacagtggttccaacttccaagcttcatgcttggtttttattgaggaggaggcgtcaggcgtatgagcaatccccagatcgtatccctcctgacatctgcctgtggtcggatcggatgtactttgtggtgatactgtgaactggtgaaagtttaacaggtcgctttcttggatgagctgtaatgtaactagccattgttagatccaaatgcaactgatgctccagcagaaatttggtggctgtcgcacatctaacgccgtatacgaaccgtatgatattattgatattgatacgtcgaagctg

SEQ ID NO: 128916 - DNA, 801 bp, Zea Mays
atggtgcggaggagaaacacggtagccgcgggcgtggtcccggcgtccgccgaccccgacaccatctccgactccggctcatctacgtccgcgccgccgccgcagccggggaggaagcagacttactccgccttgcaggttgcccgtgctggagcgccggccaccccgactcttgaagacgcgcagcctgtcgccgtcgagatgacgatcaacaactacctgcgcacctacggcaggatcccgatggcatgctgttgctcggaaggccaaggcccccacctggacctcaacgccctggcgccgccccaacgcgacccacctgtgatctgtgcctactgcaactgcgcattctgcttcggcgtgcacgagatcccttcgctagaccatggcccggggcatgtctacccggcgccgctcgtacccgtcaccctaaaccttctcacgccgccgccggtggggccgctgtaccgcgaccgccggggccccgcggccgcgccggcgccgctgctcgtctgctccagcgagcaacacttcaacgccactatcggcatgctgcagcggcggcagggcagcgcgccgccgctggtgtggaagtgtacttgctgtcttcgtgtgcagcccgtcgccgtgggcagcgaaggcgccaactcgccagatctgcatgctactcctccggcgcctcctcctgagccgtggacatacgctggcgcttactggaactatgtggagcccggggacgaggacatggtccgactccacttacattatgatcctctgaaactaagtcttgggcgccggtga

SEQ ID NO: 128917 - DNA, 1216 bp, Zea Mays
atggtagcgtcctctcagctctgcgagcggcggcggctagaacttcttgttgtaccagaagacgcccttgcggtcctcgggctcgacgtagatgcactccctggcctcgcgccaggtcgccttggcaacaggggtcgggtcgaagtggtagtagtccccgaggatgggcctgatcgccttggtggcctccatggcgtggtagtgcggcatggtggagaagaggtggtgcgcgacgtgcgtgtccgtgatgttgtggaacacgcggttgaggatgccgtagtcgcggtccatggtggccagcgcgccgcgcagccagtcccactcgctcgagtcgtagtgggggagcgacgggtgggtgtgctgcaggtaggtgatgagcaccagccacgcgttcacgatcagcagcggcacggcgtacacgcgcaccacccaccagaccccgaacgccgccgccagcttgtacagcccgaacgccacggccacgacgccggcgtccgagacgaagatctgggcgcgctcccggtcgttgtagatggggccgtaggggtcgaagtggcaggcgaagcgcgggtacggccgccccgacgcgttggtcgccaggtacagcggccacccgagggtgagctgcaccacgatgtgcaccacccggccgaccggggttgttgtacacgtacggggtgtaccacggcagcgcctccttcttcttgggcacgaacacctcgtcgcgctccagggaccccgtgttggagtggtggcgccggtggctgtacttccacgagaagtagggcaccatgagcgacgagtgcagcaccaggccgaccacgtcgtccaggagcgagtagtccgagaaggcgtggtggccgcactcgtgcgcgatgacccacacgccggtgcacacgcacccctgcgcgatccagtacagcggccaggcggcgtagcggagcgggcttgggagcgccggtatgatggccagcgcgaagtagaggagcgccgcggcgatcaccaggtcgtggaccacgtacgagaaggacttgagcaccgagcgctcgaagcagtgtggcgggatggccttcttgatctgacccagagtgaacggaggcttctccaccggcgaccgctgcatcgcggcgccaccggtagctcgggcgagctgctcctgcttctcccgctccttctcggtcatcctgccgccggcacccatcttgctcctgactga

SEQ ID NO: 128918 - DNA, 486 bp, Zea Mays
atggcgctcgcctggctcgccgcgcgcccaagcatccgctcacccctgcgcgtgcttcttccccatggcgagctcacccatcctctgctcgttcccatggccgtcgtgtgtagccgcgagctccagtcttcttctctgccccgcaatccatggtgcccggttgaagctccttcctgctcggcgcgcgcccgcctccctgctcccctcgagctcatcctgcccaagtccggttgtctactccttctctgctcgacgccgcggcagacgatgctgcattccggctggacgtcaagatccagtggaacctcgtggtggcggcgctggcggatggcgcgctgctttcgtgattcagcaacggccgacgcccagccccaatttcagcttccagctcgcctccctctatccccatgccgagctcggtcctgtccatctcgccacgctcggtctctagctgcctgtgcgcacatcggtttatggtcgtggtga

SEQ ID NO: 128919 - DNA, 674 bp, Zea Mays
ggtggccggcaatctcttcttccagcgccggtgcccagctcggttcgtgtgggtgcgcagcggcgtctccggtggcctctactctgctctctctggccggccggagctcctgcttggcgtccctctctgctcgttctccccagccaagcggatctcgtccatgctgctctctctctcctgcccctcccatggcgctcgcctggctcgccgcgcgcccaagcatccgctcacccctgcgcgtgcttcttccccatggcgagctcacccatcctctgctcgatcccatggccgtcgtgtgcagccgcgagctccagtcttcttctctgccccgcaatccatggcgcccggttgaagctccttcctgctcggcgcgcgcccgcctccctgctcccctcgagctcatcctgcccaagtccggttgtctactccttctctgctcgacgccgcgacagacgatgctgcagtccggctggacgtcaagatccagtggaacctcgtggtggcggcactggcggacggcgcgctgctttcgtgattcagcaacggccgacgcccaaccccaatttcagcttccagctcgcctccctctatccccatgccgagctcggtcctgtccatctcgccacgctcggtctctagctgcctgtgcgcacattggtttatggtcgtggtga

SEQ ID NO: 128920 - DNA, 1598 bp, Zea Mays
gaccagacccgaacaaagcagagcagcggacagatcaaatcaggacaggcatgctgaactaggcgaggtggactgggcgagcgagcgagatggagtggacgacggtggagacgagggacggcgcgaagctgagcgtgcggctgttcaagccccccgcgtccggaacggggttggagccggagccgagggaggatgtggcggtggtgctggtgcatccctacaccatcctcggcggcgtgcagggcctgctgcgggggatggcggagggcgtcgcgcggcggggttacaccgccgtcaccttcgacatgcgcggcgcgggccggtccacggggcgggcgtcgctcacgggctccaccgaagtcggggacgtcgtcgccgtctgccgatgggtcgcagagaacatcaagccgcgcggcatcctcctcgtcggatcctcagctggtagactccattttttcgcctctccccaatgaggcgaaaccctgtcgcgacccgtacctttttttttcagttcatgaagcgtgaaaccgtcgcacagtcagactgctgcggtaatcaagtcaaaatgatcgaacagtttcgcttttctgaagctctctttggtcaaatttaattgtacaaattacaattctctccgcagtcattcgggcctgtaagcaaatagtagctgttgatgtatgtgttgaatacaaataggaagctcagacgtttgtcctcatggaatttctgcgtttcagtctgtacactccaaatttgtatctgtaatcagcagatgggcattgatatttcatctagttttatttagggacctaaatttctgtcagatatccttaagaaaatatagtggcaaaaggtttattgttaagtaatctacacagctttcagcaaaccctcccagaaatgcaaagtagttttggatgtctgcttcctgtatggctgcaattgtcagtgagctagttgaggaagatgaagtttgtttagtttgcatcgaagaattaagatgtggtattctgcatacaagtcttctcctgtctttatgaagctgatgtgttgtgtttaggcatgtatctaacaataattccttgatgcaggggcaccaattgccggatctgcagttgataaagtggatgaagtgattggttacgttagcatcgggtacccctttggtctgatggcctcagtcctattcggaaggcataatgatgctatactcaagtctgaaaaaccaaagcttttcatcatggggaccaaagatggcttcaccagtgtgaaacaactgcaaaacaagctcaaatctgcagctggacgggctgatacacacttgattgaaggagctgggcacttccaaatggagggccctgcttttgatgcccagatggtagaaattattattaaattcattaattccttgccaaaatagcatttatggtgactgtttgagagtttgcaaaaattctagcgatgagcaaagcttgttatttaaatacagccacgatggtttgtattttctcatcctgcatatgtgtgctctctggtgttattgaaacagtgtaactgtgtgtgttgtatcttaatatattctgatcccgcacctcccc

SEQ ID NO: 128921 - DNA, 1009 bp, Zea Mays
gaccagacccgaacaaagcagagcagcggacagatcaaatcaggacaggcatgctgaactaggcgaggtggactgggcgagcgagcgagatggagtggacgacggtggagacgagggacggcgcgaagctgagcgtgcggctgttcaagccccccgcgtccggaacggggttggagccggagccgagggaggatgtggcggtggtgctggtgcatccctacaccatcctcggcggcgtgcagggcctgctgcgggggatggcggagggcgtcgcgcggcggggttacaccgccgtcaccttcgacatgcgcggcgcgggccggtccacggggcgggcgtcgctcacgggctccaccgaagtcggggacgtcgtcgccgtctgccgatgggtcgcagagaacatcaagccgcgcggcatcctcctcgtcggatcctcagctggggcaccaattgccggatctgcagttgataaagtggatgaagtgattggttacgttagcatcgggtacccctttggtctgatggcctcagtcctattcggaaggcataatgatgctatactcaagtctgaaaaaccaaagcttttcatcatggggaccaaagatggcttcaccagtgtgaaacaactgcaaaacaagctcaaatctgcagctggacgggctgatacacacttgattgaaggagctgggcacttccaaatggagggccctgcttttgatgcccagatggtagaaattattattaaattcattaattccttgccaaaatagcatttatggtgactgtttgagagtttgcaaaaattctagcgatgagcaaagcttgttatttaaatacagccacgatggtttgtattttctcatcctgcatatgtgtgctctctggtgttattgaaacagtgtaactgtgtgtgttgtatcttaatatattctgatcccgcacctccccaaaaaacaaagccgatacaatctcaagttcaaaatattctggttttattccagatatttca

SEQ ID NO: 128922 - DNA, 2522 bp, Zea Mays
ccagcactagtcctgtactcccgtgcgctagtgcgctcggcgctgcccccgtccgcccgcagtccgtccccgctcgccgcccatgcgctcgccggccgcccctcggcgctcccccatctcctcccgctccgcccccgccctccgtctggtagtccgtcgccgctcctcccgcacgccagcacgacctagtagacggctcgaagcgaagacggtcccatttccagtctccgtgagatggatttagaggtatccgagggttcaggtactaatgccacctcggatgaccaatcggtgcaaacgctgcctagaagggcaaagcttttggagtattttcaaccggagttagttgaggtcaatggcgtgatgaaggctatttgcaaatattgcggggcgatgttgaggagttcaagcacaaatagccttagaaaccacgttgcggatacatgtcctaaaatttcagttgaggaccgcaagcaattcattgctacaatggaaaaaggaccagcggaagcttcatttgtgtttgactctcaaaaggctcgtgagtgtatggttaagtggtgcatcagtgccgaggtcgcattcaacaagtttgacgatcctttctttgctcagtggatggagtcaatgcagccatcattcagcggtgttgggcgtcaaacaatgcaaaatgattgtattaccagattcaagatgatgaggcaagagctaagaaatgagctacaaagtcttaactctcggatttgcttgacaactaatctttggacctcaaatcagaagttgggttatctttgcttgacagcccactacattaatgcagactttatcttgaaaaaaaagattattgcgttcaaatatttgaaatatccacatacaggcctagcaatcaaagaaggaattacagagtgtctcaaagagtgggggataaaagagaagatgtttactatcacattagataatgtttctaacaatctgtcagtgcgtgaccttcgagaaagtgggctatttggaggcgatcttcgtattgtccaatgttgtgcacacatattgattctcttagttcaagatggaatggcaattgctcatggagcaatctataagattcgtgagctggtcagacatatcaattcctcaccctcccgcatacaagcttttaatgggattgctgagaggtctggattgccttcaaaggatagattaattcttgacgttccaaaccgttggaattcgacacacgacatgattatggaggccattgagtacaaggttgtcttgaaaagatatgctgaagaacaacttgagccttcaccaaatgatgaagagtggacaaattctgaggcaattggagagtttcttgaggcatttgagaaagctacaaaagcattctcgacacatagaagtccaacatctcatttgtttttacataatgtgctatgtatccatcgaactctgagaaatacaaattggcaaatcaattgtgtgcttaaggattcggcacgggcgatggatgctaagttcgataaatactgggagaagggcaagtataacatgacacttgtcttagccaccatacttgatccatcaaagaagatggattttttggacttcttttatgagaagatgtctcaatattttgttgacatccagataaacgtggtcttggttaaacaatgtctcaccaaattatttgaaaaatatgcaacacttgttcaaatagataataaaagttcaccttttattgatataaggactagtaatttaggctcaacagttcttggaaaaagaaggttggatgaagaattttctcaatggtcccaaataagaggaagacgttttccaaagtctgagcttgacacatacttagaggaagaacttgtgagaatagatgaaagatttgaaattctaaattggtggaggacaaatgcaaacaaatacccggtgctttcagctatggcgcgtgatattttagcaatacctttgagcactgttccttcggagtttgcgttcagcgctggtggtcgtattcttgatgataatcgaagcacaatgacaccagaaacacttgaatgctttgtatgctgtaaggattggttatatgaatacccaaatattcaagcttagttgatctgacttccttcaaacatgttgaacagtacggcattcaagggagatttatgcatcattctgcgggctcctgtagctgcttagggatgacccttccactgctgctcgcttcaagcttgatcagatactctttctactgatacgcaaggtgtaaaactgccgtgttatgtggtagattggtgtgtgtactgttttctttatgtgtaaaactgtctgcttgatcaggggtgagtattgttttctttatcactctggattcatggtaatgagttcctatttcagtatttcttgccaaaaagattgttgtgcattaaggatatttgacagatgttctttgttatttctctcaagacctgaaagtttatcaaccaaatctgccactgtatgcagttctctgt

SEQ ID NO: 128923 - DNA, 2526 bp, Zea Mays
ccagcactagtcctgtactcccgtgcgctagtgcgctcggcgctgcccccgtccgcccgcagtccgtccccgctcgccgcccatgcgctcgccggccgcccctcggcgctcccccatctcctcccgctccgcccccgccctccgtctggtagtccgtcgccgctcctcccgcacgccagcacgacctagtagacggctcgaagcgaagacggtcccatttccagtctccgtggtcaagatggatttagaggtatccgagggttcaggtactaatgccacctcggatgaccaatcggtgcaaacgctgcctagaagggcaaagcttttggagtattttcaaccggagttagttgaggtcaatggcgtgatgaaggctatttgcaaatattgcggggcgatgttgaggagttcaagcacaaatagccttagaaaccacgttgcggatacatgtcctaaaatttcagttgaggaccgcaagcaattcattgctacaatggaaaaaggaccagcggaagcttcatttgtgtttgactctcaaaaggctcgtgagtgtatggttaagtggtgcatcagtgccgaggtcgcattcaacaagtttgacgatcctttctttgctcagtggatggagtcaatgcagccatcattcagcggtgttgggcgtcaaacaatgcaaaatgattgtattaccagattcaagatgatgaggcaagagctaagaaatgagctacaaagtcttaactctcggatttgcttgacaactaatctttggacctcaaatcagaagttgggttatctttgcttgacagcccactacattaatgcagactttatcttgaaaaaaaagattattgcgttcaaatatttgaaatatccacatacaggcctagcaatcaaagaaggaattacagagtgtctcaaagagtgggggataaaagagaagatgtttactatcacattagataatgtttctaacaatctgtcagtgcgtgaccttcgagaaagtgggctatttggaggcgatcttcgtattgtccaatgttgtgcacacatattgattctcttagttcaagatggaatggcaattgctcatggagcaatctataagattcgtgagctggtcagacatatcaattcctcaccctcccgcatacaagcttttaatgggattgctgagaggtctggattgccttcaaaggatagattaattcttgacgttccaaaccgttggaattcgacacacgacatgattatggaggccattgagtacaaggttgtcttgaaaagatatgctgaagaacaacttgagccttcaccaaatgatgaagagtggacaaattctgaggcaattggagagtttcttgaggcatttgagaaagctacaaaagcattctcgacacatagaagtccaacatctcatttgtttttacataatgtgctatgtatccatcgaactctgagaaatacaaattggcaaatcaattgtgtgcttaaggattcggcacgggcgatggatgctaagttcgataaatactgggagaagggcaagtataacatgacacttgtcttagccaccatacttgatccatcaaagaagatggattttttggacttcttttatgagaagatgtctcaatattttgttgacatccagataaacgtggtcttggttaaacaatgtctcaccaaattatttgaaaaatatgcaacacttgttcaaatagataataaaagttcaccttttattgatataaggactagtaatttaggctcaacagttcttggaaaaagaaggttggatgaagaattttctcaatggtcccaaataagaggaagacgttttccaaagtctgagcttgacacatacttagaggaagaacttgtgagaatagatgaaagatttgaaattctaaattggtggaggacaaatgcaaacaaatacccggtgctttcagctatggcgcgtgatattttagcaatacctttgagcactgttccttcggagtttgcgttcagcgctggtggtcgtattcttgatgataatcgaagcacaatgacaccagaaacacttgaatgctttgtatgctgtaaggattggttatatgaatacccaaatattcaagcttagttgatctgacttccttcaaacatgttgaacagtacggcattcaagggagatttatgcatcattctgcgggctcctgtagctgcttagggatgacccttccactgctgctcgcttcaagcttgatcagatactctttctactgatacgcaaggtgtaaaactgccgtgttatgtggtagattggtgtgtgtactgttttctttatgtgtaaaactgtctgcttgatcaggggtgagtattgttttctttatcactctggattcatggtaatgagttcctatttcagtatttcttgccaaaaagattgttgtgcattaaggatatttgacagatgttctttgttatttctctcaagacctgaaagtttatcaaccaaatctgccactgtatgcagttctctgt

SEQ ID NO: 128924 - DNA, 1645 bp, Zea Mays
aaatcctggagccgaaccaaatctctctcctccctaacccccaagccggtgtgctgccccagcaccagcagcagctattcgagctcaaccatccaaaactcccagggcgctagctcttcgttgataaaaacacccctgcttcccttcctgcctgcacaccacatctcaatctttgctgcgagctcccgatctgtggtacttccggcatcgcgaactgaagtttaccaccgatccgttggctccttggcattccttttcctccagcagcggcaaagtctccatctttttgccagccgacttgaggaatggggtgcatgacgctgcttggagtagacgcaagctttatggaaggtcagattcttgtttttcattaatccattgatgtatggagctggtcggctgttgaatcggtccctgtttctgtttctttttcgttcataatttttaaaaaatacttcatctggttattagatgcgtatcgtttgtatttatatagcttccaattggttacatgcatgcagtttgatttgaatccatcggttctcgatacgcatccttgtttctgtttcttgttcttagtttcgttcacagttttttttagaaaaaacccgggccttttcgttttactttatttgattagatgcgtattgcttttttcatgtgggtatatgtaatgaatcgatttcgattgacatggatctcaatagacctcgtagttcatcctctcttcttttctctcgaaggataagttacatacacaatccaatctccattacgatatttggtccttaactacccagatttctgagcatactcgtggttctgcttctgcagaattctagtacttcattcccaacaagcaatcagataaaaacgaaaggagcaacttcaacagaacctgcggctccagtgattggaccgaccgatatttgcaaactgctgaaattgaatccatgggtagaggaagaggaagagggaagaagctaaccactgtcaggagccacgaagataaaggtagcagcggcgaagaagttgtgcctgcaaaaaagaggaggggaaggccccaaaagcgcttcgccagtaagatcgatcaggcagtcgatgttgaaaattttgtagaaaaggtggacggcgaccaagaagaagctgacgatggcaagctgaagaacagcgccgcagctggcggtaacaagagaggcaggccgttgaaagagggctccaatattgtcgtagaagataacaactctattgtcccatcgagcagtgatgaatcaacaaggaccaacgggttcaggcagatcgggagccggcggaaaaacaagccccggcgagcagcagaggcaggactagaatgcaagtgaagcatccctgcgagtttcagtgcaaggcagcatccaatttttttgcaatatcgtcatgtctattagctcccagtcccagtgctgaaaagcgaaatgtaaactagcattgtctgattgcatgcctcagtttttttcccccttggccccaagtgtatgaactaatggtacacctacttgttcagctgctctaggcctgattctatttggagcttgttgtggcagagatttcatctcagtttacaaaggctagtgatgctagaaggtgttcctgccattttgagtga

SEQ ID NO: 128925 - DNA, 1258 bp, Zea Mays
aaatcctggagccgaaccaaatctctctcctccctaacccccaagccggtgtgctgccccagcaccagcagcagctattcgagctcaaccatccaaaactcccagggcgctagctcttcgttgataaaaacacccctgcttcccttcctgcctgcacaccacatctcaatctttgctgcgagctcccgatctgtggtacttccggcatcgcgaactgaagtttaccaccgatccgttggctccttggcattccttttcctccagcagcggcaaagtctccatctttttgccagccgacttgaggaatggggtgcatgacgctgcttggagtagacgcaagctttatggaagaattctagtacttcattcccaacaagcaatcagataaaaacgaaaggagcaacttcaacagaacctgcggctccagtgattggaccgaccgatatttgcaaactgctgaaattgaatccatgggtagaggaagaggaagagggaagaagctaaccactgtcaggagccacgaagataaaggtagcagcggcgaagaagttgtgcctgcaaaaaagaggaggggaaggccccaaaagcgcttcgccagtaagatcgatcaggcagtcgatgttgaaaattttgtagaaaaggtggacggcgaccaagaagaagctgacgatggcaagctgaagaacagcgccgcagctggcggtaacaagagaggcaggccgttgaaagagggctccaatattgtcgtagaagataacaactctattgtcccatcgagcagtgatgaatcaacaaggaccaacgggttcaggcagatcgggagccggcggaaaaacaagccccggcgagcagcagaggcaggactagaatgcaagtgaagcatccctgcgagtttcagtgcaaggcagcatccaatttttttgcaatatcgtcatgtctattagctcccagtcccagtgctgaaaagcgaaatgtaaactagcattgtctgattgcatgcctcagtttttttcccccttggccccaagtgtatgaactaatggtacacctacttgttcagctgctctaggcctgattctatttggagcttgttgtggcagagatttcatctcagtttacaaaggctagtgatgctagaaggtgttcctgccattttgagtgatctggtcttctcctttgctcttactgcaactattcatttatttgtacttcactaaagttctggaaatgaaaaggagcataagtgctgacttgagga

SEQ ID NO: 128926 - DNA, 1278 bp, Zea Mays
gccgcgaccgggctccccactcctacggcgctgctcctcttcctgtgtctctctcgtctcccaacgacgcgattggcgattccatttctaccccgagacctccagccgtccgcccctgaaccctcagccttctccgtcccgcctcggcactcgacggccgccggcacacaccgcgcagtctcgagacaggtaacccgctcccctctccgctgaactcctctcccaacaaggggccagcctcacccccaacgcccatctaagccaagtgcacggtgctgctagatcccgatctcgttctgccaaccgccgagggagggttgcgctcgccggatcccgcccgagtcacgtgcggctttgattcgctgcacctgtcgtgcaggaaccggaggaacgaggatggaggatgactcgccgctgacgaagacgatgaagggtgcggtgacaggactcgccgcggggaccatctggggcaccgtcgtcgccacctggtacgacgtgccccgtgtggagcgccacgtcgcgctccctggccttatccggacgctcaagatgtgcggcacctacggggccaccttcgccaccatcgggggcctctacatcggcgtcgagcagctcgtgcagagccagcgcaagaagcgcgacttcgtcaacggggccgtcggcgcgttcgttgccggagcctctgtctgcggctacagaggaaagagtattcagtcagccctcatcggaggctcctgtctggctttcacatctgctgtgctggacattggcggcaatacgaccagagttgacaacggcaaagagtactatgcctacacaactgagaagaagcctgcaaattgattccaagtctgcacttctagcaaacaatcttgcacgccatcaactcagtgaatttgaagctgatgtgcagttttatgtttgttttgctgatgcaattagttcttaagcaaatccatggcaacttgtttatcgctgatgcttgagggatggaaatgacactcagaataaatctttgatttgctttcttgtgatcgttgatcacattaaacgcagtggcgcgatatactgtgtaattgtctattttcccgtagtaagtattgataggaacgttgacctgataaaatagataatctaattttggtttaaaatatggtctctatttttctagttaaaatctaataaaagactatcttatatgcacccatgattttgacttatactataaagagttatgccctcggtcctttatttttcacgttttagtttaaaaataaa

SEQ ID NO: 128927 - DNA, 1088 bp, Zea Mays
gccgcgaccgggctccccactcctacggcgctgctcctcttcctgtgtctctctcgtctcccaacgacgcgattggcgattccatttctaccccgagacctccagccgtccgcccctgaaccctcagccttctccgtcccgcctcggcactcgacggccgccggcacacaccgcgcagtctcgagacaggaaccggaggaacgaggatggaggatgactcgccgctgacgaagacgatgaagggtgcggtgacaggactcgccgcggggaccatctggggcaccgtcgtcgccacctggtacgacgtgccccgtgtggagcgccacgtcgcgctccctggccttatccggacgctcaagatgtgcggcacctacggggccaccttcgccaccatcgggggcctctacatcggcgtcgagcagctcgtgcagagccagcgcaagaagcgcgacttcgtcaacggggccgtcggcgcgttcgttgccggagcctctgtctgcggctacagaggaaagagtattcagtcagccctcatcggaggctcctgtctggctttcacatctgctgtgctggacattggcggcaatacgaccagagttgacaacggcaaagagtactatgcctacacaactgagaagaagcctgcaaattgattccaagtctgcacttctagcaaacaatcttgcacgccatcaactcagtgaatttgaagctgatgtgcagttttatgtttgttttgctgatgcaattagttcttaagcaaatccatggcaacttgtttatcgctgatgcttgagggatggaaatgacactcagaataaatctttgatttgctttcttgtgatcgttgatcacattaaacgcagtggcgcgatatactgtgtaattgtctattttcccgtagtaagtattgataggaacgttgacctgataaaatagataatctaattttggtttaaaatatggtctctatttttctagttaaaatctaataaaagactatcttatatgcacccatgattttgacttatactataaagagttatgccctcggtcctttatttttcacgttttagtttaaaaataaa

SEQ ID NO: 128928 - DNA, 946 bp, Zea Mays
gcgaccgggctccccactcctacggcgctgctcctcttcctgtgtctctctcgtctcccaacgacgcgattggcgattccatttctaccccgagacctccagccgtccgcccctgaaccctcagccttctccgtcccgcctcggcactcgacggccgccggcacacaccgcgcagtctcgagacaggaaccggaggaacgaggatggaggatgactcgccgctgacgaagacgatgaagggtgcggtgacaggactcgccgcggggaccatctggggcaccgtcgtcgccacctggtacgacgtgccccgtgtggagcgccacgtcgcgctccctggccttatccggacgctcaagatgtgcggcacctacggggccaccttcgccaccatcgggggcctctacatcggcgtcgagcagctcgtgcagagccagcgcaagaagcgcgacttcgtcaacggggccgtcggcgcgttcgttgccggagcctctgtctgcggctacagagtcagccctcatcggaggctcctgtctggctttcacatctgctgtgctggacattggcggcaatacgaccagagttgacaacggcaaagagtactatgcctacacaactgagaagaagcctgcaaattgattccaagtctgcacttctagcaaacaatcttgcacgccatcaactcagtgaatttgaagctgatgtgcagttttatgtttgttttgctgatgcaattagttcttaagcaaatccatggcaacttgtttatcgctgatgcttgagggatggaaatgacactcagaataaatctttgatttgctttcttgtgatcgttgatcacattaaacgcagtggcgcgatatactgtgtaattgtctattttcccgtagtaagtattgataggaacgttgacctgataaaatagataatctaattttggtttaaaata

SEQ ID NO: 128929 - DNA, 1182 bp, Zea Mays
gcgaccgggctccccactcctacggcgctgctcctcttcctgtgtctctctcgtctcccaacgacgcgattggcgattccatttctaccccgagacctccagccgtccgcccctgaaccctcagccttctccgtcccgcctcggcactcgacggccgccggcacacaccgcgcagtctcgagacagatcccgatctcgttctgccaaccgccgagggagggttgcgctcgccggatcccgcccgagtcacgtgcggctttgattcgctgcacctgtcgtgcaggaaccggaggaacgaggatggaggatgactcgccgctgacgaagacgatgaagggtgcggtgacaggactcgccgcggggaccatctggggcaccgtcgtcgccacctggtacgacgtgccccgtgtggagcgccacgtcgcgctccctggccttatccggacgctcaagatgtgcggcacctacggggccaccttcgccaccatcgggggcctctacatcggcgtcgagcagctcgtgcagagccagcgcaagaagcgcgacttcgtcaacggggccgtcggcgcgttcgttgccggagcctctgtctgcggctacagaggaaagagtattcagtcagccctcatcggaggctcctgtctggctttcacatctgctgtgctggacattggcggcaatacgaccagagttgacaacggcaaagagtactatgcctacacaactgagaagaagcctgcaaattgattccaagtctgcacttctagcaaacaatcttgcacgccatcaactcagtgaatttgaagctgatgtgcagttttatgtttgttttgctgatgcaattagttcttaagcaaatccatggcaacttgtttatcgctgatgcttgagggatggaaatgacactcagaataaatctttgatttgctttcttgtgatcgttgatcacattaaacgcagtggcgcgatatactgtgtaattgtctattttcccgtagtaagtattgataggaacgttgacctgataaaatagataatctaattttggtttaaaatatggtctctatttttctagttaaaatctaataaaagactatcttatatgcacccatgattttgacttatactataaagagttatgccctcggtcctttatttttcacgttttagtttaaaaataaa

SEQ ID NO: 128930 - DNA, 75 bp, Zea Mays
tccaaacagttgttcgcgcacattgcttcggatgcatttcttaagccgctcggccactttgccgaaacacctttt

SEQ ID NO: 128931 - DNA, 545 bp, Zea Mays
ccgcgctgcgctgcgtccctcctccgtgcgcgcaccgcccgcggcgctggccccgctcaccgacgtcgtgctccacgagcaggacaagtgcgcgcagctggccgccgcgctcgctgccgccgccgccgtcgaggcctcggagcccaccgacgacctcgccgtgtacctccgggggctcctcccgtgcctctacaagctcctccgcgtcgcggcgttcaaggccaagcccgcgctcatctccctcattgacgctgcctcggcagcctccggcggacttctccgtgcgcgcaccgcccgcggcgctggccccgctcaccgatgccgtgctccacgagcaggaccagtgcgagcagaatacagcagcacgggcgtcaccgccacattcggggctagggctccggcgacggccgcgcggcgggcggcgggattagggtttggcgagatcgcatcgggggagaagagaagggagatagcgagatcaggatggcgctggcgcccgtgctgctgtattctgctcgcggctcgcgtgcgtttcttctctcttg

SEQ ID NO: 128932 - DNA, 580 bp, Zea Mays
ttgggcaaatatatacgcgatgattgattaaatcgaattgttgaatggattcaaacaaatggcaagcgatgatacaagtgttaatccctctctcagggggaagaacatcagcggcatgcatcaattcgttaaattaaggagaaagagggaacaaagaaaaagaggacaaaaggtgtgtcgaatcaaaaacatgcccacgcatcggaatgcgcgcagccatgtcactctctctcccgcttcgtctcttcctcggcctccgggcgaccggccgcggccggctcactgaatgtagtaggcgaagaaggaggcgacggcggccccgagggcggcgccgacggcgggcgcgacggcggaggagccgctggtggggcccggagccggagcctccgcggcgagcgccacggtggccgccgaggcggcgacgaggacggcgcaggcgatcttcttcatctccatccctgaatgcggcggcggcggcgggcgggacggaacggaacggaacggaggcgaggaagaaggacgggcgcggcgagcaagctggctgctggctggctggctagctagctctgtgctcccgtcg

SEQ ID NO: 128933 - DNA, 669 bp, Zea Mays
ataccgtccccgtctcaccgcactgccttgccccctactctgcctcgcttagcttagccgccgctgctacgcactctcgccgtccttgttcccgcgtcgctctgctcgcgatggcgtcccgcgttgcagtgctgctcgtggccgtggcggccgtgctgttcgccgcggcgtcggcgcaggagatggacctgggcgtgccgcccgcgccggcgcccgacacgggcgcggcagcgggggccgcggcgtcggtcctggccgtggcttgctctgccgtcttcttcatcctcgtcgccggtggcctcgtgcagtaggcgctgccgtcgacgtggtggctagctgctggttcggggtcaggcggagccctgttcgatcgttttcgccttagttagtagtagaagtagcagtcatgggctgtgttgattgtgtccctgtctccccctggtgggcgttgtgatcttgtgctattgcttattctttttgtaccatactgcattgttcgacgtataccttgtgttgaggcgtgtgttgtatgaataaagacgatggatctcgttcgtcaatcgtcattaggattgctgggttccatgttctgttcatttgcgatagaaatctcccaaacatacccgcaaaaaaaaaaaaaagaatttcctaccaatttctagacaaata

SEQ ID NO: 128934 - DNA, 444 bp, Zea Mays
atggcgcatcacagtgtgtgtctgcaattgctctcatatggttatattgctctagctggtcatcgaaagaagccagtaggtgagttttgggacgacatcaacattgtccatcgggtcaagttgatgacaaacacaaacaatgagcagataatcaagatcattggccctaggttgtcggccatgcacacaaggtcattcatgtattctgtgtcgcacttctctgcatcaaggagcagagcatgcaatgacctacgatgcggtgtggaaggtggtgcagatgcccagcaaacttcccaatccagctaccggcaaggagatgaggttccctatggtgacaattttccactacacaaccggattcttcagcagcagatggatctattgaagcgccgtgtgacaaagccaccaaagagcagcaacaaacaagctcaaagtctttgctaa

SEQ ID NO: 128935 - DNA, 1345 bp, Zea Mays
gcgccggcgcgtcgggtcgtgcccatcacgttgtctccactccgtcgcctctcctctcctctccgtccctgcgccacgcgggggagattaaagcgaagcgcctccccgctcacctctcctctcgtcgtgcgttggatcaaagtatcaaaccaatctcccctcgccgtccggccggcgtgcgcgcggggcctctttttttggagccttgcgccgcggcccgttcctcctgtccgaaataatccgcctcgacgtgttcgcctccccctccccctccctctctcccctcccctcgcgactcgtctcgtgcgtgactgcgtgctcgctctccttttcgctgcgctcatctcggtatctgtgccagcgctcgcctctccccgccggcccgccctccttcctttccttgtctagccgaaggccgaagccactgcgcgcgcgtgcgtgcgacgatgtcgtcggcggtggaggccatctcctgccccaaggtcgacgtccccgccggcccggagccgggggagccggccaaggaagcggcgccgcccgcggagcactgcgacacggcgcccaacggcaagtgcgcgccgcgttgtcacggggaggaggaggaggaggaggaggacgaggaggacgaggagaaggcccccaaggccatcgacctcggtcccatggtcagcatcaaggagcagctcgagaaggacaaggacgacgagagcctgcggcgatggaaggagcagctcctcggcggcgtggacttgaactccgtgggagagacgctggagccggacgtgaagataatgagcctgtccatcctgtcgcccgggcggcccgacatcgtgctgccgctgccggtggagcccaacggcaagggcgtgtggttcaccctcaaggaaggctccccgtaccggctcaagttcaccttctccgtcagcaacaacatcgtctccggcctccgctacaccaacaccgtctggaagacggggctcaaagttgacagagccaaggagatgctcggcacgttcagcccccagctggagccctacacgtacgtgacgccggaggacaccaccccgtcgggaatgtttgcccgggggtcctactctgccaggaccaaggtacgtacgtacgtggatgcagaaccagtcctttttcggttcacacagaatccttcaggctcgatagttcacgaggtttggtttggcatcctgttctttgacagttcctcgacgacgaccgcaagtgctacctggagatcaactacaccttcgacatccgccgggagtggccgtcgacgagctgaccatccttccctccctccatcggtggcctgagcagaccagtcgtttcgttc

SEQ ID NO: 128936 - DNA, 1745 bp, Zea Mays
gcgccggcgcgtcgggtcgtgcccatcacgttgtctccactccgtcgcctctcctctcctctccgtccctgcgccacgcgggggagattaaagcgaagcgcctccccgctcacctctcctctcgtcgtgcgttggatcaaagtatcaaaccaatctcccctcgccgtccggccggcgtgcgcgcggggcctctttttttggagccttgcgccgcggcccgttcctcctgtccgaaataatccgcctcgacgtgttcgcctccccctccccctccctctctcccctcccctcgcgactcgtctcgtgcgtgactgcgtgctcgctctccttttcgctgcgctcatctcggtatctgtgccagcgctcgcctctccccgccggcccgccctccttcctttccttgtctagccgaaggccgaagccactgcgcgcgcgtgcgtgcgacgatgtcgtcggcggtggaggccatctcctgccccaaggtcgacgtccccgccggcccggagccgggggagccggccaaggaagcggcgccgcccgcggagcactgcgacacggcgcccaacggcaagtgcgcgccgcgttgtcacggggaggaggaggaggaggaggaggacgaggaggacgaggagaaggcccccaaggccatcgacctcggtcccatggtcagcatcaaggagcagctcgagaaggacaaggacgacgagagcctgcggcgatggaaggagcagctcctcggcggcgtggacttgaactccgtgggagagacgctggagccggacgtgaagataatgagcctgtccatcctgtcgcccgggcggcccgacatcgtgctgccgctgccggtggagcccaacggcaagggcgtgtggttcaccctcaaggaaggctccccgtaccggctcaagttcaccttctccgtcagcaacaacatcgtctccggcctccgctacaccaacaccgtctggaagacggggctcaaagttgacagagccaaggagatgctcggcacgttcagcccccagctggagccctacacgtacgtgacgccggaggacaccaccccgtcgggaatgtttgcccgggggtcctactctgccaggaccaagttcctcgacgacgaccgcaagtgctacctggagatcaactacaccttcgacatccgccgggagtggccgtcgacgagctgaccatccttccctccctccatcggtggcctgagcagaccagtcgtttcgttctgtgttcttccttttctatgttgcctcgtcctgtcctgtcactaggttttttgtttgttcaccgtcagcttgttcgctgcggcttgctgcggctgcaatccggctgcggctgcggcttctacagtatttttctctctatggattgcagctgcagcagtccaaacagctgcaacagtgtcggcttgtagccagccgaacacgccccgtgttgctgcgtgcgtgacgcacggtgcgtctatgtgccctttcccatgcgccagttgtctgctgtgttgacaccgttactagacagtgcaaatgtcaggtcggtctaccggactgtgcgtgcgtcagcgtgttcaacttgtcgatcagggtctcgttttttccgaaccgcctgttgagttaagacttcagagcaatgaagctgcgttctgcgtagtaatgccaccgtgatcgtgacctgttgtgcttcgagagttcgactgtagcattgaaatcaagtgtagcatgcttcgagtccta

SEQ ID NO: 128937 - DNA, 1668 bp, Zea Mays
cgtcgggtcgtgcccatcacgttgtctccactccgtcgcctctcctctcctctccgtccctgcgccacgcgggggagattaaagcgaagcgcctccccgctcacctctcctctcgtcgtgcgttggatcaaagtatcaaaccaatctcccctcgccgtccggccggcgtgcgcgcggggcctctttttttggagccttgcgccgcggcccgttcctcctgtccgaaataatccgcctcgacgtgttcgcctccccctccccctccctctctcccctcccctcgcgactcgtctcgtgcgtgactgcgtgctcgctctccttttcgctgcgctcatctcggtatctgtgccagcgctcgcctctccccgccggcccgccctccttcctttccttgtctagccgaaggccgaagccactgcgcgcgcgtgcgtgcgacgatgtcgtcggcggtggaggccatctcctgccccaaggtcgacgtccccgccggcccggagccgggggagccggccaaggaagcggcgccgcccgcggagcactgcgacacggcgcccaacggcaagtgcgcgccgcgttgtcacggggaggaggaggaggaggaggaggacgaggaggacgaggagaaggcccccaaggccatcgacctcggtcccatggtcagcatcaaggagcagctcgagaaggacaaggacgacgagagcctgcggcgatggaaggagcagctcctcggcggcgtggacttgaactccgtgggagagacgctggagccggacgtgaagataatgagcctgtccatcctgtcgcccgggcggcccgacatcgtgctgccgctgccggtggagcccaacggcaagggcgtgtggttcaccctcaaggaaggctccccgtaccggctcaagttcaccttctccgtcagcaacaacatcgtctccggcctccgctacaccaacaccgtctggaagacggggctcaaagttgacagagccaaggagatgctcggcacgttcagcccccagctggagccctacacgtacgtgacgccggaggacaccaccccgtcgggaatgtttgcccgggggtcctactctgccaggaccaaggtacgtacttcctcgacgacgaccgcaagtgctacctggagatcaactacaccttcgacatccgccgggagtggccgtcgacgagctgaccatccttccctccctccatcggtggcctgagcagaccagtcgtttcgttctgtgttcttccttttctatgttgcctcgtcctgtcctgtcactaggttttttgtttgttcaccgtcagcttgttcgctgcggcttgctgcggctgcaatccggctgcggctgcggcttctacagtatttttctctctatggattgcagctgcagcagtccaaacagctgcaacagtgtcggcttgtagccagccgaacacgccccgtgttgctgcgtgcgtgacgcacggtgcgtctatgtgccctttcccatgcgccagttgtctgctgtgttgacaccgttactagacagtgcaaatgtcaggtcggtctaccggactgtgcgtgcgtcagcgtgttcaacttgtcgatcagggtctcgttttttccgaaccgcctgttgagttaagacttcagagcaatgaagctgcgttctgcgtagtaatgcc

SEQ ID NO: 128938 - DNA, 811 bp, Zea Mays
gtaagaagcagatctgaaatttgaacatcctgtgcgtgtgtgtgtgatgttcgcagagacgctggagccggacgtgaagataatgagcctgtccatcctgtcgcccgggcggcccgacatcgtgctgccgctgccggtggagcccaacggcaagggcgtgtggttcaccctcaaggaaggctccccgtaccggctcaagttcaccttctccgtcagcaacaacatcgtctccggcctccgctacaccaacaccgtctggaagacggggctcaaagttgacagagccaaggagatgctcggcacgttcagcccccagctggagccctacacgtacgtgacgccggaggacaccaccccgtcgggaatgtttgcccgggggtcctactctgccaggaccaagttcctcgacgacgaccgcaagtgctacctggagatcaactacaccttcgacatccgccgggagtggccgtcgacgagctgaccatccttccctccctccatcggtggcctgagcagaccagtcgtttcgttctgtgttcttccttttctatgttgcctcgtcctgtcctgtcactaggttttttgtttgttcaccgtcagcttgttcgctgcggcttctacagtatttttctctctatggattgcagctgcagcagtccaaacagctgcaacagtgtcggcttgtagccagccgaacacgccccgtgttgctgcgtgcgtgacgcacggtgcgtctatgtgccctttcccatgcgccagttgtctgctgtgttgacaccgttactagacagtgcaaatgtcaggtcggtct

SEQ ID NO: 128939 - DNA, 859 bp, Zea Mays
gtaagaagcagatctgaaatttgaacatcctgtgcgtgtgtgtgtgatgttcgcagagacgctggagccggacgtgaagataatgagcctgtccatcctgtcgcccgggcggcccgacatcgtgctgccgctgccggtggagcccaacggcaagggcgtgtggttcaccctcaaggaaggctccccgtaccggctcaagttcaccttctccgtcagcaacaacatcgtctccggcctccgctacaccaacaccgtctggaagacggggctcaaagttgacagagccaaggagatgctcggcacgttcagcccccagctggagccctacacgtacgtgacgccggaggacaccaccccgtcgggaatgtttgcccgggggtcctactctgccaggaccaagttcctcgacgacgaccgcaagtgctacctggagatcaactacaccttcgacatccgccgggagtggccgtcgacgagctgaccatccttccctccctccatcggtggcctgagcagaccagtcgtttcgttctgtgttcttccttttctatgttgcctcgtcctgtcctgtcactaggttttttgtttgttcaccgtcagcttgttcgctgcagcagtccaaacagctgcaacagtgtcggcttgtagccagccgaacacgccccgtgttgctgcgtgcgtgacgcacggtgcgtctatgtgccctttcccatgcgccagttgtctgctgtgttgacaccgttactagacagtgcaaatgtcaggtcggtctaccggactgtgcgtgcgtcagcgtgttcaacttgtcgatcagggtctcgttttttccgaaccgcctgttgagttaagacttcagagc

SEQ ID NO: 128940 - DNA, 2638 bp, Zea Mays
ccaggacgccattgctcaccttttccgtccagcgcaaggaaaccgcgcgccagagaggccgcttcaggcgcgcgtggaatcgccccgtggccggcggggatgtccggattcgtcggggtcgtcgtgtccgacccttcgctgcaggggcagttcacgcaggtcgagctccgatcgctcaaggccaagttcgtgtctctgaagagagattccggccatgtcaccactaagaacctgccggggctgatgaagaagctgagggggctcaatgaggtggtctccgaggaggagatcgcggccttcctgtcggagtcgtaccctgatagcgatcacgagattgaattcgaatccttcctccgggagtatcttaatctgcaggctcaggtgagtgccaaggaaggtggtgccggcggtggcaggggtggcaagccgtcgtttctcaagtccagcatcactacgctgctgcacaatctcaaccaggcagagaaatcttcgtatgtcgcacacatcaatacttacctccgtgaagacccattcctgaagaagtacttgcccatcgaaccgtctggaaatcagctgttcgatctcatccgggatggggttctgctctgcaaactgatcaatgtagctgtacctgggaccattgatgagagagcgataaataagaaaagagttcttaacccatgggagagaaacgaaaaccacacactctgcctcaattctgccaaggccattggatgtactgttgtcaacattggcacacaggatttggtggagggaaggcctcatttagttcttggattgatatcacaaatcataaagattcaacttttagctgatctgaatctcaagaagacaccgcagctggtggagctatttgatgacagcaaggatatagatgaggttttgagcttgtcaccagaaaagatgctacttcggtggatgaaccatcatctgaaaaaagctggctacaagaaaactgttaacaatttctcttcagatgtcaaggatggtgaagcctatgcttaccttttgaaagctcttgctccagagcattcccctgaaactacattggacaccaaggatccgaacgaaagggcaaaactagtacttgaacaagcagagaagttggactgtaagagatacttgaccccaaaggatatcactgagggatctgccaatctaaatcttgcatttgttgcacaaatattccagcacaggaatggtctgaccagtgacaccaaacaagttaccctcacacagacagcaacacatgatgatgttctattatctagagaagaaagagcctttcgaatgtggatcaacagccttggggttgaatcatatgtgaacaatgtcttcgaagatgttcgcaacggatgggtacttcttgaagtgcttgacaaggtgtctcatggatctgtcaattggaagctggcatcaaaacctccaattaaattgccatttagaaaactggagaattgcaaccaagttgtaaaaattgggaagcagttaaagttttctttagtaaatctagctggaaacgatattgttcagggaaacaagaaattgattgttgcacttctgtggcaattgatgagattcaatatcctccagctgttaaacaaactgagattccactcccaagggtccgaaggaaaagaaatttctgatgccgatattctaaactgggccaactgcaaagtgaaggcatccggaagaacatctcgtatagaaagtttcaaggacaagagcttatcgaatggaatgttcttccttgatcttcttagcacagtacagccaagggttgtgaactggaaagttgttactaaaggggaaactgatgaggacaagaagctgaatgctacctacatcattagtgttgcaaggaagattggatgctctgtgtttctgttgccagaggacatcattgaggtgaatcagaagatgatcctaacacttactgctagcattatgtattggagcctacagaaacagccccagtcacagtctgaattgacagaacaatcagaaccatctagcatgacttctgacgcagcctctgaagttgcctcggaggatggtgcttcaacgacagcaccgtccgagtcagaagaggtgaactcgctgtctgatagcatatcgaatttgacaacggatgatgctacttcaaacgccccatctgctgaaaacggaaatggtgtggcagggtcctgatggttatgattatgcaaaccctgttctttttttccccatacagtgctgttacaggaaatagtgctttcatgatgcccaaagttgtcgctaccagaagcgatatttttaatacttctgcttcctgagcatggtagcttgatagatacaacagtcacagatagatatagatgccttttgttcattggatccgcttatactatagtgggggaagataatagtatgtgtcgctggctgggtattttctgtatttctggcatacacccatgcaaaatttactacctcctctgtatcttatcggtcaattcgttcatatgtttattggactagtcaaagcttgtaatgctgttgctgctctgaaccgtgcctgtacataacatatgcttaaaaaggttttgcattgtcctttagtttctgtttgtactgc

SEQ ID NO: 128941 - DNA, 2660 bp, Zea Mays
ccaggacgccattgctcaccttttccgtccagcgcaaggaaaccgcgcgccagagagggtgagggattgccgtcaccaatccggaagccgcttcaggcgcgcgtggaatcgccccgtggccggcggggatgtccggattcgtcggggtcgtcgtgtccgacccttcgctgcaggggcagttcacgcaggtcgagctccgatcgctcaaggccaagttcgtgtctctgaagagagattccggccatgtcaccactaagaacctgccggggctgatgaagaagctgagggggctcaatgaggtggtctccgaggaggagatcgcggccttcctgtcggagtcgtaccctgatagcgatcacgagattgaattcgaatccttcctccgggagtatcttaatctgcaggctcaggtgagtgccaaggaaggtggtgccggcggtggcaggggtggcaagccgtcgtttctcaagtccagcatcactacgctgctgcacaatctcaaccaggcagagaaatcttcgtatgtcgcacacatcaatacttacctccgtgaagacccattcctgaagaagtacttgcccatcgaaccgtctggaaatcagctgttcgatctcatccgggatggggttctgctctgcaaactgatcaatgtagctgtacctgggaccattgatgagagagcgataaataagaaaagagttcttaacccatgggagagaaacgaaaaccacacactctgcctcaattctgccaaggccattggatgtactgttgtcaacattggcacacaggatttggtggagggaaggcctcatttagttcttggattgatatcacaaatcataaagattcaacttttagctgatctgaatctcaagaagacaccgcagctggtggagctatttgatgacagcaagatgaggttttgagcttgtcaccagaaaagatgctacttcggtggatgaaccatcatctgaaaaaagctggctacaagaaaactgttaacaatttctcttcagatgtcaaggatggtgaagcctatgcttaccttttgaaagctcttgctccagagcattcccctgaaactacattggacaccaaggatccgaacgaaagggcaaaactagtacttgaacaagcagagaagttggactgtaagagatacttgaccccaaaggatatcactgagggatctgccaatctaaatcttgcatttgttgcacaaatattccagcacaggaatggtctgaccagtgacaccaaacaagttaccctcacacagacagcaacacatgatgatgttctattatctagagaagaaagagcctttcgaatgtggatcaacagccttggggttgaatcatatgtgaacaatgtcttcgaagatgttcgcaacggatgggtacttcttgaagtgcttgacaaggtgtctcatggatctgtcaattggaagctggcatcaaaacctccaattaaattgccatttagaaaactggagaattgcaaccaagttgtaaaaattgggaagcagttaaagttttctttagtaaatctagctggaaacgatattgttcagggaaacaagaaattgattgttgcacttctgtggcaattgatgagattcaatatcctccagctgttaaacaaactgagattccactcccaagggtccgaaggaaaagaaatttctgatgccgatattctaaactgggccaactgcaaagtgaaggcatccggaagaacatctcgtatagaaagtttcaaggacaagagcttatcgaatggaatgttcttccttgatcttcttagcacagtacagccaagggttgtgaactggaaagttgttactaaaggggaaactgatgaggacaagaagctgaatgctacctacatcattagtgttgcaaggaagattggatgctctgtgtttctgttgccagaggacatcattgaggtgaatcagaagatgatcctaacacttactgctagcattatgtattggagcctacagaaacagccccagtcacagtctgaattgacagaacaatcagaaccatctagcatgacttctgacgcagcctctgaagttgcctcggaggatggtgcttcaacgacagcaccgtccgagtcagaagaggtgaactcgctgtctgatagcatatcgaatttgacaacggatgatgctacttcaaacgccccatctgctgaaaacggaaatggtgtggcagggtcctgatggttatgattatgcaaaccctgttctttttttccccatacagtgctgttacaggaaatagtgctttcatgatgcccaaagttgtcgctaccagaagcgatatttttaatacttctgcttcctgagcatggtagcttgatagatacaacagtcacagatagatatagatgccttttgttcattggatccgcttatactatagtgggggaagataatagtatgtgtcgctggctgggtattttctgtatttctggcatacacccatgcaaaatttactacctcctctgtatcttatcggtcaattcgttcatatgtttattggactagtcaaagcttgtaatgctgttgctgctctgaaccgtgcctgtacataacatatgcttaaaaaggttttgcattgtcctttagtttctgtttgtactgc

SEQ ID NO: 128942 - DNA, 618 bp, Zea Mays
atagcttgctgccccctactgctagtctgctactgagctgcatcgtatcgccgcttgactcgcttctctgttctctccgactctcactcccttttccaccgcgcacctcttcctcgaccctcgtcgcaaggcccaggcacgatgcaagccaggccggaagctacggttccttcgccatctccgccattggcagctccatctttccatcaacggagaatggaggaggggaacagcggcgtcgcaacgctgcggcggtaaccggcctacacacgtatcggcgtcgcggcatacaagggcaggccaggcattcgatttcgttcgtacactacttactcccggttgcagcaagcaatcgttttctttctcttgcttagtttttttttttggctccctcgcctgcaatcgtttccttcgtaggagcactacattagtactctcagctgcagagggctgcggataatctcgctgtcttcaggtggttgtgtgtgcgtttatctatgcctgggctgctgggttgatctgtatgtgtttccctgggtgaaaacgctcgttctgaatcaggagttcagaacgagagtagctgtgacgatttttctcgatgtgcaagttattctttcc

SEQ ID NO: 128943 - DNA, 680 bp, Zea Mays
atgggatcctaccactacacctcgcaattcgtcgattccaaccccaagcccagccacaaacccaagaccaccgtccaaatcccgattacatcccctcgggaggcggctcggggaggatcgcctgacgcggtggcggccgccaagatccaggcggccttgcgtgggtacctggtcaggcggcacgtcacggccgtgcgcgctgccgacgccgaggcgacgcggctcgagcggctgctccggcggcaggagaccgtggacgccgtccgcagcgacgagcgcgagcgggcccggttctcggaggcgctgatggccgtgctgctccgcctggatgccgtgccggggcactaccccgccgtgcgggacgcgcggcgcgccgtgagccgccgcgtggtcggcctgcaggaggtgttcgacgctgttgccgtggcacccaaagcccagacgtgcggggtgccggcgagcctggagcaggtcctggaatggatctggggagtcggagaggcgcctgctccggtgccgccgccgcaggcggaggtggaggaggaagtgagaagggccgggtcatgctgggcaagattttttggtggagtgtagtgagtagtgtacggtcatagggtggctacagtgtagcacgttgtacggcgccgtgctcatttgtacatgttgtggatgtattacag

SEQ ID NO: 128944 - DNA, 2661 bp, Zea Mays
ctacacctgcgactataatccccctcatcgccagccccctcgtctcgtctcccccctccgcttcgcccatctcatcgccatctcactcccgaacccacttcctttccttcccgcgtctaattgagcgccaaagcggggggcatttgaattccccggaacttccacttccagtggcttctcgaaccttccggaggcgctgccggccggccggctccggctctacttcttccccctagggtttcgcgtttccctcggggatgggggacgcccccgccgccgcggcggcagcgtcgcccgcttgtgccgcgcagaagcggagacgcggcgatgatggcgcggggctgaggcgggtggcggagatcgtgatggtgttggccgcggccggggaggtgcgcggcgggatggagcccacggcggcggagcgggcactcgcggccgaggcacgggagacgctggccgccgccgttgccgagggggccgtgcggcccaaggatctgttctcggtggaggcggtgcgcgcggtcgtcgaggatctcgggctcaaccgcgccaaggacccagctgccatggggtttcgcccgcccaaggcctccatcgccgataggcttatgcttactaagcgcaagatggaagaagtgaaggaagctccagtgcaatcaacagttagcgcacctcaaacagtcgtttcaagtggaatgtctgacttccatggtttgaatggggctactaagtttggtgttggagttcctagggacccaccagttccatctataaccgctagtgccccattaacctctacatccccagctaccttgaaaccaccagaatcatttcctgtaaaaccagtttccaactcatcggttgttcctgtactctattctggtccatcaaaccttaaatcggacaaaaatgtcagtggtcctctgaatttagcacacactggagcaactgttgtccactcaaacaagtcaactgtagatgcatctgctaggtccagtgtaaatgcttccaatcagatggtgaaaaaccaggacacaaaaccagtgacagttcaagccatggcaggtaatcctgctacggggcatcgtgctacacctactttcatcaatcacaatgagatagcaaagaatgttcaacagtttctgcaccaacctgcaaacaatcctagctggactccaccatcaactgattacatgcattctcgcttgagttgtcaaatatgcaaagttgttatcattggtacagacagtttacttgtttgtgatgcttgtgagaggggagtacatttgaaatgccttcagcagtatggcaataagggtgtccctaaagctgagtggcattgttctgcatgcctgactcagagtaagggcaaacccttaccaccaaaatatggcaaggttacaagaactgtagttgcatcaaaggctgctccacctggtggtggggcacagctttctttgcagggatcagcagaaaacatggcttcaaaggaaaatcaccaaaagttggctgcaaatgggaatcttatgaaaccaatctctattcaaggtggtagcacagcacccaacagtaatgtattggcactgagtgccatcacggctggttcacaatcacaattagtttctaccttgagaccatcaagagttgttaaagctgaaatgttctctattggaaaagaaggaactgggcaaccgtgcaatactacaatacaaccagctgtgagatcatcccctcttaacaaaagattgagaagtgattcctctttgaaccctgcagattccgcaaatgatatcatgcatggtaagtatactacagaaatttccggtgctgaagcaaaggtcaagtctgaagtgaactatgaggcctctgtgagtagagatgaggaattggttgatagtagtggaacatcaattgaaactgaacaaacaaaggttggtgctagtgaagaaaagcccaggacacaatcaacctttgagacagataaagtgaaagatggggggacgactaccaacacaggaacagcaacagatcaatgcagcaacttcggtactgaagaaaatctccccggtgaaataacttctgaggcacataaaatcactgacgtgaagatgactagcaatactggaacatctgtacagcaaagcaacattgatagtattgaagagaaggccagccagatcgatgcagtttctgatccacatgcacatataatccaagatatgggaatggacaccaacaatggaccaccagtagctgaaagcggcagtcctgttgctgaagaaaagccccccgaacaatcctcttcaattggtgatgtgtgtgtcaccgctaatgctggaattccaacagatcaaacacaacatccaaatgggtcaactgaaaatgtagtcaggaaatctcccaacagagaactatatgaagagaaatcaggcaggctgtaatgtagtctcacccaaaggacaaaactttatgttttcatgaagatgaagcagtgggttgtgacacagaagcaatagaaaaggcaaactaatttagtaggaggttgcaccaattttcgtttttttttcaggtgtgtttctaaccaaaccagttgttaggaagtcttatgtctgtgaaaatcttgcctgttttgatttatgctaatagtgattcttttaaact

SEQ ID NO: 128945 - DNA, 3145 bp, Zea Mays
ctacacctgcgactataatccccctcatcgccagccccctcgtctcgtctcccccctccgcttcgcccatctcatcgccatctcactcccgaacccacttcctttccttcccgcgtctaattgagcgccaaagcggggggcatttgaattccccggaacttccacttccagtggcttctcgaaccttccggaggcgctgccggccggccggctccggctctacttcttccccctagggtttcgcgtttccctcggggatgggggacgcccccgccgccgcggcggcagcgtcgcccgcttgtgccgcgcagaagcggagacgcggcgatgatggcgcggggctgaggcgggtggcggagatcgtgatggtgttggccgcggccggggaggtgcgcggcgggatggagcccacggcggcggagcgggcactcgcggccgaggcacgggagacgctggccgccgccgttgccgagggggccgtgcggcccaaggatctgttctcggtggaggcggtgcgcgcggtcgtcgaggatctcgggctcaaccgcgccaaggacccagctgccatggggtttcgcccgcccaaggcctccatcgccgataggcttatgcttactaagcgcaagatggaagaagtgaaggaagctccagtgcaatcaacagttagcgcacctcaaacagtcgtttcaagtggaatgtctgacttccatggtttgaatggggctactaagtttggtgttggagttcctagggacccaccagttccatctataaccgctagtgccccattaacctctacatccccagctaccttgaaaccaccagaatcatttcctgtaaaaccagtttccaactcatcggttgttcctgtactctattctggtccatcaaaccttaaatcggacaaaaatgtcagtggtcctctgaatttagcacacactggagcaactgttgtccactcaaacaagtcaactgtagatgcatctgctaggtccagtgtaaatgcttccaatcagatggtgaaaaaccaggacacaaaaccagtgacagttcaagccatggcaggtaatcctgctacggggcatcgtgctacacctactttcatcaatcacaatgagatagcaaagaatgttcaacagtttctgcaccaacctgcaaacaatcctagctggactccaccatcaactgattacatgcattctcgcttgagttgtcaaatatgcaaagttgttatcattggtacagacagtttacttgtttgtgatgcttgtgagaggggagtacatttgaaatgccttcagcagtatggcaataagggtgtccctaaagctgagtggcattgttctgcatgcctgactcagagtaagggcaaacccttaccaccaaaatatggcaaggttacaagaactgtagttgcatcaaaggctgctccacctggtggtggggcacagctttctttgcagggatcagcagaaaacatggcttcaaaggaaaatcaccaaaagttggctgcaaatgggaatcttatgaaaccaatctctattcaaggtggtagcacagcacccaacagtaatgtattggcactgagtgccatcacggctggttcacaatcacaattagtttctaccttgagaccatcaagagttgttaaagctgaaatgttctctattggaaaagaaggaactgggcaaccgtgcaatactacaatacaaccagctgtgagatcatcccctcttaacaaaagattgagaagtgattcctctttgaaccctgcagattccgcaaatgatatcatgcatggtaagtatactacagaaatttccggtgctgaagcaaaggtcaagtctgaagtgaactatgaggcctctgtgagtagagatgaggaattggttgatagtagtggaacatcaattgaaactgaacaaacaaaggttggtgctagtgaagaaaagcccaggacacaatcaacctttgagacagataaagtgaaagatggggggacgactaccaacacaggaacagcaacagatcaatgcagcaacttcggtactgaagaaaatctccccggtgaaataacttctgaggcacataaaatcactgacgtgaagatgactagcaatactggaacatctgtacagcaaagcaacattgatagtattgaagagaaggccagccagatcgatgcagtttctgatccacatgcacatataatccaagatatgggaatggacaccaacaatggaccaccagtagctgaaagcggcagtcctgttgctgaagaaaagccccccgaacaatcctcttcaattggtgatgtgtgtgtcaccgctaatgctggaattccaacagatcaaacacaacatccaaatgggtcaactgaaaatgtagtcaggaaatctcccaacagagaactatatgaagagaaatcaggcaggctgtaatgtagtctcacccaaaggacaaaactttatgttttcatgaagatgaagcagtgggttgtgacacagaagcaatagaaaaggcaaactaatttagtaggaggttgcaccaattttcgtttttttttcagatggaactatgctgaatctaccatttatttaccaacatcagtgatcaactgtgttctcgacattctcttggataacattatacatttagccatcgccaaccatttttacaggatgtttattctatgccccttggaaacatgctcaccagacctactccagtcttgttcaggctttgtttggtagcaagtgtaatggagggggttaggattccttactattgaaaattgaatagtaagggattctagccccctcaatcccctctattacactcgctcccaaataaggacagaaggtttcaccacattttctgcaaaaatagttacgttcctgctgacgtaagggttactaaattctgcaggaatccactgtcgccctgtgtggtaagagaatcctagaacacaggaggtataatcgtgaagttgtactttatgtagattgataatcttgagttcctaattaattccgtttccccttctatttgttctgtgctcgactgtaatgttgtaattagataggttttagctgagttaggactggattatcaagtcacaataatgatatttgtcttcgccatc

SEQ ID NO: 128946 - DNA, 2556 bp, Zea Mays
aatccgtgtcaagcctcaagcgtgaagctatccgtacgatcggataacgaggcggtcccacctcccacggacatccccgtccccaccgatttgtttgtcatcactcgtcactcatcactcatcagctattcttctcttctcctggacaactcaagctcaaaacccaaaatcgaccttgtcgacccggatccgagctaggcacccgcacgaccacccgcctcctgccggtcaccgggacctagcatcgccgggcggcggcgggggaggggaaggtaggcgatgaggaaacgtgagcgggagaacccgtgcgggatctgcgggcactaccacaagtacgaggagggggaggtatgcggggtgtgcggccaccgctggaaaccgtcggacggggagggcgccccgtcgaggcacgagtccgccttccccacagaggtgctcaaggactttctcttcctcgggagctacgacaacgcctcacgctccgaggtcctcagaacgctcagtatctcccacatccttaatgtacgtattcaagccctattttctagatgatccacatccccttccttgtttgtgattattaaatccggcgtcttcaaagctggagatcgattccccgtccaaatagaactaaagaagctggtgagcgatagcagtacagtaccgctggcgctatctagggtttggcattttatgaccatccatggtctattcaggacagtttggtcaatctatagcttgtcatcttctacaggatagaccacagactattaatttgtactgctgttgcttgaaaggttacatttgtaggtttagtttatagcaaacagaacgagaatgtgtttttgtacagtcttgttaattatttactcaagtggaaagcgggttcaagtgaagaaagaacaagcagaacatgggaaggcaactaatatgaggactttatttgaacagttaaactggatgcgaaactcaaacaggggtatttgacaattgaatgatgtggactgtggagcttgattgattaggaagaagaaaaccagttcacttgtgataattggtagttagcgaatatttaaggaacgaggcgtagcctgcggtgatgattacgcatatttagcttcttattcgactagtattcctatggtatcagaaattaacaggacctgatatggaagtggcttgattgttcacctgagataatttggaacaggcgtgatggttatggaatgatgctaattaattttcgtgacacggtgctaagtatggttcattatgttccataaatgtcaaccatgttacaactgctagttgaatttgacatataatcttcatagtagatagatggatgctgtttggttcagtggcatactctgtttcaaattatagtctgttttggcttttctagatacatatgtatctggacatagcatatatctaggtgcggagcaaaagctatgtaactacaaaagaaaaaaaacgacctaatttgggacagagggaatagttatgttgctgtcatgttgatgatgtacaacatgttcacgtctattattatttctggctagtttctcaatatggttactatcttgtgaatctgtaggctcaggtacctgacagtcaaccttttgtatattcctgcctcactgttaaaatcagatgttgcccttgactgtttagcacttgcttcagtatgataattgaagattaattactatgtttagtatttgcttaacagactgtgcctgattgccacaatctgtacaagaattcattcacatatcacagtcttcaacgggacaggcctttggattttgatgaggcaaaccaatatctagagaaatgtgaaagagataaatcgcgtgttcttgttcattgcatgactggaaaaaacaggtctgctgctattgttgcagccttcttgatgaagtctagagggtggagacttgcacaatcttttcaatgggtgaaagatcgaagaccacagcttctcagaaggagcttttggagtatgagctgaagcttttcggacccagtactcaaaccttggttcccactgaatcatttgcttctcttggatttggttatacaaaaccagcaggtgacatgcaaacgcctgtgttcaaccaaacgaccatgccatccatattcgagcgattcaacccaaatgatcgccccaccaatttcacttttggagttgagaggaaagcagaagctaaccctcgagataacaatagtgatggcagggtaaacccaacttcaacggagaacctgatggacagctcttaagatgatttcacgatgtcgctgttgaatctccttgttccagaagtaaacccgctgtaatctgcatgtcgcggaagtaaacctactgctcggtgcctcggtgcaccgaatacttatccggtgtctaggtttcagggaggttttgcccttgtcgcatgagaaatggttctctggaaaccgatctttgctttagaatgactgtatgaaatagatgtttgtggctcatctatctgttcctttctcgtatagtttctgattgctacatatgaataa

SEQ ID NO: 128947 - DNA, 1544 bp, Zea Mays
aatccgtgtcaagcctcaagcgtgaagctatccgtacgatcggataacgaggcggtcccacctcccacggacatccccgtccccaccgatttgtttgtcatcactcgtcactcatcactcatcagctattcttctcttctcctggacaactcaagctcaaaacccaaaatcgaccttgtcgacccggatccgagctaggcacccgcacgaccacccgcctcctgccggtcaccgggacctagcatcgccgggcggcggcgggggaggggaaggtaggcgatgaggaaacgtgagcgggagaacccgtgcgggatctgcgggcactaccacaagtacgaggagggggaggtatgcggggtgtgcggccaccgctggaaaccgtcggacggggagggcgccccgtcgaggcacgagtccgccttccccacagaggtgctcaaggactttctcttcctcgggagctacgacaacgcctcacgctccgaggtcctcagaacgctcagtatctcccacatccttaatactgtgcctgattgccacaatctgtacaagaattcattcacatatcacagtcttcaacgggacaggcctttggattttgatgaggcaaaccaatatctagagaaatgtgaaagagataaatcgcgtgttcttgttcattgcatgactggaaaaaacaggtctgctgctattgttgcagccttcttgatgaagtctagagggtggagacttgcacaatcttttcaatgggtgaaagatcgaagaccacaggttcaactgacagatgcttctcagaaggagcttttggagtatgagctgaagcttttcggacccagtactcaaaccttggttcccactgaatcatttgcttctcttggatttggttatacaaaaccagcaggtgacatgcaaacgcctgtgttcaaccaaacgaccatgccatccatattcgagcgattcaacccaaatgatcgccccaccaatttcacttttggagttgagaggaaagcagaagctaaccctcgagataacaatagtgatggcagggtaaacccaacttcaacggagaacctgatggacagctcttaagatgatttcacgatgtcgctgttgaatctccttgttccagaagtaaacccgctgtaatctgcatgtcgcggaagtaaacctactgctcggtgcctcggtgcaccgaatacttatccggtgtctaggtttcagggaggttttgcccttgtcgcatgagaaatggttctctggaaaccgatctttgctttagaatgactgtatgaaatagatgtttgtggctcatctatctgttcctttctcgtatagtttctgattgctacatatgaataaggcatagtgcttaccagtcgggtcgtttgtttggtcatgtatatatgtagtcgtccgtaaaaggagagagatggagagatttttcaggtcggcagctggtggtgacgtgatgagttttagatctttagtctaacgcaacaggagattaagaatctagattatcacctttttagttcgaaggtttg

SEQ ID NO: 128948 - DNA, 1029 bp, Zea Mays
cgaaaccgcccgttgccaaaactgcaaccccattcacttacactcacttctagctctgttctgtacaacttcagggtgggaaaaccacttaagttacgccgcgacgttgggcaaaccacaacttcatctaataactacaaagaatacaacaaacacaaacctagaacccaactatcaaactgtacatattaacagctacatggacaaaccacaaaagaatgaatgaaatcaccgtagaactacaataaccgacatcatcaggatatacactttacatgtaaagacgaagttgctgctgtcgagtagagagccttaattacagaaatgaacttcagagacgcttcttcagagaaccacttaagtttccatgtatgtactgtgccgatttcctcagactgcttgttttgaggattttggatgctattgtgaaactctcctggcctaccattatcaaaaatcaatgtcaaacatttgttgttgcgctgatccatgacctgaatgtacacattgcagaacaaaatcaactttctgaacgagtttgtgggggcaataaacaaaacaagaagcacaagcaccctgtgctggcctgcgtgtccttcctcgcgtggcggcggttccgttacgcggagctccgggaggagtgggaggtggagttcggcccgcaccggtcgcaccggttcgcctacaaggatcttttccacgcggcggagggcttcgacagcaagcacctcctcggcgtcggagggttcgggcgcgtgtacaagggcgttctcccggcgtccaagaccgaggttgccgtcaaggtcgtgtcgcacgacgcgaggcaagggatgaagcagttcgtcgcggaggtggtcagcatcggccgcctgcgtcaccgcaacgtcgtgcagctgctcggctactgccggcggaaaggcgagcttctcctggtgtacgactacatgcccaacggcagcctagacaggtggctgtagaactcgacgccctcccgcacctccgcgcggcgccccagtcccagccccagcc

SEQ ID NO: 128949 - DNA, 1645 bp, Zea Mays
cgtcctccttatttaggcaccgtcttttgtcccccccccccccccccccccctttctgttccgagccgaaccaaggcgccatgagctccccggccgtgcgccgcgtcgtactcctctcgtcactcctctgcgccggagcgctcggtttcttgccctgctcccatgccgccgcggtggcgcccggctacgtcgccgtctccgccgccagcttcgtgccgtcctcaacgtgcagctcccccgacccagttccgccgcagcggcggaacggcacgtccgccgtgctgcggctgacgcacaggcacgggccgtgcgccccctcgcgggcgtcctcgctagcggccccgtcggtggctgacacgctgcgcgcggaccagcgccgagcggagtacatactgaggagggtgtcggggcgcgcgcctcagctgtgggactccaaggcggcggcggcggcggcgacggtgccggcgagctgggggtacgacatcggcacgctcaactacgtggtgacggcgagcctcggcacgccgggcgtggcgcagaccatggaggtggacaccggcagcgacctgtcgtgggtgcagtgcaagccgtgctccgcggcgccgtcgtgctacagccagaaggacccgctcttcgaccccgcccagtcgtcgtcctacgccgccgtgccgtgcgggggccccgtgtgcgcggggctgggcatctacgccgcgtccgcctgctcggcggcgcagtgcggcgcggtgcagggcttcttcttcggctgcgggcacgcgcagagcgggctgttcaacggcgtcgacgggctcctgggcctcggccgcgagcagccgtcgctcgtggagcagacggcgggcacctacggcggggtcttctcctactgcctcccgacgaagccgtccaccgcggggtacctcacgctgggcgtgggcgggccgtcgggcgccgcgccgggcttctccacgacgcagctgctgccgtcgccgaacgcgccgacctactacgtcgtcatgctgacggggatcagcgtcggcgggcagcagctcagcgtgcccgcgtcggcgttcgcgggcgggacggtggtggacaccggcacggtcgtcacccgcctgcctccgaccgcgtacgcggcgctgcggtccgcgttccgcagcggcatggcctcgtacgggtacccgacagcgccgtcgaacgggatcctggacacctgctacaacttcgccgggtacggcaccgtgacgctcccgaacgtggcgctcaccttcggcagcggcgcgaccgtgacgctgggcgccgacgggatcctgtcgttcgggtgcctcgcgttcgcacccagcggcagtgacggtggcatggccatcctcggcaacgtgcagcagcgctcgttcgaggtgcgcatcgacggcacctccgttggcttcaaacccagctcctgctaactcatggattaacagtcggcgacttgggatcactactagtagtagtatatgcacgtacgtagacgagagtgcagagatacatacaaagttactgtacatgatgatagtaaagataaacttgcaggagagcgtataccatacacagcacacagcagtagcggtggaagttctttcgttggtggaattaaggggctaaccagagacgt

SEQ ID NO: 128950 - DNA, 139 bp, Zea Mays
gtcttggctaccaataccatctcgctgctgcacacgtcacagggcaacagcagcagtcctagttctgaaggcaacaacgataccggtacacgtacgagccgtcggcgtcggaagcctccaatcagaaaagaaaagaaaa

SEQ ID NO: 128951 - DNA, 2228 bp, Zea Mays
gtcatagagagccacaggccacaggcaggcaggaggatcggacgagtcagcgaggaagctgcctgctttcagatagagagagttattaagatggcgttgcttcggctgcttgccatctccctgctcttcgcagtggccactcctgtcagggacatcgcccacgatgcctgctcgtcagaagtgaaggatttccagcacctgaacaacagctcggggctccacctgacgctgcaccacccgcagagcccctgctccccggcgccgctgcccgccgacctccccttctccgcggtgctcgcccacgacggcgcgcgcgtcgcgtcgctcgccgcacgcctcgccaagacgccgtcctctcggcccaccttgcttgacgagagccgcgcggggtcgtcgtcgtcgtcgtcccccgatgacgagtcgtccctcgcgtccgtgccgctcggcccgggcacgtccgtcggcgtgggcaactacgtcacccgcatgggcctcggcacgccagccaagtcgtacgtcatggtcgtggacacggggtcctcgctcacctggctccagtgctccccctgcgtcgtgtcgtgccaccgccagtccgggccggtgttcaaccccaaggcgtccagctcctacacctccgtgtcctgctccgcgcagcagtgcagcgacctcaccaccgccacgctcaaccccgcctcctgctccacatccaacgtctgcatctaccaggccagctacggcgacagctccttctcggtcgggtatctgagcaaggacaccgtgtcgttcggctcgaccagcgttcccaacttctactacggctgcggacaagacaacgagggcctcttcgggcagtcggcggggctcatcggcctggcgcgtaacaagctgtcgctgctgtaccagctggcgccgagcatgggctactccttctcctactgcctcccgacgtcgtcgtcgtcgtcctcggggtacctgtccatcggctcctacaacccggggcagtactcgtacacgcccatggcgtcgagctcgctggacgactcgctctacttcatcaagatgaccgggatcaaggtcgcgggcaagccgctgtccgtgtcgtcgtcggcctactccagcctgccgacgatcatcgactccggcacggtgatcacgcgcctgcctacgggcgtgtactcggcgctcagcaaggcggtggcgggcgccatgaaggggacgccccgcgcgtcggcgttctccatcctggacacgtgcttccagggccaggcggcgcggctgcgcgtgcccgaggtcaccatggccttcgcgggcggcgcggcgctcaagctggccgccaggaacctgctggtggacgtggacagcgccaccacgtgcctggccttcgcgcccgcccggagcgccgccatcatcgggaacacgcagcagcagacgttcagcgtcgtctacgacgtcaagaacagcaagatcgggttcgccgccggcggctgcagctgagaagcgacacctacatacacgcgcatgcacagaccgactcggtaactaaaactaaaacgaacagcgcatgcatgcatctaccgtccggtttcgtctgaaaccatcattaatttcgatcgtccactccacgcacagcaagttctttacggagcttgccgcatatgatatgtacatggtgacaagataaggtacaggagaattgatgaaagaagcgttgccggccagtcgtcgttgcacgagaacaaacacataaattaaaacattattacaggagtagggtatttattgtattgttcaggccagaaaaatatgtggaaagtgggtctttaacttaattcggaagaagcatatagcactccaaaaaaaaaaaaagattcatattcatcacatagccaacagatagcatgtagtagctgttcatgcatgttattcttttggcaagtcctggtcaggaagtactatttactgtgtgtaggacgaataaactgaagtgatgtgtatgtttctgatttctttcgtacttgcaaccccgggcccacgtggtttttttactcccttctatatatactgtggaaaatattgtaacccacgcacaagacacacactcctatgctatatatgttctatgcacaagacacactttgttaacgaacaaagagatcgatgatgcaaatatttatcactatatatatatggctattgttagtttcgtgccttttgcacgatgaatataa

SEQ ID NO: 128952 - DNA, 1713 bp, Zea Mays
gtcatagagagccacaggccacaggcaggcaggaggatcggacgagtcagcgaggaagctgcctgctttcagatagagagagttattaagatggcgttgcttcggctgcttgccatctccctgctcttcgcagtggccactcctgtcagggacatcgcccacgatgcctgctcgtcagaagtgaaggatttccagcacctgaacaacagctcggggctccacctgacgctgcaccacccgcagagcccctgctccccggcgccgctgcccgccgacctccccttctccgcggtgctcgcccacgacggcgcgcgcgtcgcgtcgctcgccgcacgcctcgccaagacgccgtcctctcggcccaccttgcttgacgagagccgcgcggggtcgtcgtcgtcgtcgtcccccgatgacgagtcgtccctcgcgtccgtgccgctcggcccgggcacgtccgtcggcgtgggcaactacgtcacccgcatgggcctcggcgttctccatcctggacacgtgcttccagggccaggcggcgcggctgcgcgtgcccgaggtcaccatggccttcgcgggcggcgcggcgctcaagctggccgccaggaacctgctggtggacgtggacagcgccaccacgtgcctggccttcgcgcccgcccggagcgccgccatcatcgggaacacgcagcagcagacgttcagcgtcgtctacgacgtcaagaacagcaagatcgggttcgccgccggcggctgcagctgagaagcgacacctacatacacgcgcatgcacagaccgactcggtggttagcaaatctgtacaagaattcattcacatatcacagtcttcaacgggacaggcctttggattttgatgaggcaaaccaatatctagagaaatgtgaaagagataaatcgcgtgttcttgttcattgcatgactggaaaaaacaggtccgctgctattgttgcagccttcttgatgaagtctagagggtggagacttgcacagtcttttcaatgggtgaaagaccgaagaccacaggttcaactgacagatgcttctcagaaggagcttttggagtatgagctgaagcttttcggacccagtactcaaaccttggttcccactgaatcatttgcttctcttggatttggttatacaaaaccagcaggtgacatgcaaacgcctgtgttcaaccaaacgaccatgccatccatattcgagcgattcaacccaaatgatcgccccgccaatttcacttttggagttgagaggaaagcagaagctaaccctcaagataacaatagtgatggcagggtaaacccaacttcaacggagaacctgatggacagctcttaagatgatttcacgatgtcgctgttcaatctccttgttccagaagtaaacccgctgtaatctgcatgtcgcggaagtaaacctactgctcggtgcctcggcgcaccgaatacttatccggtgtctaggtttcagggaggttttgcccttgtcggatgagaaatggttctctggaaaccgatctttgctttagaatgactgtatgaaatagatgtttgtggctcatctatctgttcctttctcgtatagtttctgattgctattatatggataaggcatagtgcttactgcttaccagtcgggtcgtttatttggtcatgtatatatgtagtcgtccgtaaaaggagaggagagat

SEQ ID NO: 128953 - DNA, 1423 bp, Zea Mays
tcatagagagagccactggccacaggcaggcaggaggatcggacgagtcggcgaggaagctgcctgctttcagatagagagagttattaagatggcgttgcttcggctgcttgccatctccctgctcttcgcagtggccactcctgtcagggacatcgcccacgatgcctgctcgtcagaagtgaaggatttccagcacctgaacaacagctcggggctccacctgacgctgcaccacccgcagagcccctgctccccggcgccgctgcccgccgacctccccttctccgcggtgctcgcccacgacggcgcgcgcatcgcgtcgctcgccgcgcgcctcgccaagacgccgtcctctcggcccaccttgcttgacgagagccgcgcggggtcgtcgtcgtcgtcccccgatgacgagtccctcgcgtccgtgccgctcggcccgggcacgtccgtcggcgttctccatcctggacacgtgcttccagggccaggcggcgcggctgcgcgtgcccgaggtcaccatggccttcgccggcggcgcggcgctcaagctggccgccaggaacctgctggtggacgtggacagcgccaccacgtgcctggccttcgcgcccgcccggagcgccgccatcatcgggaacacgcagcagcagacgttcagcgtcgtctacgacgtcaagaacagcaagatcgggttcgccgccggcggctgcagctgagaagcgacacctacatacacgcgcatgcacagaccgactcggtaactaaaactaaaacgagcagcgcatgcatgcatctaccgtccggtttcgtctgaaaccatcattaatttcgatcgtccactccacgcacagcaagttctttacggaccttgccgcatatgatatgtacatggtgacaagataaggtacaggagaattgatgaaagaagcgttgccggccagtcgtcgttgcacaagaacaaacacataaattaaaacattattacaggagtagggtatttattgtattgttcaggccagaaaaatatgtggaaagtgggtctttaacttaattcggaagaagcatatagcactccaaaaaaaaagattcatattcatcacatagccaacagatagcatgtagtagctgttcatgcatgtaattctttggcaagtcctggtcaggaagtaccatttactgtgtgtaggacgaataaactgaagtgatgtgtatgtttctgatttctttcgtacttgcaacccggggcccacgtggtttttttactcccttctatatgtactgtggaaaatattgtaaccgcacaagacacactcctatgctatatatgttgtatgcacaagacacactttgttaacgaacaaagagatcgatgatgcaaatatttatcactatatatatatatggctattgttagttt

SEQ ID NO: 128954 - DNA, 2294 bp, Zea Mays
tcatagagagagccactggccacaggcaggcaggaggatcggacgagtcggcgaggaagctgcctgctttcagatagagagagttattaagatggcgttgcttcggctgcttgccatctccctgctcttcgcagtggccactcctgtcagggacatcgcccacgatgcctgctcgtcagaagtgaaggatttccagcacctgaacaacagctcggggctccacctgacgctgcaccacccgcagagcccctgctccccggcgccgctgcccgccgacctccccttctccgcggtgctcgcccacgacggcgcgcgcatcgcgtcgctcgccgcgcgcctcgccaagacgccgtcctctcggcccaccttgcttgacgagagccgcgcggggtcgtcgtcgtcgtcccccgatgacgagtccctcgcgtccgtgccgctcggcccgggcacgtccgtcggcgtcggcaactacgtcacccgcatgggcctcggcacgccggccaagtcgtacgtcatggtcgtggacacggggtcctcgctcacctggctccagtgctccccctgcgtcgtgtcgtgccaccgccagtccggcccggtgttcaaccccaaggcgtccagctcctacgcctccgtgtcctgctccgcgcagcagtgcagcgacctcaccaccgccacgctcaaccccgcctcctgctccacctccaacgtctgcatctaccaggccagctacggcgacagctccttctcggtcgggtatctgagcaaggacaccgtgtcgttcggctccaccagcgtgcccaacttctactacggctgcggacaagacaacgagggcctcttcgggcagtcggcggggctcatcggcctggcgcgtaacaagctgtcgctgctgtaccagctggcgccgagcatgggctactccttctcctactgcctcccgacgtcgtcgtcgtcgtcctcggggtacctgtccatcggctcctacaacccggggcagtactcgtacacgcccatggcgtcgagctcgctggacgactcgctctacttcatcaagatgaccgggatcaaggtcgcgggcaagccgctgtccgtgtcgtcgtcggcctactccagcctgccgacgatcatcgactccggcacggtgatcacgcgcctgcctacgggcgtgtactcggcgctcagcaaggcggtggcgggcgccatgaaggggacgccccgcgcgtcggcgttctccatcctggacacgtgcttccagggccaggcggcgcggctgcgcgtgcccgaggtcaccatggccttcgccggcggcgcggcgctcaagctggccgccaggaacctgctggtggacgtggacagcgccaccacgtgcctggccttcgcgcccgcccggagcgccgccatcatcgggaacacgcagcagcagacgttcagcgtcgtctacgacgtcaagaacagcaagatcgggttcgccgccggcggctgcagctgagaagcgacacctacatacacgcgcatgcacagaccgactcggtaactaaaactaaaacgagcagcgcatgcatgcatctaccgtccggtttcgtctgaaaccatcattaatttcgatcgtccactccacgcacagcaagttctttacggaccttgccgcatatgatatgtacatggtgacaagataaggtacaggagaattgatgaaagaagcgttgccggccagtcgtcgttgcacaagaacaaacacataaattaaaacattattacaggagtagggtatttattgtattgttcaggccagaaaaatatgtggaaagtgggtctttaacttaattcggaagaagcatatagcactccaaaaaaaaagattcatattcatcacatagccaacagatagcatgtagtagctgttcatgcatgtaattctttggcaagtcctggtcaggaagtaccatttactgtgtgtaggacgaataaactgaagtgatgtgtatgtttctgatttctttcgtacttgcaacccggggcccacgtggtttttttactcccttctatatgtactgtggaaaatattgtaaccgcacaagacacactcctatgctatatatgttgtatgcacaagacacactttgttaacgaacaaagagatcgatgatgcaaatatttatcactatatatatatatggctattgttagtttcgtgccttttgcacgatgaatataatggttgaacatgggacgaataggtggttagcaaagctgtacagcaggagagatataagagagcaactttagttgttggg

SEQ ID NO: 128955 - DNA, 1746 bp, Zea Mays
atggcgttgcttcggctgcttgccatctccctgctcttcgcagtggccactcctgtcagggacatcgcccacgatgcctgctcgtcagaagtgaaggatttccagcacctgaacaacagctcggggctccacctgacgctgcaccacccgcagagcccctgctccccggcgccgctgcccgccgacctccccttctccgcggtgctcgcccacgacggcgcgcgcatcgcgtcgctcgccgcgcgcctcgccaagacgccgtcctctcggcccaccttgcttgacgagagccgcgcggggtcgtcgtcgtcgtcccccgatgacgagtccctcgcgtccgtgccgctcggcccgggcacgtccgtcggcgtcggcaactacgtcacccgcatgggcctcggcacgccggccaagtcgtacgtcatggtcgtggacacggggtcctcgctcacctggctccagtgctccccctgcgtcgtgtcgtgccaccgccagtccggcccggtgttcaaccccaaggcgtccagctcctacgcctccgtgtcctgctccgcgcagcagtgcagcgacctcaccaccgccacgctcaaccccgcctcctgctccacctccaacgtctgcatctaccaggccagctacggcgacagctccttctcggtcgggtatctgagcaaggacaccgtgtcgttcggctccaccagcgtgcccaacttctactacggctgcggacaagacaacgagggcctcttcgggcagtcggcggggctcatcggcctggcgcgtaacaagctgtcgctgctgtaccagctggcgccgagcatgggctactccttctcctactgcctcccgacgtcgtcgtcgtcgtcctcggggtacctgtccatcggctcctacaacccggggcagtactcgtacacgcccatggcgtcgagctcgctggacgactcgctctacttcatcaagatgaccgggatcaaggtcgcgggcaagccgctgtccgtgtcgtcgtcggcctactccagcctgccgacgatcatcgactccggcacggtgatcacgcgcctgcctacgggcgtgtactcggcgctcagcaaggcggtggcgggcgccatgaaggggacgccccgcgcgtcggcgttctccatcctggacacgtgcttccagggccaggcggcgcggctgcgcgtgcccgaggtcaccatggccttcgccggcggcgcggcgctcaagctggccgccaggaacctgctggtggacgtggacagcgccaccacgtgcctggccttcgcgcccgcccggagcgccgccatcatcgggaacacgcagcagcagacgttcagcgtcgtctacgacgtcaagaacagcaagatcgggttcgccgccggcggctgcagctgagaagcgacacctacatacacgcgcatgcacagaccgactcgcaagttctttacggaccttgccgcatatgatatgtacatggtgacaagataaggtacaggagaattgatgaaagaagcgttgccggccagtcgtcgttgcacaagaacaaacacataaattaaaacattattacaggagtagggtatttattgtattgttcaggccagaaaaatatgtggaaagtgggtctttaacttaattcggaagaagcatatagcactccaaaaaaaaagattcatattcatcacatagccaacagatagcatgtagtagctgttcatgcatgtaattctttggcaagtcctg

SEQ ID NO: 128956 - DNA, 1636 bp, Zea Mays
ctaccctaccccacatgccagtcacacgatccgcgcgcacgccgcttgactttactcgaccggagcggagcgcgcagagcacctcactctcgtcgcgtccacccacagatctcaccgccaaagatggcccgctgcggtgatagagacatcgtcacggcggcgatggcgcggcagccctggcgccgccgccacggatggcagctccccctacacccgcttcagctggtggccgcagcggtattcgcgcttctcgtggccgcgttctacgtcgtcctggggccctacatcgggaacaccctcgccggcaatatcctcctaatcaccttctctttctcggccgcagcgacagcggcgctctacgtgcgctgcacagcggtggacccgtcagaccggactgacgcgaagaagaccaagcggcggcggcagctcgctcggggcggtgggggcacggcgaagttgccgcggctgcggtatggctacatcctgtggcgctacgcggtgcggttgctgcggcgggttgaggcgcgggtcaccaaccgctgggtgcggcggagctacctggagcagtggaacaccagcgttcagctcgatcccatgctccccttcgccttcaccagcctcgatgacatcgtctcgccatgcgccactgccgacgggcacgacatctctttctgccccatctgcgactgcgaggtgaagttgcgtagcaagcactgcaagacctgtgagcgttgcgttgatggatttgatcaccactgcaggtggctaaacaattgcattggaagaaggaactatgcaacgtttattctgcttatgttctttgtcttgctgatgcttgtcattgagggaggaacagcaattgcgatcttcatccgctgttttgtcgacagcaaaggggtgaaaatggaaatggagcacaggctgcacctgaggctcccaaaaggagctcatgcagcactatcagtggtttttgtcatcttcacaatttacagcactgcagcactgggccagctcttctttttccacatggttctcattagaaagagtgcgcggaagctgtcgatcagggtcgagagcgaccaaatggatgcttcaggaaggaaggatgacatccaaatcaacccatggacattgatcaagatgagcaaagagaaggcgatggctgccgctgagcgcgcacgtgagcggatcagacagaagctgccaacatcacccatgaaaccactgccggtggagacaaagcgaggccctctgaacccagagagaaaacacatcacgaccgggaaagagatcgtaccggtcttcaccaagagctggctgtcggtgtcgcccacagcgaggatctcgagccccaggaggcgattctcagggtcatcgtcgcctaagccgcagagatacaggagcaacttcgacctgaggctcgccgaggtgtcgagggatctggagacccacatctcgaagcaagtgctgtgctccgtcgtcatgaagggtgtcgaggacgaaggctattcgtcgtaatttaggtggggtgttgtatgcttagtccacaatattcattggtattttttggttcttgagaatgatgtgctgtgctttcttagcatgacgatgtgaattcccattacatagttattag

SEQ ID NO: 128957 - DNA, 1885 bp, Zea Mays
ctaccctaccccacatgccagtcacacgatccgcgcgcacgccgcttgactttactcgaccggagcggagcgcgcagagcacctcactctcgtcgcgtccacccacagatctcaccgccaaagatggcccgctgcggtgatagagacatcgtcacggcggcgatggcgcggcagccctggcgccgccgccacggatggcagctccccctacacccgcttcagctggtggccgcagcggtattcgcgcttctcgtggccgcgttctacgtcgtcctggggccctacatcgggaacaccctcgccggcaatatcctcctaatcaccttctctttctcggccgcagcgacagcggcgctctacgtgcgctgcacagcggtggacccgtcagaccggactgacgcgaagaagaccaagcggcggcggcagctcgctcggggcggtgggggcacggcgaagttgccgcggctgcggtatggctacatcctgtggcgctacgcggtgcggttgctgcggcgggttgaggcgcgggtcaccaaccgctgggtgcggcggagctacctggagcagtggaacaccagcgttcagctcgatcccatgctccccttcgccttcaccagcctcgatgacatcgtctcgccatgcgccactgccgacgggcacgacatctctttctgccccatctgcgactgcgaggtgaagttgcgtagcaagcactgcaagacctgtgagcgttgcgttgatggatttgatcaccactgcaggtggctaaacaattgcattggaagaaggaactatgcaacgtttattctgcttatgttctttgtcttgctgatgcttgtcattgagggaggaacagcaattgcgatcttcatccgctgttttgtcgacagcaaaggggtgaaaatggaaatggagcacaggctgcacctgaggctcccaaaaggagctcatgcagcactatcagtggtttttgtcatcttcacaatttacagcactgcagcactgggccagctcttctttttccacatggttctcattagaaagggcatgaggacctacgactacattcttgcgatgagagaagcaggagcagcatttgacccattcgaagactctgattctgacgagagcatcgactttgactcaccggagaagccatctttcttttcaagggtcttttgcagaaaagatgaagtgaatgaaagtgcgcggaagctgtcgatcagggtcgagagcgaccaaatggatgcttcaggaaggaaggatgacatccaaatcaacccatggacattgatcaagatgagcaaagagaaggcgatggctgccgctgagcgcgcacgtgagcggatcagacagaagctgccaacatcacccatgaaaccactgccggtggagacaaagcgaggccctctgaacccagagagaaaacacatcacgaccgggaaagagatcgtaccggtcttcaccaagagctggctgtcggtgtcgcccacagcgaggatctcgagccccaggaggcgattctcagggtcatcgtcgcctaagccgcagagatacaggagcaacttcgacctgaggctcgccgaggtgtcgagggatctggagacccacatctcgaagcaagtgctgtgctccgtcgtcatgaagggtgtcgaggacgaaggctattcgtcgtaatttaggtggggtgttgtatgcttagtccacaatattcattggtattttttggttcttgagaatgatgtgctgtgctttcttagcatgacgatgtgaattcccattacatagttattagcatgattttttatctgtttggtaaaatgtgtttgttggcgtcgatctggaattctggacagcgtcaaccactggggtgtagacatcttag

SEQ ID NO: 128958 - DNA, 115 bp, Zea Mays
ctgtgcggggtctggggaagggtatctttaagcgccaagccttacccgcataatatgcagaggctggggctcgaacccgagaccttccggttacagacggtaggctctaccgctg

SEQ ID NO: 128959 - DNA, 157 bp, Zea Mays
tgagaagagacggggcagcagcacgaagcgtttggtgtgatcggcttgcctccctcggcgcctcgtctcctaacgcttacgcttcccttgcttcgtttccgcctactccttcctccctatactctagtttgcccttgcctctgctagtgctcggtaa

SEQ ID NO: 128960 - DNA, 118 bp, Zea Mays
cggttcttccattacccccaggccccagcgtgcgtggtctccttcctctcgtggcgacgaccgagcggccgtcgctgcctacgtgcccagtcctgttcgtcccttcgccggcgacggc

SEQ ID NO: 128961 - DNA, 2404 bp, Zea Mays
tctatgcacacgtgtctatttggagatactgaatgtggatggtactgtcattttctttcaggttataggcaaagtttgtcctgaactgttcatcatggtggaaggctgggtattctctgctttgttagtggtgtttctagcgttcacaacaccttgtgagtcattctacttgccaggtagttatatgcacacatatcagcaaggtgaagtaataagggcgaaggtgaactctctcacttccattgagacagaactacccttcagttactacagccttccatactgtcgtcccagagatggggttaagaagagtgctgaaaacttaggcgagcttctgatgggtgatcaaatagataattctccgtaccgtttccgtgtaaatgtcaacgaatctctgtatctgtgtactacaaccccacttgacgaggctaatgtgaagctcctcaagcagcgtagccatgatctataccaggtgaacatgattcttgacaatcttcctgtgaggaggttcacagagcagaatggaataaccatccagtggacaggctatccagttggttatattccagaaggcacttctgatgtctacatcatcaatcacctgaaatttaaggtcttggtccataagtatgaaggaggcgaagtaaaggtagttgggactggggaaggaatggaagtgatctcagagactgacaaagatgccaattctggatatgagattgtgggatttgaagttgtcccatgcagcgtgaagcgtgatcctgaatccatattgaagcttaatatgtatgataaagtcgatcctgtgaactgccctgtggagttggaaaaatctcaattggttagggagaaagagaagattacttttacttatgaggttgaatttgtaaacagtgatatcaggtggccatcacggtgggatgcatacctgaagatggagggttcgaagattcactggttttcaattatgaactcattgatggtaattctatttttggctggcattgtatttgtcatattcttgcgtacagtgaggagggacttgactcggtatgaagagttggataaggaggcccaagctcagatgaatgaggagctctctggttggaagcttgttgttggagatgtcttcagagaaccaacctcaccgaagctgctctgtgtcatgattggcgatggggttcagattttgggtatggcaattgttaccattttctttgccgcatttggcttcatgtctcctgcatcgagaggaatgttgttgacagggatgatagtcttttatatgttacttggaattgtgtctgggtatgctgctgtcaggctctggaggactttaaaaggaacgtccgagggatggaggtctgtctcctggtcaactgcttgtttcttccctggcattgtcttcattgtcctcactgtgttaaacttcatgctgtggacaagaaatagtactggagcccttcccatctcacttttctttggccttttgtccttgtggttctgtgtctccgtgccacttacccttttaggtggtttctttggcacaagggctgagccaatagaattccctgttcgaaccaatcagataccaagagaaatccctacgaagaagtactcattgctcttcatacttggtgctggaactctaccttttggaacactcttcatcgagctcttcttcattctttctagtatttggcttggaaggttctattacgtgtttggcttcctccttgtcgtgcttcttttgctgattgtggtgtgtgctgaggtatcagttgttcttacctacatgcatctctgcgcggaggactggaggtggtggtggaaagctttctttgcttctggaacagtggccctttatgtgttcctttactctatcaactacttggtgtttgatctcagaagcttgagtgggccagtttctgctattctctacattggatactctttcgttgtctcccttgccattatgctagcgactggtaccgttggcttcctgacgtcgttctcttttgtccactaccttttctcatcagtcaagattgattgaagatccagggttgtctttacacaaaatcacctgtgagctcaaatgatatgaccattgcatcttgaaggcctttcacagagcagtgctgtttgtaatgtagcttattaccgagagtctgagactactgtaccttgtaatgaatagtatatttcagcagatgtgttttgaagtttgtcacactttgctacagcattttgttgacctgccaatactgtaggaaaagtcttgcgtttattatcccatggtgccattttgttgtctgtttctttctgcaagattggcttgcagctggagaactatacgttcttatggtataatatacatgtgcaaaatgtttcccatgcgcaa

SEQ ID NO: 128962 - DNA, 3348 bp, Zea Mays
atggcgcgaagcgccgccgcccggctactcgctttctcccctctcctcggctccagccactgccacttgtgccttagccaccctcccctcctccgtctccttcctacctgccgttctaagaccacctcccgcaagccgcctcgctcacagcatcgtagaaaggtggcgcctgcaaccgccggcagcggtcgcccagggccgccgccaggggcgcccccctgtcttttccaggaaatctccgaactcgtcgcctcagtgaccaatggcgaagcgttacgaccccgaaggaatggcagtgcgccttctgatgacgtcggagctgctgctatggggtgcaccgaaggtgcacgaggtattgcttcagggagagcggcgatggcttctacctccagtgctggcagcatagcggaccgggtcgttcttggtgaccgtgcagatgatgggagacgtcaatcttgtggcactatcgcaaatactgcagcattctgccgggaggctggagacactggcatgacagtagattctgatgttgataatatcagcgcaatggtgcacaggattacaggaatcctccggtctgaggcacctgggccaccagtggagcagaaacttgagagcctgggtgctaattacactccaaaccttgttaacatggtgctgaagaggtgcttcaaggtcaggcaactgggattctggttcttccactgggcaaagcgactcccggatttccaccacacgacggagacatacaacacgatgctgtacattgtgggcgaagcgaggagctttggtatcatggaggagctcgtgggtgcgatggatagggagatgtgctccaaggacatcaagacatggacgattttattatccagttatggtaagacgagacagattggcaagatgctgtcaacctttgaggcgatgaggaaatcggaatccatctggatagacagtaaagtctataggacagttcttcacgctttgtgcaatgctgataagcctgagcttgcccttgagttctacaaggatatgcccagcaacatggaggtcaggactgatattcttcgactactaatgcgttgtcttgcaacatcagataatactatcgaaggtgtctatcttatcagagatgatatgattgagggcatgaaacatccagaggagtactgctacaccgaggctcttcaaagcttttgcatagcaggaaagtttggtgaggcatggaaagtctttcagaagatgaagaacaaattgttggctaactcatctgcacttgagaatctcctgagagggctctgcagagcagggagaatggatgaagctttgcaggtcacggaatacatgaagaggacatcaggtctaaacagtacaatgttttcgttcctcatcaatggctaccttaggaaaggggagcatatcaatgcacttgacttgctacgggagatgagagaatatggatgtgtcccactggcgtcatcttatacccaggtcatgcaacacctatttgcaaccgatcagtgtgaagaagcgtgcggactgtttgaagagatgctaaaaaaccgcgttgaaccagatattgttacgttcacagcactgattggcgggtatgttcgcagcggacatatatccaaagcatgggatgtcttcaggaatatcaataagaatgttcagaaacccacattgaaagcatatacagtcttcatgcgagagctgtgcaaggtgtccaggccccttgaggccgtagtacttttgaaggaaatgctggaatacgatttcaggccttctgagagaacattctgctggttaatttctgctttacgtgacaaatcctatttggaagaggcaagtaatgttgagagaatgcgagcatcttttaatttgcgaaaccctagagatggtttgcaattcgaacagttagatggcattggcaatattgataagtttcgaaaaatgcgcaagtctaatcctcaagaaaaagaactggcattggagttcaccagctccccgtcagatcaaaatggtaagacctccagtttcacactttctgatgacacacatcagaaagaacaagagcaggactacagtgatggagatgtcgaagaaatatgtcagattctgtcttcttctgatgattggggctcaacgcaacaggcactggagacgagatcagtccattttagtcctagtcttgttgatgccattttgaaacgttgcaaaaggaatagttgtgctgctttgcaatttttctcttgggtttgtagacgtccttactacatgcctagtacgaaaacatacaatactgctatgaaacttgcgggttctgcaaaagattttaagcacatgtggtatctgtacagagaaatgttaaggaccggatgctccccaactgtggatacatggaatgtcatggtctgtcagtatggcaatgctggtctgtctgaaaaggccttgaatacattctgggacatgaagaagtgtgggtttctgcctgataaaactacttacaatcacctgataatgtacctcacacacattaaagggcggaaaatagatgtggcagtcacaatcttccaagaaatgtgtcatgcaggacatatacctgataagaggattcttttcatgtatcttttggctctatgcgagtgtaggaaaatagaagatgcaacaagctcagtagtatccttatgtgaactaggattttctgtgcaggctgtctactccatattccttagatcattgtgcagggctgatagaatggaggaagctctccatttgtttgattgtattgagaaacatggttgctccagggaccagtacatgtacgggagtctcatccatgttttgctaaggagggacaaatttgaagaggctgttgccaagcttatggaaatgaagaatgaagggatacttcaaagcgcacatatctatacctcctttattgtttattactttcagaagagagatgttgtcaaggcattggatgtgctcagggagatgaaagagaatggatgtgagcctacagttgtcacgttctctgctttgatccgtggctacatggccatggatatggtttcagaggcctgggatgttttccaacaaatgaagctgaaaggacctgcaccagactttgaaacctactccatgttcatgtcatgcctatgcaaagcaggtagatcagaggatgggttgcatcttatccacgatatgtcagattgtggtttcattcccagcacagtaaactttatgactgttgtccatggtctaaatgtggagggcaaacatgagcttgctgagtctgttctactgtcaaaatggcacttgcggaagcaaagaaccatctcatattag

SEQ ID NO: 128963 - DNA, 1726 bp, Zea Mays
tgcttctcttttacgttctccctggtaacgaaaatatatttcttttctgctatgtatatcaactgtgtctttttcgattcacgtcagcaaatttcatgtggtagccgagctagggaggaggagacggtcagattaggagatatacgtagtactagagtatctccagagcttgctcccacgcccatcaccaaccgcttgtgctcaaaattgttggcgccgccagctttgcattggtgaaggataccggtgttttcggcagatttcagacaccgcattgtgctggcctcgataaaagtctcaggtgatcatgtcttggtctgttccgttccgtccttctctctgcagggcgatccggaaggccaattgctaccacagggaaggccacgacgcgccgtgctcggtgggaggagacggctactacatgctgctcttcggcctcgcgcaggtgctgctgtcgcagatacccaacttccacgagatggcggggctctccatcttcgccgccgtcatgtcctgcttctacgccttcgtcggcgtcggcctcggcgtcgccaaagtcatcgcaaacggggtgatcatgggcggcatcggaggcatcccgctggtgtccacgacgcagaaggtgtggcgagtctcgcaggccctcggggacatcttgttcgcctaccctttctcgttggtgctgctggaaatagaggtacgtgcgtgcgtcagatatgtgatcttgtatactcctaatcaacttatgagatcaaattatttattgcctcttgtgctgtgctgtgttgtgtttccaaggacacgctgaggtcgccgccgccggagagcgagacgatgaaaaaggcgacgagagcgagcatcgctatcaccaccctcttctacctctgctgcgggtgctttggctacgcgtcgttcggcgacggcaccccgggcaacctcctcaccggcttcggcttctacgagccctactggctcatcgacctcgccaacctcgccatcgttctccacctcctcggcggctaccaggtgtacacgcagccggtgttcgcgttcgcggaccgcaagttcggcggcggggccacggtcgtcgaggcgccgctgctgccggtgccgggcgcgcgccgcgtgaacgcgaacgtgttcaggctgtgcttccgcacggcgtacgtggcggcgaccacggcgctggccgtctggttcccctacttcaaccagatcatcgggctgctcggctccttcaccttctggccgctcgccgtctacttccccgtcgagatgtacctcacgaggaacaaggtggcgccgtggaccaaccagtggctcgccatccatgcgttcagcctcgtctgcctgctcatcagcgcgttcgcctccgtcggctctgcggttggcgtgttcgggtcggagacgagctgattcaaactctgcaaatgcaattgccggccacttttcggacatgcatgttctgtgcatatactgcgcttgtacatttagcgttatacctagtactggaacggtcaggccgggccccgagcctcgtgcttaggctcaaacgggtctgggcccagaaggtccaaattttttttggatcataccgtgtcagcctaaagagtagaaatagtggtttagccaggctctaaaacactttctatctttgttgggccatgccgacccatatatttaaaccatataaaattcaaatattacaacgacataaactacataa

SEQ ID NO: 128964 - DNA, 589 bp, Zea Mays
cgagctagggaggaggagacggtcagattaggagatatacgtagtactagagtatctccagagcttgctcccacgcccatcaccaaccgcttgtgctcaaaattgttggcgccgccagctttgcattggtgaaggataccggtgttttcggcagatttcagacaccgcattgtgctggcctcgataaaagtctcaggtgatcatgtcttggtctgttccgttccgtccttctctctgcagggcgatccggaaggccaattgctaccacagggaaggccacgacgcgccgtgctcggtgggaggagacggctactacatgctgctcttcggcctcgcgcaggtgctgctgtcgcagatacccaacttccacgagatggcggggctctccatcttcgccgccgtcatgtcctgcttctacgccttcgtcggcgtcggcctcggcgtcgccaaagtcatcggtaccactccacggtcaccactcatatgcatgacaatgccatgcctgcctgcctgccagacatttccctttttgagattattgaccgagcccttgcgcgattgccttcagcaaacggggtgatcatgggcg

SEQ ID NO: 128965 - DNA, 1575 bp, Zea Mays
gcgttatcacgagattcgtccgagcgacgacgtctcgacagtcccgggccgctgagatcttgccgcgggagggagagcagcagcggcagcatcagacatgtcgtcggggcggtacatggcctactcgccctcgccgtcgaccaccccccactccccccgcatcgccggcctccgcgccccgtctgccgccgtggccgaacaggagaagtaccttgccgaactgctcgcggagaggcagaagcttggcccgttcgtcccagtgatcccgcatagtgtacgcttgctgaatcaagaaattttacgtgtttccacactattggagaacgcatcccttttaaatcaaagtggccttgaacatggtagtccactaacaacaggaggattatattcaaatggagcagctactgacatgaatgtgtggacatcagcatttcaaccagaaagttcaccagcttatagctggcttggaggatcccagggcagctcctctggacttattgtcaagaaaacaatgaaggtcgatatcccagtagacaaatatccaacattcaatttcgttggccgcatccttggtccaagaggaaattccttgaagcgggtggaggcaaatacggactgccgtgtgctaataagaggtcgtggcagcatcaaagatccagcacgggaggaaatgatgcgagggaagccaggatatgaacacctgaatgaacccctccatatattggttgaggcagagctacctgttgaaatcattgatgcgcgcctgatgcaagcccgcgagatccttgaagatctgctaaagcctgtggatgaatcccaggactacttcaagaagcagcagctacgggagctcgcaatgcttaatggcacccttcgtgaggaagggatgcagagatccggttcagcgtcccctttccacaacagccttgggatgaagagagccaagacaagggggtaatgaacaaagctgcaagcatcatgaaggcagaaccaaatgaatctattctgagaccgatcctgtgtgcacatgggattgccttgcttggctattgtactggcccagtacggcctcgagccaccagcatcggggcggccgtaccctgataaaacatatatatctggagttgtgtttgctgctaccgggggagttcggttatgcgccataggttgttcgctatatattgggttgtgcgggattttgtagcaatgtggtttgtgtgatgctcatttggagcgtttgagagctctcggctcgtatttctcatcaagatagtatttaagggcgctgtttgggattttgaagcaatgctctaactgtctctgtacacgacaaacatggaggcttgctatatttcatgaatctctcgtttgctgctatcaatcactgatgcatactagtaaagtgatggcgtcttcagttgcatctgcagtttggattctgctttgctgatgcaggataatttaagttgataactcgaatgttgtgctgataccggctagttcagctaccaactacttgttctaacgataccctgtcctaaattaaaatttattttaggatgttaatggattttg

SEQ ID NO: 128966 - DNA, 2324 bp, Zea Mays
cccttccacttcgcctcctcttctctctctcccccgtctcctgtctccacctgttccatcgcattctcctcccaccaccaccacaccacgcctcgcttatccccccccgagacccgacccctgctcgacgacgtgctggcaaaacctcctcctagtcctctcgcagaaggaggctgtgttctttccttcatcggtgcggcaacagcgaaagcttctcggtcgatctctcccaccgctgctccgccgtttgggtggttccgcgccttggccgcgcgggttggatccgagctccgtgcagcagctccgccgcgatacgtatcgcataggattccactggattcagctgctgagcagggtactggaaggtggatttgatactagctctgaacagccagtagaatttctcaaatactgtccaggatcatggcttctctctgtgatttctgtgggaaacaaaggtcaatgatctactgcagatcagatgcggcatcattgtgcttatcatgcgaccgtaatgttcattcagctaatgcactgtctcgacgtcatacaaggacccttctttgtgatcgttgtggttcacagcctgcatcagtccgatgtcttgaggacaacgcatcactttgccaaaactgtgactggaatgggcatgatgcagaatcaggggcttctggacataaaaggcaagccataaactgctactcagggtgcccatcatctgcagagctttcgagaatctggtcatttattactgatatcccgactgtagcagctgagcccgactatgaggatggactaagcatgatgacaattgatggcagtgatgttactaatcgtcacgatacttcagatgataaaagattgttggaaatagctaacacaacactcatgagcgatccaccttcagccgacaagcttaaatctccgacaggctcttcttctggagatgggtttgatgttatgactctagccacagatcagcctgctggaccagtttcagcaacgcctaaggtacctaatgccagagatgatgataagttcaatgatggcatgtacgaagacttgtgtgtagatgatgctgaccttacattcgaggattatgaagagctatttggtacctctcacattcgaacagaggaactctttgatgacgctggaattgacggttacttcgaattgaaagagacaccacctttttatttcaacgagcagcccaaagctatgcagatagaatgtggcaacgtggtatcagctgattgtgcgatgtcaaacccaggggcaagggctgattccagcctttgtattcccgtcaggcaggtcagatctagtatatcccactccttatctggtctgactggtgagagcagcgctggagatcaccacgactgtggggtgtcaccgatgctcctcatgggtgagccaccctggcattctcctggtggtccagaaggctcagtcgctggaggcagcagagatagcgctctcacacggtacaaggagaagaagaagaggagaaagtttgacaagaagatcagatatgcttctcgcaaggctagggcggacgtgaggaagcgggtcaagggacggttcataaaggccggtgaagcgtacgactatgatccgctaagccagactagaagctactgagccttgggagtgtgactgttgttgtcgtccagtgtcagcctcgcaatctccagccgctcgtcggttgcaggctgcgctacaggcaagatcactggagagcacaacgatcgcattgcatcagagcctgcaactgaaaaacgttaagaagagataccaagtgttaggatgaatgaaaaaaaaatacaaaaaagaaagatgcagacttgccggactcatatccattattcagtttctctgcggatgagtggcttggatcgcactgtgccatctgcgcgtcgaacagatgcagtgatggatgggcgctcgtcgtcctccagctgtaccgctgtgcgctaggacctgcgtcggctatatacggctgttcggcagtgagctgccaggttgtacagtctgggtaacagcctaacagggtatgcttatacctctcggttttcgttctgtaatacgtacgtattatttgcgcttgccaggagactgttcttcggccgtgtgtatgtttgtagatggttgcaacattggtaaaaaaaaaagtagccgtcgtgaatgtaaatttgtattcttgttaggtcgcatatagcgttggcgatgagcaggagaatcacacgtatctggacactgaacgtctgaacccttgtaactatttttgcgccagaataaccttcttgtgccttgtcgtt

SEQ ID NO: 128967 - DNA, 2828 bp, Zea Mays
tctctcccccgtctcctgtctccacctgttccatcgcattctcctcccaccaccaccacaccacgcctcgcttatccccccccgagacccgacccctgctcgacgacgtgctggcaaaacctcctcctagtcctctcgcagaaggaggctgtgttctttccttcatcggtgcggcaacagcgaaagcttctcggtcgatctctcccaccgctgctccgccgtttgggtggttccgcgccttggccgcgcgggttggatccgagctccgtgcagcagctccgccgcgatacgtatcgcataggattccactggattcagctgctgagcagggtactggaaggtggatttgatactagctctgaacagccagtagaatttctcaaatactgtccaggatcatggcttctctctgtgatttctgtgggaaacaaaggtcaatgatctactgcagatcagatgcggcatcattgtgcttatcatgcgaccgtaatgttcattcagctaatgcactgtctcgacgtcatacaaggacccttctttgtgatcgttgtggttcacagcctgcatcagtccgatgtcttgaggacaacgcatcactttgccaaaactgtgactggaatgggcatgatgcagaatcaggggcttctggacataaaaggcaagccataaactgctactcagggtgcccatcatctgcagagctttcgagaatctggtcatttattactgatatcccgactgtagcagctgagcccgactatgaggatggactaagcatgatgacaattgatggcagtgatgttactaatcgtcacgatacttcagatgataaaagattgttggaaatagctaacacaacactcatgagcgatccaccttcagccgacaagcttaaatctccgacaggctcttcttctggagatgggtttgatgttatgactctagccacagatcagcctgctggaccagtttcagcaacgcctaaggtgctacttggctttcatattttcctccaagaatgtttctcaacattgtgctctgtttttgcatgtcaaaagacttgttgcttatggcatgcaagttacttaaacatataaataaagaatgttctcatatgaatttgcataataatagtcatgtagctttgttactgtttaagtcttgcagcagcacaattcatttactgtttatgtccaggaaatattaaacagaaattataccttagtgatgatccatttgtctctatttaacactgtctgactagttttcccctgctgggctctcagtgctctagtagcttcactctacaatgaatattccatttttgtaacaagttattagatatatttgcgtcagtgaacagtcgcaagttgcatcgttcagaatttcagatcttgtttatcatcagtcctttcttaagaaaaatacgaacggttattgttgtactctccttttttgagagaaatacaatcggttatcgttgtattcttatctgatgctggttacatctctcaggtacctaatgccagagatgatgataagttcaatgatggcatgtacgaagacttgtgtgtagatgatgctgaccttacattcgaggattatgaagagctatttggtacctctcacattcgaacagaggaactctttgatgacgctggaattgacggttacttcgaattgaaagagacaccacctttttatttcaacgagcagcccaaagctatgcagatagaatgtggcaacgtggtatcagctgattgtgcgatgtcaaacccaggggcaagggctgattccagcctttgtattcccgtcaggcaggtcagatctagtatatcccactccttatctggtctgactggtgagagcagcgctggagatcaccacgactgtggggtgtcaccgatgctcctcatgggtgagccaccctggcattctcctggtggtccagaaggctcagtcgctggaggcagcagagatagcgctctcacacggtacaaggagaagaagaagaggagaaagtttgacaagaagatcagatatgcttctcgcaaggctagggcggacgtgaggaagcgggtcaagggacggttcataaaggccggtgaagcgtacgactatgatccgctaagccagactagaagctactgagccttgggagtgtgactgttgttgtcgtccagtgtcagcctcgcaatctccagccgctcgtcggttgcaggctgcgctacaggcaagatcactggagagcacaacgatcgcattgcatcagagcctgcaactgaaaaacgttaagaagagataccaagtgttaggatgaatgaaaaaaaaatacaaaaaagaaagatgcagacttgccggactcatatccattattcagtttctctgcggatgagtggcttggatcgcactgtgccatctgcgcgtcgaacagatgcagtgatggatgggcgctcgtcgtcctccagctgtaccgctgtgcgctaggacctgcgtcggctatatacggctgttcggcagtgagctgccaggttgtacagtctgggtaacagcctaacagggtatgcttatacctctcggttttcgttctgtaatacgtacgtattatttgcgcttgccaggagactgttcttcggccgtgtgtatgtttgtagatggttgcaacattggtaaaaaaaaaagtagccgtcgtgaatgtaaatttgtattcttgttaggtcgcatatagcgttggcgatgagcaggagaatcacacgtatctggacactgaacgtctgaacccttgtaactatttttgcgccagaataaccttcttgtgccttgtcgtt

SEQ ID NO: 128968 - DNA, 1300 bp, Zea Mays
ttgcccactctccgcccgttgtcgccacaactcgcccgcggtacaacggcccggctaaaacgaggcagggcgcgcgcttaaaatagcccggcacggcgcgtacccaccaccacccgcccgccccgcgccgcgcaggcaccacccgctctcctgcggcctcctcctgtttgtgttttcaccgtggtgccgccgccgctgtctcctctctccagctgcggcgaccgcgaccgcgaccgacaggcggcagggggcaaaggctagcgagatgacgaagcttccgtggtggcgcgccgacgcgtcggagctggtggccgtgacggcgatgggagtgtgggaggccgtgctcgccgggggcggcaggagattcatcaagcggaaggacagcgacgccggcgagaccggtcgggcactggaggagttgcgaagctcgttgtacaatgaaatgcatagcgcagaaggtgctaagcgccagcagcagcgattctgtggaccaagtgttgcattgacattcaattttgctgttgctgttgggattatcatggcaaacaaaatggtgatggggactgttggatttaaatttccaattgcactctcattaattcattatgcagttgcatttgttctaatggccacccttaagacattatccttgttaccagttgccccgccatcgaaatccactcctttctcatctatatttgctttgggtgctgtaatgtccctgtccactgggctagccaacgtgagtttgaaacataacaggtttctatcaaatggctaagattgctgtaaccccaacaattgtcgtagcagaattcatgcttttccagaagaaagtttcctctaaaaaggctgtcacactggcagttgtgtcatttggagtcgctgtagcgactgttaccgatctggagttcaacttttttggtgcttgtgttgcattagcatggattgttcctagtgccgtgaacaaaatcctttggtcaagtttgcaacagagtggaaactggaccgcccttgcgtatgttctgtttttcctttctttgattcagattattcataactttattcccttattaactcagattatccattattaaaccaggctgatgtggaagacaactccgattacgatatttttcttgttgacattgatgcctttgctggacccccctggcctcttgttgttcaattggaacttcagaaacagctgcgctgttatcatctctgcattgttcggtttccttcttcagtggtctggtgctttggcactcgggtgagatacatcattgctttgccattt

SEQ ID NO: 128969 - DNA, 1756 bp, Zea Mays
ttgcccactctccgcccgttgtcgccacaactcgcccgcggtacaacggcccggctaaaacgaggcagggcgcgcgcttaaaatagcccggcacggcgcgtacccaccaccacccgcccgccccgcgccgcgcaggcaccacccgctctcctgcggcctcctcctgtttgtgttttcaccgtggtgccgccgccgctgtctcctctctccagctgcggcgaccgcgaccgcgaccgacaggcggcagggggcaaaggctagcgagatgacgaagcttccgtggtggcgcgccgacgcgtcggagctggtggccgtgacggcgatgggagtgtgggaggccgtgctcgccgggggcggcaggagattcatcaagcggaaggacagcgacgccggcgagaccggtcgggcactggaggagttgcgaagctcgttgtacaatgaaatgcatagcgcagaaggtgctaagcgccagcagcagcgattctgtggaccaagtgttgcattgacattcaattttgctgttgctgttgggattatcatggcaaacaaaatggtgatggggactgttggatttaaatttccaattgcactctcattaattcattatgcagttgcatttgttctaatggccacccttaagacattatccttgttaccagttgccccgccatcgaaatccactcctttctcatctatatttgctttgggtgctgtaatgtccctgtccactgggctagccaacgtgagtttgaaacataacaggtttctatcaaatggctaagattgctgtaaccccaacaattgtcgtagcagaattcatgcttttccagaagaaagtttcctctaaaaaggctgtcacactggcagttgtgtcatttggagtcgctgtagcgactgttaccgatctggagttcaacttttttggtgcttgtgttgcattagcatggattgttcctagtgccgtgaacaaaatcctttggtcaagtttgcaacagagtggaaactggaccgcccttgcgctgatgtggaagacaactccgattacgatatttttcttgttgacattgatgcctttgctggacccccctggcctcttgttgttcaattggaacttcagaaacagctgcgctgttatcatctctgcattgttcggtttccttcttcagtggtctggtgctttggcactcggcgcgacgtcagctttgtctcatgttgtgctgggccaattcaaaacgatcgtcatcatgctctccggctacctgatcttcggctccgaccctgggatcaccagcgtctgcggtgccgtgctcgcactcggcggcatgtccttctacacctacctgggtctgaagaaagaccccgcgaccagcggcaaaaaagcaccatcgagacagaactccttcatggcgagacctaaggtcgctgctgacgacagtgacgacgcggattcagagcaagatgatactgtataggttggcgaaactgtcatctaggccacttaatgcaaagatcaatctgagctcagttaattctcggttggttgtaatctgtcggtgaccgagtccatttttgtacatagatgctacctttaagccttacggattgtctattgcgtagtgacaagtagttcgagaggtattgcccctaatttatagcctgtgagattcgattagcgatgtacgcaggaacggggaacccaagtcatctgtttttttatgtcgatcatcagttatttacaatgaaaatcatgcaactc

SEQ ID NO: 128970 - DNA, 1769 bp, Zea Mays
ttgcccactctccgcccgttgtcgccacaactcgcccgcggtacaacggcccggctaaaacgaggcagggcgcgcgcttaaaatagcccggcacggcgcgtacccaccaccacccgcccgccccgcgccgcgcaggcaccacccgctctcctgcggcctcctcctgtttgtgttttcaccgtggtgccgccgccgctgtctcctctctccagctgcggcgaccgcgaccgcgaccgacaggcggcagggggcaaaggctagcgagatgacgaagcttccgtggtggcgcgccgacgcgtcggagctggtggccgtgacggcgatgggagtgtgggaggccgtgctcgccgggggcggcaggagattcatcaagcggaaggacagcgacgccggcgagaccggtcgggcactggaggagttgcgaagctcgttgtacaatgaaatgcatagcgcagaaggtgctaagcgccagcagcagcgattctgtggaccaagtgttgcattgacattcaattttgctgttgctgttgggattatcatggcaaacaaaatggtgatggggactgttggatttaaatttccaattgcactctcattaattcattatgcagttgcatttgttctaatggccacccttaagacattatccttgttaccagttgccccgccatcgaaatccactcctttctcatctatatttgctttgggtgctgtaatgtccctgtccactgggctagccaacgtgagtttgaaacataacagtgtaggtttctatcaaatggctaagattgctgtaaccccaacaattgtcgtagcagaattcatgcttttccagaagaaagtttcctctaaaaaggctgtcacactggcagttgtgtcatttggagtcgctgtagcgactgttaccgatctggagttcaacttttttggtgcttgtgttgcattagcatggattgttcctagtgccgtgaacaaaatcctttggtcaagtttgcaacagagtggaaactggaccgcccttgcgctgatgtggaagacaactccgattacgatatttttcttgttgacattgatgcctttgctggacccccctggcctcttgttgttcaattggaacttcagaaacagctgcgctgttatcatctctgcattgttcggtttccttcttcagtggtctggtgctttggcactcggcgcgacgtcagctttgtctcatgttgtgctgggccaattcaaaacgatcgtcatcatgctctccggctacctgatcttcggctccgaccctgggatcaccagcgtctgcggtgccgtgctcgcactcggcggcatgtccttctacacctacctgggtctgaagaaagaccccgcgaccagcggcaaaaaagcaccatcgagacagaactccttcatggcgagacctaaggtcgctgctgacgacagtgacgacgcggattcagagcaagatgatactgtataggttggcgaaactgtcatctaggccacttaatgcaaagatcaatctgagctcagttaattctcggttggttgtaatctgtcggtgaccgagtccatttttgtacatagatgctacctttaagccttacggattgtctattgcgtagtgacaagtagttcgagaggtattgcccctaatttatagcctgtgagattcgattagcgatgtacgcaggaacggggaacccaagtcatctgtttttttatgtcgatcatcagttatttacaatgaaaatcatgcaactctacaaccg

SEQ ID NO: 128971 - DNA, 309 bp, Zea Mays
atggcgagcgtcaggatagagccaacggagtgcgccagaggcggcgacctggcgtgtagcctgctcgccgggtggccaccatgggatgcagctggtgcgcgttgtgtttttgtcttcttcatccgtcgaggtaccgaaccaaacaggagatgggagccgaggcggagctcaacaggatcacgggcccgtggagccccgaggagggcgacgtgctacagtggctcgtggggcgacgatggaatgggggatgctgagtgcggatgggggcacgacgcgtggatggggatggcaggtcacagatgtgtataa

SEQ ID NO: 128972 - DNA, 887 bp, Zea Mays
gaaaactgatatcatttcatactatggatataatgattttctagttgaagcattaattgagatgttcccagctgttgagcttgttgagttactggaagcctttgagaaaaggccgcccgagtgcttgcggacgaatacactaaagacccggaggagggatcttgctgctgctcttataccaagaggatttaatttggacccgataggaaaatggtcaaaggtaggattagttgtctatgactccaccatttcagctggtgctactactgaatatatggctggtcattacatgaaacaaggtgcaagttcgtttttaccagtgatggcacttgctccacaggagaaggaacgaattgttgatatggcggctgctccaggtggtaagactacttacattggcgctcttatgaagaataccggaatcatctatgcaaatgagttcaatgagaaaaggttgcatggacttttgggaaatatccatcgcatgggtgtgacaaataccatagtttgtaactatgatggtaaagagctacccaaagttcttgggatgaattcggttgacagagtattgcttgatgctccctgcacaggaactgggaccatttggaaggatctacaaattaaaacatcaaaggacattgaagacatcaggagctgcgcctttgtccaaaagcaattgctgctagctgctattgatttggttgatgccaactccaaaactggtggttacattgtttactcaacttgttcgataatgattccagagaacgaggcagtaattgactatgcacttaaaaagagaaatgtaaagcttgtgccttgcgggttggattttgggcgtccaggattcatccggtaccgggagcatcggtttcatacttctttag

SEQ ID NO: 128973 - DNA, 769 bp, Zea Mays
gcaatacaattccggtgacgtctgagccgtctaaagcatctgaagaagcagctaaggctgatggtgaagatgagaaagctatttctaatgaacaagagactggtgttcctgataaagatgagaaaactgttgagataaaaaatcataaaaatgtgactaataaaagaacaagtgtcaccaaagagactggaagccataaacgtgaatccaataagccaggaaagcatctcaagataaataagaataatgctacaaaagaaattgatggccctgagagcagtgaaacaaatagagatgggaaagaagagcatcgcgtacaaaccaagaaaatgagtcacaagaggaagtttgcttctgatagatccaaaaaatctggccccgagagcttctcgggtgtcaaagagaagagacaggtcagtgacaagaagcggaaaaagaaatggcaattcaagctgaggcgtgactgggaagctgaaaagaaaggtgacaagaggaggaaggtatgaaggagtattcagatgtccacaggccccaatgaaatttgatgggtgtgtaagggcaaccgagaattttgagcaagcacgagtttgcagccaccgaaaattttgatgtatgaaatagcgattgtagtttattattttttattcagtgtacgtctcaagttttatctttaatgagtgacatatctggcagggaaactgaagcatattattatcttgctgaatgctatgtgaatcctgctgtacgtgttataaaaaaaaatcatatc

SEQ ID NO: 128974 - DNA, 1370 bp, Zea Mays
ggcacctcccgtttcctgccctcttcttgttcttcttcttttttccctaccctccgccgttgctctgcaaggcacgtcctgcacgcgccagagctaggcgataaactggaaaggagcgcgcagcgcaggcttcgggctcctgtctccgccgcggcgtcctctcgctttttttttttttgcttcttgggaagcacaaaggctcaggtctttcaggacttgcaggctctgcgcagcgcgatctgattgtgaatgaaacctgcaaaggaatagtccatcacaatgctaaggttgcttcccgactgaccacattgcgcttgttttagcctctggttatctcgtctggaaaaaaaaacccagacatctgaccgggtcagacgatacaacccatatacgtacgtcgagtcctcagagttcaattctacctggaccatcgcacccatcttggcccagagtacttccgcgccgcgctacgaacgaggccatccgccgccacacgccgtcggccatgccgcagaggtcggaggcgggcactgctggggagggcgacgaggagcagcggctgcgggctgctctgcgtcacctgcaggcggaggcgggggtgctggagcgcctggtatacaagcaccggaaccagcaccgcggcgccgcctatttccaatacctcctcaaggtgaggagggacctgaagcttctgctcggcgccggcctcgctgaggttctcaacgccgtgttcccagttctcgcatgccgcaagccggccaacacgatcctcgtccccaacaagcagtctaagaagaaacctgttgcaaaccacagccatcaccagaggcttttgggtgtagcccgcttgttatcccagatgtctgaacctgttatgaaggcagcaattcagataacatttttacttgctagatcattcttcgttgatctttgcacggctgtgctttctttgcttgcacgaatgttacttgatgttgtgtctatatacaataaggtcactgatcttactgaaaggaagcaggctgttaagattagcatcagtggagtgcaggctttcagagagtactacccctctatgaatgatgcatgtacagttctggagtgtgtatggataaaagataaattcgttttgcatgaaaaggttaaagatatctctcaggaaacccaagttgagaatcagaagtgctgcggtcctgaatctacagtccagtatgaaacaattgcactgattagtgaaggttaaaatgctttatcttctatttgtcacaataaatgcatgatgatctattgatcttgatttttttgttgctttgtcagaattagctgacatgctcatgaatcatgagaatccttggtgctttgttgctgat

SEQ ID NO: 128975 - DNA, 1354 bp, Zea Mays
atgagagccgatcgaggtcgcaggaaaaagaaagagaaggccgggttgtgggttgggccaggcaaccaaacacatcctaagagtgcttcccctttggagattccccagacaaacaattcttgtgcttcagcactgatagtgttaccaggaacaaccaacctgagcaaattgagtcataaacctgagccgaaggagcagaaagcggtggagcgtgagagtatgaatagaaaccccacttcgtttcagacatgtgaagggaccagtcaagcaaaggttagtgcaagtgctaagttcactgacccatccgaggttggtgacaggggtaacagtggaagatgcaggcctagcacaagcagtgacatcagcgacgagagctcatgcagtagcatgagcagcacgaagcctcacaaggcgaacgattcgcggtgggaggcgatccagacggccagagctagagacgggatccttggaccgagtcatttcaggctgctgaagagactaggctccggcgatattggcagcgtgtatctctcggaactgagtgggaccgcgagctatttcgcgatgaaggttatggacaaggcatcacttgcaggtcggaaaaagctgcttcgggctcaaacagagaaggagattttgcaatgcctggaccatcctttcctccctacactttacactcacttggagaccgacaagttctcctgcctagtcatggagttctgccccggtggagaccttcacacccttcgacagaggcagcctggcaaacatttttcggagcaagccgtcaaattctacatagcggaagtcctcctggcactggagtacttgcacacgctcggtatcatataccgcgatctcaagcctgaaaatgtccttgtccgggaggacgggcacatcatgctctcggacttcgacctctctcttcgttgtgctgtcagtccaacactgatcaggtcctcaaaccctgacgcagaactgcagaagcgctcaggaagagcagccaaggctactgtgttgagccagcctgtgttgagccgtcctgcatcactcaaccgtcgtgtgcagccccaaccacctgcttcggcccacgcctgttctcctccaagtccaagaccaagagagaccggtaaccaaaaccagaagttgccaccccgatcagcccttggcctgagctcatagcggagcccagcgatgcacggtcgatgtcgtttgtgtgctatattgtttttccgttggtagatttttttgaggggtacttttacactttcttaaagttcacatctgtaattcagcaagtcctgattgtactgatctcctgcaatgcctttgcaaaacattgtcattttttttg

SEQ ID NO: 128976 - DNA, 1700 bp, Zea Mays
cggtgtgtgatgcagaggcgatgccgagcgggtggagctctagccacgcccacgctcccgcctccccggcaaacacactcacgcccgccgaggccacatcctagcacgttgtagacgccgccaccgccaccgcctgacgccatgcaggagttccagtccatccctggcctggccgggcggctgttcggcggggccgcggcacccggcgacctccggcgcgcgcaggcggcgcagcatggccccggcggggcgcgatgcggcggtgcctcgcccgcggcgcccgaggcggtgaagtgcccgcggtgcgagtctaccaacaccaagttctgctactacaacaactacaacctgtcgcagccgcgccacttctgcaagagctgccgccggtactggaccaagggcggcgtcctgcgcaacgtccccgtgggcggcggctgccgcaaggcgaagcgcgcctcgccgtcggcgtcggcgtcggcgtcctcgcccgcctcgtcgtcggcgccgtccacgcccgcgtcggccgacgcggccaagaacccgcgccgcgcctcggcctcgccccgctccaacagcggcagcgcgagccccacggccgccgccgcgacgaccccgaccccgaccgatccgagcacctccgccacgccgtcgtcgaacggcgtcgccttcacgggcagccaccactcgtcgaaccccttctccacgatcgacgtggcggccgcgccaccggcgccgatattcgccgaccaggcggcggcgctggcgtccctcttcgcgcctccccctccgccgccgctcccggtgttcagcttcgcggcggcgcagccgaaggaggaggaagcgcccaccaattcggagctgcagcaacacctcgccgcacaggcggcgccgtcgtcgtcggtctccgaggacatcatggcgccgttcgcatccctggacgccgctgggatattcgagctcggcgacgccgcgtcagccgcggcgtactggagcgccgggagctgctgggcggacgtccaggacccgagcttgtacctaccctagcgtacgtgcttgtttagttacctatcgcgatcgctagattaaagccgcggttagatcttaacgacgggcgacggccacgagctccgtctctctagctattactccatgtcctccctgcctctctctctctctcttgtttattggtgatttggcttcacaggctgcgtgtctagaaagctaacatctgtgtttcgtgtctgcatgcaccctgcgagtgtggcggatcattgcgctgctgcgatagaattaatcgcattattattgcttgtttactcttcgtaatagtaacttgtatgaatacatgcatgtttggggggaagcaacgtaaccacgagtgtccgtgtgttatgttgtgatgcacggtcaaagccgatggtcaggtctatcgccaacgccaggggatgatggaacaatggtgcgtgtcattttggttagcggttggtttgttaatttcggctggtggcccgcccgtacatgcctctcgctctccggggggtttgtgctgatggcgacgccagttgctagctggctcttacgtacattgcttctctgtacgcctgttcgttggcccagcatggcctcctcctgcctcctgacataacacacttccgtgcctgctcacgcgagcttggtctgccccccccccccacccccct

SEQ ID NO: 128977 - DNA, 315 bp, Zea Mays
gaacttgatgccttcttgtatgatgatctttgcccaagtaccggtaagtgtaatgacttggataagtatatgatagaaccacttatgaagcaaagtgagtttgatattttgtcatggtggaagaacaaaaaagaagaatatcccatactttctcagatggctcgtgatgttatgtctatacaagtgtcaactgttggttcattgtctgcttttagtgctggtgggcgggtcattgatccataccgtagtcaccttgatcctgagatggtgggagcgttaatttgcaccaaagattagatagctgcaacaaacaaa

SEQ ID NO: 128978 - DNA, 169 bp, Zea Mays
gctaggtgaaaaacaagaagatggaaaatacaagcacactgtggatctcctgaaaacaacatttgagttgagagcgaattctgtacagcgggagctagagctccaaaaattatgggacgataatcaggttctgaaaagggtttctgaaaggaacactggggtgagttga

SEQ ID NO: 128979 - DNA, 2430 bp, Zea Mays
cccgactcttccccagtgattctcttctacgcttactaggctatacttgacttcgtgtgtttccattccacagaggaagggatggccgggagcagcgtccgcggcggcagcaactgcccaccgctgttcgtgacggagaaaccaacgcggatggcgaggtacgcttaccggctgttcgcgagcacggtcctcgcgggggttcttctggtatggctgtacagagcaacgcacgtgccaccgatgagcagcggcgcccggtggtgggcgtggcttgggctctccgcggcggagctctggttcggcttctactgggtgctgacgctgtccgtgcggtggagccccgtcttccgccgcgccttcccggaccagctcttgcgaaggtacaaggaagagcagcttcctggggtggacatatttgtgtgtacagcagaccccactgttgagccgccaatgcttgtcatctccactgtcctatctgttatggcttatgactacccgaaggagaagttgaacatatatttgtctgatgatgctggttccatcataacattgtatgctctatatgaagcatcagagtttgcaaagcactggcttccattttgcaataagtaccaagtggagcccaggtcaccagctgcctactttggtacagaagctagccctccagatgcatgtgaccgtaaagagtggttttctttgaaggagatgcacaaagatttggcagctcgagtgaattcagttgttaattcagggaagatccctgaagtttcaaaatgcaagcttatgggcttctccaggtggagcgagaatgcaagttttagagatcacccttcaatagttcagattttaattgatggaaacaaaaggaaagcaactgatgttgatggaaaagtgttgcccacactggtttatatggctcgtgagaagagacctcaagaacatcatcacttcaaagctggatcactgaatgctttgataagggtatcatcagtgataagcaacagcccagtcattatgaatgtggactgtgatatgtactccaacaattcagggtctatcagagatgcattgtgcttcttccaagacgaacagctaggtcaagatattgcttttgttcagtatcctcagaactttgaaaatgtggtgcaaaatgacatctatggcaatcccatcaacaccgtcaatgagttggaccatccttgcttggatggatggggtggaatgtgttactatggcacaggatgcttccatcggagagaggctctatgtgggcgaatatacagtccagactacaaggaagattggactagggtggcgaggaaaactgaagatgtcattgacttggaaggaatggctgagtcacttgtgacttgcacatatgagcacaacaccctttggggagtcgagaagggagttatatatggttgcccactggaggatgtcattacaggattgcagatccagtgccgtgggtggagatcagtttaccacaacccgccaagaaaggggtttttaggcatggcccctacctcactaggacagattctggttcagcacaagagatggacagaagggttcctccagatctccctctcaaagtacagcccgtttctgctaggtcacaggaagatcagcctgggccttcaaatgggttactccgtatgtgggttttgggctgctaacagcttccccaccctttactatgtcactatcccttcactttgcttcctcaatggcatctcattgttccctgagataaccagtccctggtttgtaccgtttgcatacgttgctgtggctgcatactcctgcagcttggtggagtccctgcaatgtggcgacactgctgtcgagtggtggaacgcgcaaaggatgtggcttttcagaagaatcacctcatacctcttggcagccatcgacacaatccgcagaatgcttggcgtcaccgagtcggggttcaccctgacggcgaaggtgaccgatccgcgggccctagagaggtacaagaaggggatgatggagtttgggtccttctccgtgatgtttgcgatcattacaaccgttgcactgcttaacctggcgtgcatgatgctcggggtggcaaaggttctgttgcgtaaaggagcggtgagtctgggagctatgtttgtgcaggccgttctatgtgcgctgatagtagcgatcaattttccagtgtatgaagcaatgttcgtccgcaaggacagtggcagattaccagcttctgtcagtgtcgtttcgctctgcattgtattaccattctgtatacttccaaccaagttgtagatgtggagctggtgaaagatgatatatatatttgaaacccgatggtgaaagttataagaactgtactgatataatatatttccaagagaattaaaaaaatatataacatgttcatttacagatctg

SEQ ID NO: 128980 - DNA, 1637 bp, Zea Mays
cgggtttccagtgaaccgcccaaaggttatttcggtcaagtcgcttctctcagtggaaacccaaaaaccctcttcgaagttcgatcccagggccgctccggcggcggcggcgcgttgagatggctgacactgacagcgcggagaccgagaaagagaagatggtagcggatgatgggggcaagcccgcagagctctcgaagagcgcgaggaagaagctgcagaagcaggagcggcaggcggaacgtaaagcggcccgaaaagcggcggagaaggagcgacggcgcgccgacatagagcggcggaggcgtgagtgggaggacgctcttgccgccgcgccgtcggatgaggcccgggccgagatggtggcggcgcggcgggagacgcggcgcgagcgggtgggccggcgggcggaggagcgcggggcgcgagctgaccggctcaggcgcgcggctgagggcgcgggccagaaggtggtgctggacctcgagtttgcggaccttatgaggcccaacgagattcatagcctcacgcagcagattatgtactgctatgcagtgaatgggagatctgcaaacccagctcacctgtggctgacaggttgcagtggtgaaatggcgacccatcttcagagaattcctgggtatgataagtggatcattgaaagggcggccaggccttatattgaagcatttgaagaccgtaaagaaaacctcgtgtatcttacagcagatgctgagacagtgcttgatgatctagacatgtcgaaaatatacatcatcggcggcctggtggatcgaaacagatggaaaggcataacactgaagaagtcagctgagcagggaattcaatctgcaaagcttcctattggaaactacctaaaaatgtcaagttctcaggttcttacagttaaccaagtgtttgagataatgttgaagtttgtggaaacaagggactggaagacggcattcttccatgtgattccacaaaggaagcgaggagaagctgagaccagagatgacgtggaaaaaggaggcctggatgacaacgatggcgccgccgaaggggctgcagatggagaccattccgaggaagacctgaacaagggcttcggtgaggaggaggacgatgatggggacgaagagctggaagaggaagaagcagatgtctccaacaagaggcagtgtgttagagttgaaaacggggaagctggggatgccaccgtagcagaggtggaaccaaacaacggcggcggcggcgggggcggggaccgctgaacagtgaacagcaccaccacgtttgtcgctaactcgctattttcacaacagcatcggtattggatttttgagcgttgtctctggcatttttcatgtattttagggctagtttggcaaattcatttttccaagtgattccgattttcctaaggtaaaatgaactaatttccttggaaaaatgaaaaaaaaaatcactagtaaaaatgggattgccaaactgtcctttattagacaatttctgccgtactctactcggaactgaataactgaccagcttagttaaagttaaagcaggccaatgaatcgagcaatggtgacaggaactgatgaacagcgaagctcacgtttgtttctctttcgtat

SEQ ID NO: 128981 - DNA, 831 bp, Zea Mays
cttgtacgcgaacgggtgcgggtgctccaagccgccgctgccctgcggtgtgtgcgacgcgctcccgccaccgccgccactgccactgccgtcgccgctcccgccgttgccgggcgcgtacgcggcgcctccatagtatgcagccatggcgtgctcaccgccgtacgtgggctcgtacgcgtaaggcaggtagtggctactaccctgtgggtgtggcatgaggaacccgccgtggtgaggaggcccggccggcgggggcacggccgttcccccgtacatggcggcgtgcatctgcatgtcgtggtggtggtggtggtgcggtagcatggcggctccggagactggcccgcgggacttgagcatcgccgctggcgacatggagtgcgggtggtggtcgccgccgcgcgatggggcggcccccgggacgagcccgacgccgcgcgcgtcgccctcgaactcgcggtagcggtggaggtaggcgccgagcggctcgacgtagtcgtcgaagccgaggcggctcatggcccacagcacgtcctcggcggtgatggtcttgcgctgctcccgctggcaccgctcgttggcctcccccgtgatgaagctgatgtactccgacacgcactcctggatcgtctccttggcgtcgtccgagatcttggcgtgcgccggcagcacgcgccgcatgatgcggatcacgttcgcgatcggcatcagccggtcctgctcgcggatcgccggcgccgcatgctgctgagcagcgccgccattgttggcgccgcccgccgccgagccattctccgcgccggcggcagggaggaagctgctggagtc

SEQ ID NO: 128982 - DNA, 1576 bp, Zea Mays
ccttgttgttgcggtcctatctaggagtaagtctctagcgtgtgaggctgtgtccctcggtcaccggttggtgagccatgttcctaagtagtcgtatatatgttgttggcttgggcagtaggaaggacaggtatgaactttactctgaatcaatacaatctgtccctgtttcctctcctgttctcgtctcctacctctgctccttctctactatctcctcattccattagcagtagctaacaattggtatcagagctccaccgatcctcggatcctcgttccatggcgtcttcttcatccatcggcatcaacttcatccaggtgctggaacatcagacgcgcgccctcttctcggagttggacaagcgtcttcaggctcgcgacgacaaatgggagttccgtgttgccgtcctggagtcccgcgcggcggattcggagcgccaactcgacaacgtctcctccgacctgcgaaccgacgtcgcggcccagatctcagtggtggaggcgctcgagtccattgtcgttgattcgacacagcacatggattcggtttcgtccagcattcgtgcagatccggaggtgcgccaagcggcggtggacgcgaccgcggaggatcggcgccaccacttcgaagccgccaccagctcacacatcacggaactcgaatcgaccacccaagtgttcgagctctggcatccccgcatcgactccgcgatcaaccatctccacccctccatggtcaaggttcgagcagcgatcgacaccagggacctacagtggtcgcctgatgcgcacggcggcggctctggcggccttctcggagagccgggtggtgaaccaactgaaatcagcggcgctgctcatgccggtggcctacctcgcccacatcaacacccccatcggcatcctgctatccaaagcgttcgtcggcgaggtgctcttggacttcctcgggatggccgagatcgacccgctagcaccactggtgacgaacctgatcagggcattctgccgctgcccgagcatgagctgctacgacctcgccggctccatcaccggcaagaactactgcctcaacagctccgtcgtcgacttcttcctcaagtacgagcccgagccgacctccacggtccactttgctcaaaccgtgcgcgacgtgctactggagcgcaacattgccagctacggccagggcgagccgccggtgtaccggatatctggcatcccaccgagctcagcttccccttcctggcgtcctatctcctgcagttggtgatccgtgaggaggagggtgaggttcccagcaccttgcccacccagtgtttgatgaattggttcagctgcagctgtgcctcagtgttgtatgacgtcaccaaactcattaagcccctaccaactctggcgatgggtgtttcaagcatacctccaccagctccattgggtattcagctagtgctcgatgctatgcctcgtgggccactacttggagatgtgcatgacaaagggccttggccaccacctattcagttcgggatgcatgccactcaacgcaggccaattccctggccatccttct

SEQ ID NO: 128983 - DNA, 727 bp, Zea Mays
caggttcgcgtggctaatggagaattgttacattgccaacacaagatactgcagataccgtggcaaattcagactttcaatcacatacaggacacgatgatcccttcaaatttggactgttttgggtggtgcacatcggatgcattttacaaagctgctgaaccatgtgggattgaggaggaccttcaacgtcggcgtgaaggtggtgtgccaccaaggtttctgattatagatgatggttggcaagagatagttgactattatccagagacgttgcatcagatgtttgttgcgaatgcaggttccagtttcaagctaccagggaattctgtgaaagactttcttgactctaaaactgcttgaagatacatgttttgggaacaaagtttcagaacaagcttcttgaagtaatcgatgcaagatcctgcatgtgtttagattctgcgtcgacttgagggcaagtcgaattttaaggaggagggaatgttacaccgccattgtcagatactccatagaaggaagtccgtcctgagtgggtactaactgcagccttgttgttgcggtcctatctaggagtaagtctctagcgtgtgaggctgtgtccctcggtcaccggttggtgagccatgttcctaagtagtcgtatatatgttgttggcttgggcagtaggaaggacaggtatgaactttactctgaatcaatacaatctgtccctgtttcctctcc

SEQ ID NO: 128984 - DNA, 1327 bp, Zea Mays
agcgctaaaacaccccctcccgtcccgcaccgacgtcgacggagacgtgtcactggcggcgttgagaagacagaagacttcagaccttctagattttttcccggccgcaatggatctctgggagagggcccgggccttcgccggcgaggcggcgaattggtcgcaggagctctccgcggaggcgaccaagcgctcgtctgcgctggtctcggagacggcgaagaagtcgaaggagatcttttccgagaccgcctccaagtcgctggagatcgccgccgaggcaaccaagcaggccgacctcctggccggccagatcaagcacctcgcctccgacatccccgtaccctcgatcccacccatccccgcgatcccacctatcgccgccactgcctcgtcggagcccgacgcggccgagcttgagcgctacggcatcaccgacgacctccgcgagttcgtcaaggacatgaccataagcaccttccgcgacttcccactgcaagatgagcctgaaatgtctgatgtgccaacggtgtcgaatgtgcgtcaggatctgagcgaatggcaggccaggcacgccacacttgtcctctcggcagtcaaggaaatatcgaagttcagatatgagctatgcccaagatacatgaaagagcgcaaattctggcgggtatattttttgctagtaaacagctatatagccccgttcgagaagaaatccttggaggagctgaaagtgaaagcagaggaagagaaaagggattcccagaagcaagcatcccaggcatctacaactttcgaacccaaagacacaaaagcgccaatcaagacctcttcaacaaatccagaacatgatctggatgtatttcttctgggagatctgggtagcgacgatgagggacctgttgatgatgatgatgacctagatgaggacttcgataagattgatgtgaccacgggattggaaagtgatgacgatgacaaaaaaatagcaacagggaaagcagaagatgcgaagtagtagcctatggttttacgattcgacagatgaccacaatgatagcgaactttagtattccaagatggtattgtatattagttgatcgcatgtcatcaattcatttgttatcacccagaaaaggatgttaaacacttgttttttttacaactttcgatttttaactaaactcacacatcttatcgatgttgtgactcctcttttcttattaggagttttctgcatatgtactagtctatctattgaattgaacttcagtacgactactcgaggctacaatttacatgaaataccggtgtgtgaagaatagaagat

SEQ ID NO: 128985 - DNA, 1296 bp, Zea Mays
agcgctaaaacaccccctcccgtcccgcaccgacgtcgacggagacgtgtcactggcggcgttgagaagacagaagacttcagaccttctagattttttcccggccgcaatggatctctgggagagggcccgggccttcgccggcgaggcggcgaattggtcgcaggagctctccgcggaggcgaccaagcgctcgtctgcgctggtctcggagacggcgaagaagtcgaaggagatcttttccgagaccgcctccaagtcgctggagatcgccgccgaggcaaccaagcaggccgacctcctggccggccagatcaagcacctcgcctccgacatccccgtaccctcgatcccacccatccccgcgatcccacctatcgccgccactgcctcgtcggagcccgacgcggccgagcttgagcgctacggcatcaccgacgacctccgcgagttcgtcaaggacatgaccataagcaccttccgcgacttcccactgcaagatgagcctgaaatgtctgatgtgccaacggtgtcgaatgtgcgtcaggatctgagcgaatggcaggccaggaaatatcgaagttcagatatgagctatgcccaagatacatgaaagagcgcaaattctggcgggtatattttttgctagtaaacagctatatagccccgttcgagaagaaatccttggaggagctgaaagtgaaagcagaggaagagaaaagggattcccagaagcaagcatcccaggcatctacaactttcgaacccaaagacacaaaagcgccaatcaagacctcttcaacaaatccagaacatgatctggatgtatttcttctgggagatctgggtagcgacgatgagggacctgttgatgatgatgatgacctagatgaggacttcgataagattgatgtgaccacgggattggaaagtgatgacgatgacaaaaaaatagcaacagggaaagcagaagatgcgaagtagtagcctatggttttacgattcgacagatgaccacaatgatagcgaactttagtattccaagatggtattgtatattagttgatcgcatgtcatcaattcatttgttatcacccagaaaaggatgttaaacacttgttttttttacaactttcgatttttaactaaactcacacatcttatcgatgttgtgactcctcttttcttattaggagttttctgcatatgtactagtctatctattgaattgaacttcagtacgactactcgaggctacaatttacatgaaataccggtgtgtgaagaatagaagat

SEQ ID NO: 128986 - DNA, 1887 bp, Zea Mays
atggggatcaaggcggtggagaagctcaggtgcccctcgtcggtggccgccgcggcgcggtcaggcttgaagctgtggatgctgcgggccgtgacgacggtgttgctctggaccagcgtcgtgcagttcacggcggtagggaacacctggacctgggggcctcgcgtgctaaagggatggccgtcgtgccggacggcgcgggaggcggccgcggtcaccaccacgcggctttcaacgccggagcccgtcgtggagaaggctgcgctgccaccgaagagaatttatcaaaacaatggttatttgatggtctcatgtaatggtgggcttaaccaaatgcgagctgctatatgcgatatggttgccatcgcaagatctttgaatgtgactttaattgtgcctgagttggataagacgtcattttggaatgatccaagtgaatttcaagacatatttgacgttgaacattttataatctctctaagagatgaggttcgcatacttagagaattgccaccaagagtaaaacggagagtggagttaggaaagttctactcagtgcctcctgttagttggtcggatatctcctattaccataagaagattctacctgcaattcagaaatataaggtactccatcttaatagaactgatgctaggcttgctaataatggtctgcctctggagatccagagactgcgttgccgggtcaattattctgcactgaaatttacgtcccaaattgaagtgttaggaaggagagtgattagaatgcttcgccaaaatggccccttcttagttattcatttacgatatgagatggatatgcttgccttctctggctgtactcaaggctgcactcctaaagaaaccgaggagcttacaaggatgaggtatgcttacccatggtggaaagagaaagtaataaactcttttgtgaaaagaaaagatggtctttgccctttgacgccagaggaggttgctattgttcttagagcattggatatcgacaaaagtatgcaaatctacattgcagctggggagatatatggtggaaaacgcagaatggcttctcttaccttggcttaccctaacgtggtgagaaaggagacgcttctggaaccttctgatctcatgttctttcagaaccattcgtcgcaaatggctgcactggattacttagtatcactggaaagtgatatatttgttcccacatatgatggcaacatggctaaagttgtcgaaggacaccggaggtacctgggattcaagaaaacaatcatgttggatcgaaaacttatagttgagctggtagatcagtataccagtggttctttgcggtgggatgagtttgcttcattgatcaaggctgtccattcaaaccgtatgggatcagcagccaccagggcagcgatccctgacaggcctaaggaggaggactacttctatgccaaccctcaagaatgcttgcaaggtcccaatatgttgcaaacattgtgagcttgtcacttgtcagcgctcttgccattctttttgcaacttggcatggctgaacataggattatccatcatatcttctgaacctgccaaatggaataacatgcttttgttagcagttcagagcccaatgagaaggtctgtgaacgggttctgaaacaacaaaggtggatatatgacttgaatttaggtgataggcaatgcttgagtggagaggcaatttgtttgtggattaaaccagcaaaagctgtcaagcagagctgatgctcatgtacgagactgtagtatagatggtgcagtaagtccaaaagtgatctttgtagggaaatattgtttcaaaagaaaaacttttctacacgtgccaacatttggataagaaaatctgtcaacttt

SEQ ID NO: 128987 - DNA, 1271 bp, Zea Mays
caatctcctcgtctcccactcggctacccacatcccccggagctccacaaaaatctccgctcccaggctcccacccgcgcggagggggcaagcagccaagcagccagcagccgcgcggcgccactgccttgccctcaacccctcacccaaacgcctcgctttggccgccccccacaaggccactcacccaaaaaatctccactcctcgaccgcaccgagcagaggatcacatggcatccgccgtttcgcttctcctctcgcccccgcgcctgctccaccgcgacggcacatcccgcctcctcagcatcccgcaccggcgggtcctcctcgccgcccccaacaacgcgacccctcgtcggctcctggcccccgcgccgcgcgcctccaacaaaaacgacaacagcggggccgtggaggcgcccgaccgcctcgtggccgcggtcgcctacctatacccgttcctcgacggcgcgcaccacgggcgcttccttctcacgcagttccccttcttcggcgcgctgctccgcccgctggcccccgcggctcggctcttccactcatcgccgctcacgcccttcctcctcttcctcacgctctacttcgccgttgtgcggaaccagcaggcgttctcccgcttcgtccgcttcaacgcgatgcaggccgtcgtgctcgacgtgctgctcatctttcccgacctgctcgcgcagtcgttcgcgccctccggtggggttgggttcgagatcttccagagcatggagagcacggtcttcctcttcctgctcgtctccttggtgtacggcggtggcgcctgcctgctcgggaagacaccacgtctgcccattgtcgcagatgcagcggagcgccaggtgatgtgactacaattcgtttcctgcggaccatgttgatggaaagggaatctgatgatatgcagaaaacatcccaatggttcgttggcgcttgcagcaaatcacaagcttagtataatttacaattgccttgctgtttatataggtctagttgccgattgaatgcatgtactgtggaaggttgatacaaaaacgttgcaatactaccatatttgttgaattgacaaattttgagagagcagtacatgtacactgttttacaatctgaattgcatttacaaatgaggaggaatgtctgaattggggagctttatgactaccctcccctgagcagcttcctttgtacctgaatggaggcttaggtcagtaattgtgatttcaatataaataagagcattccatcaa

SEQ ID NO: 128988 - DNA, 1140 bp, Zea Mays
atgaatggggtcttagctggctacaattactatgaacctaacatggtccagcattggggtcttctgaatcgagaagttaaaatttgggcttctactaatgaggatggctggttgttgccaagtgattctgagacttggaagtgtactcagacgttggaactcgttagttctctggaacctagagtcgaagaggcatttttcaaccaggttgcggtgctgccccaagcgagcctgattttgcttgcaaatgctaaaaagaacgctatttatgctgtgcatgttgagtatggcccagaccctgcttctactcgcttagactacatagcagatttcacagttgcaatgcctatattaagccttacaggaacacatgatagccaacctgatagtgaacaagttgttcaagtctattgtgttcaaactatggccattcagcaatatggtctagagctaccactctgtttgcctcctacagctgatagtactgggtttggaagagatcctgctatttctcgtgtttatgaggcacctctggaaatggcaggaacagagtcatctacaggaactagtttcacagattcttactctgtcagttctttgagtaaaccatcaactgttgaccagtctgcagagcttgatctgaaaccatcagctccaccgcttgcatactcagaaggtgatggttccgtgcctcttccatctgcacctcctgcaccaaagatggaggctcctggatcaggaccagcacctggagctcgtggtatagatcaatcagcttttgactatacaacaaacagaaatgtggagcgtgatgttttgaaaagacaagatacacccatgcccattagaaaggatatcttaggtaaagatgagccaagagatggtcacagtgatgttccaatgcttcccaatccccatttgatgtttcaggcttccttgggagttgggaccatcaaatgcgagaagcctggagtgggagcccaagctagcgaccccagaattgcccagccaccctatgcaagcaacggaagggcagcaagaatcctcgcaagtttccgtagcttgaaagcaggaggtacgcacagtacgccgaaaacgagagcgaggtacacacagtatgacagtacgaacaaaggatga

SEQ ID NO: 128989 - DNA, 679 bp, Zea Mays
gtttcaacgatgcaggtgtgggtcctgttcatctccattaattattcttgcacgctataaatccacccgggtgccctcacctcttctttcacaagccacactttccctccatttcatagctagctcatcgaccgatcgagtggtgaacatgtaccctgctgctgagatcgctagcgttccatacttatctcctgcggcctctttcaagcctcactaccatgtagctaccgacgacgacggcggcttcctctaccagcagtacagcaaccttctgctgcctcaccctccgtcctactaccaagaagttgcttacgaccagctggtccttgaagccagcttcccggttggtggtaacaacagatccaattcggagtcagacgagtaccaacgcagtgtcgcggaagagcgcaggaagagaaggatggtatccaacagggagtccgcccgacggtcgcgcatgagaaagcagaagcagctgagcgagctctgggcgcaggtcgttcacctccgcagcaccaaccgccaactccttgaccagctgaaccatgccatcagagactgcgaccgtgtcctccgtgaaaactcccagctgagagatgaacagaccaaattgcagcagcagctagagatgctccctgtagataccacagagagtggtgccatgagtcctggctcttga

SEQ ID NO: 128990 - DNA, 1548 bp, Zea Mays
gggaaagccacacgaaggacccttcagccgccacgcgacgcgaccaagtggacgaaccgcaacaggcaagtcttcgcttcgctcctctctgcggctccctccggcgagcggcgatggccttctcacccccgctgatcgactgggaggcggagagctaccctgcctacccagatttcgcggccattccccttttcgtcgtcttcttcctcgtcgtccgtttcttcctcgaccgcttcgtattcgaggttgtagtttttcccgctcatttttacaacatttctcgtttgctgtacgtatcattatcaacgatgctcgagccagttattttatagagtacgaagagagggagtcgaggactcgaggtttcgacgaactatatggattgtgagcaggtgcttgcgtgctcatgattagcaagggtggaaatccaaaggatctgtcaatcaattcactatcatttcaggatttgctaagtactatttatgtcactcacaatctcacatgtaactcgtgagcttacatgctattgagacatggagtagcaaaacctgaattcctatttaacttaaccatcattcaagtatatgttgatctgagtgagtgtccttacggaggcgcctattaggcagaaaatttcggaggcacggtcacgctaggttgctaagacgatgcgccaattgtttattaaagtagctgcatctacgcaattccacacttggctgatttttatttcttcttgttctagtaaatctaaaggagatcacttgtgagctgtggctgtaccttgttgccttgttgggatttgggaatgaatgagagttatttggcatcttccagatgaactttaattttcttttttttcccagaagggaggcctatgcatgcattagacctcatccagcattttgttcatagtggttagccaggaagctgattttcaaggaggaggatgagaagaagcttggccctactacatatgcaggcaagagaaagatcaggaaatttaaagaatcagcttggaaatgcatgtattttctttctggggagctattggcattgtctgtgacgtacaacgagccatggttcacaaccacaagaaatttctgggttggaccaggcgatcagatctggccagatcaaaaaattaaattgaaactcaagacagtctatatgtatgttgctggcttttacacatactcgatatttgcccttttgttttgggaaataaggcgctcagacttcggtatttcaatgactcatcatgtagcaaccgtctgtctgatagcactgtcttacatattcagatttgctcgggtgggttcagttgtccttgccattcatgatgctactgatgtgttcctggagcttggaaaaatttccaagtatagtggccatgagttgtttgcagatgtttcatttcttgttttcgtcagttcttgggtactcctccgccttatatattatccgttctggattctctggagcacgagactcactgttacccaccttcatgtagattctgaaggtgaagaggaacatgaggattga

SEQ ID NO: 128991 - DNA, 1402 bp, Zea Mays
gggaaagccacacgaaggacccttcagccgccacgcgacgcgaccaagtggacgaaccgcaacaggcaagtcttcgcttcgctcctctctgcggctccctccggcgagcggcgatggccttctcacccccgctgatcgactgggaggcggagagctaccctgcctacccagatttcgcggccattccccttttcgtcgtcttcttcctcgtcgtccgtttcttcctcgaccgcttcgtattcgagtggttagccaggaagctgattttcaaggaggaggatgagaagaagcttggccctactacatatgcaggcaagagaaagatcaggaaatttaaagaatcagcttggaaatgcatgtattttctttctggggagctattggcattgtctgtgacgtacaacgagccatggttcacaaccacaagaaatttctgggttggaccaggcgatcagatctggccagatcaaaaaattaaattgaaactcaagacagtctatatgtatgttgctggcttttacacatactcgatatttgcccttttgttttgggaaataaggcgctcagacttcggtatttcaatgactcatcatgtagcaaccgtctgtctgatagcactgtcttacatattcagatttgctcgggtgggttcagttgtccttgccattcatgatgctactgatgtgttcctggagcttggaaaaatttccaagtatagtggccatgagttgtttgcagatgtttcatttcttgttttcgtcagttcttgggtactcctccgccttatatattatccgttctggattctctggagcacgagctatgaagttgttctgactctagacaaggaaaagcataaagttgacgggccaatatactactatgtattcaacagtcttctcttctctctacttgttctacacatatattggtgggttttaatgtatcggatgcttgtgaagcaaatacagtctagagggcacgttggcgatgatatacgatctgattctgaaggtgaagaggaacatgaggattgattgagctgtgtagagttggaagataataagtaacatggggatggattgagctgtataagttccaaaggcgaaaaggaatacgtggatggattgagctgtgtaaattctgaaggtgtatcaaatcattctgctgtttttcttctgtccttgttcttgataagtaacaataaattagtgcccttctctaggtgagcatcatcgatagatgtcacttgggcattatcattatctattgatgtaaaatcaggtcacattgcatagcacacacacaacagttaatggaaaatgttagcagtgcacatgtctgcctctaccttggccagttccccctttcaatactgggcttaaatcaatgctaacttatc

SEQ ID NO: 128992 - DNA, 2077 bp, Zea Mays
cgcgacgcgaccaagtggacgaaccgcaacaggcaagtcttcgcttcgctcctctctgcggctccctccggcgagcggcgatggccttctcacccccgctgatcgactgggaggcggagagctaccctgcctacccagatttcgcggccattccccttttcgtcgtcttcttcctcgtcgtccgtttcttcctcgaccgcttcgtattcgaggttgtagtttttcccgctcatttttacaacatttctcgtttgctgtacgtatcattatcaacgatgctcgagccagttattttatagagtacgaagagagggagtcgaggactcgaggtttcgacgaactatatggattgtgagcaggtgcttgcgtgctcatgattagcaagggtggaaatccaaaggatctgtcaatcaattcactatcatttcaggatttgctaagtactatttatgtcactcacaatctcacatgtaactcgtgagcttacatgctattgagacatggagtagcaaaacctgaattcctatttaacttaaccatcattcaagtatatgttgatctgagtgagtgtccttacggaggcgcctattaggcagaaaatttcggaggcacggtcacgctaggttgctaagacgatgcgccaattgtttattaaagtagctgcatctacgcaattccacacttggctgatttttatttcttcttgttctagtaaatctaaaggagatcacttgtgagctgtggctgtaccttgttgccttgttgggatttgggaatgaatgagagttatttggcatcttccagatgaactttaattttcttttttttcccagaagggaggcctatgcatgcattagacctcatccagcattttgttcatagtggttagccaggaagctgattttcaaggaggaggatgagaagaagcttggccctactacatatgcaggcaagagaaagatcaggaaatttaaagaatcagcttggaaatgcatgtattttctttctggggagctattggcattgtctgtgacgtacaacgagccatggttcacaaccacaagaaatttctgggttggaccaggcgatcagatctggccagatcaaaaaattaagtatgttgaacgtcttctcgattttgagggggcaagatcttctttggccagatttttataattttatttgtaccaagttatagcaaatgttattttatttcccagattgaaactcaagacagtctatatgtatgttgctggcttttacacatactcgatatttgcccttttgttttgggaaataaggcgctcagacttcggtatttcaatgactcatcatgtagcaaccgtctgtctgatagcactgtcttacatattcagatttgctcgggtgggttcagttgtccttgccattcatgatgctactgatgtgttcctggagcttggaaaaatttccaagtatagtggccatgagttgtttgcagatgtttcatttcttgttttcgtcagttcttgggtactcctccgccttatatattatccgttctggattctctggagcacgagctatgaagttgttctgactctagacaaggaaaagcataaagttgacgggccaatatactactatgtattcaacagtcttctcttctctctacttgttctacacatatattggtgggttttaatgtatcggatgcttgtgaagcaaatacagtctagagggcacgttggcgatgatatacgatctgattctgaaggtgaagaggaacatgaggattgattgagctgtgtagagttggaagataataagtaacatggggatggattgagctgtataagttccaaaggcgaaaaggaatacgtggatggattgagctgtgtaaattctgaaggtgtatcaaatcattctgctgtttttcttctgtccttgttcttgataagtaacaataaattagtgcccttctctaggtgagcatcatcgatagatgtcacttgggcattatcattatctattgatgtaaaatcaggtcacattgcatagcacacacacaacagttaatggaaaatgttagcagtgc

SEQ ID NO: 128993 - DNA, 79 bp, Zea Mays
aaacaataagaatgttgcaatttatgctaccttctctaagctacaattcatatttacttttactaatgatagcaccgaa

SEQ ID NO: 128994 - DNA, 1915 bp, Zea Mays
gtcacgttagcggccagctacatcctgacgatcctgtcacccgctcgatcggcgggcgctggagcgcgcgcatctagctttgtgcaagtttcacgggatctctagctttgtcggcggcacatgagcagctccaagcacgccgcgggcgccgtaggcggcaaggccgcgcgcgcctgcgacagctgcctgaggcggcgcgcgcggtggtactgcgctgccgacgacgccttcctgtgccagggctgcgacgcctcggtgcactcggcgaacccgctcgccaggcggcacgagcgcctgcgcctgcgcccgacggacccgcactcgacgacgctcgaggccggcgtggcgacggcgacgtggaagaagcgccagcagcaggtcgcgccggcgtggtccaagcgcaaggcgcgcactcggaggccgcacgtcaagagcgtcggggagctcctgtcgaggaagctcgtcgtcgtgcctgaggtgtcccccatcgaatcgtcggaggagcggaaggccgaggaggaggaggaagaggaggaggggcagctgctgtactgcgtgccgacctttgaccgcgccctggccgagctctgctcgccaccgcctccggtcgatgacccgacggcctcatcctgctgcagggatgacgtcgacggcgccgtggagaacaacacaaaggcaccaccggtcgtggtcgcggaatcgcccgtgcagcagctcccggacagctttgccggcttcggccccacggacgccgagctcagagagttcgccgcagacatggaagcccttcttggccagggcctggacgacggcaacgagctggatagatcgttctacatggagagcctagggctaatggcgcagcaggcggaagacgtcggccggataaagatggagcccaacggcatcgtaagctcccgctcccgcggcgagggcgctcccgggtttggccctacggagatgaagccagaggcgtcgtcagctgctgctgaggtgctggacacagacttcaactgctgctcgcccacggtgatgatggataacgaggatgaggacagtttcgaacagaaggcgtcggcgagcaacgctgccgccgccgccgcgggtacgcaattcttgaagaggagcctggatctcagcctcaactacgaggccatcatcgagagctggggaagctcgccgtggaccgatggccaacggccaagcgtccagctcgacgatttctggccccacgcccacctcacgggctggatggcgggaggaggacggttgggtggggaggcggcggtgactccacggctggggatgggcggcgggcgagaggcgcgggtaacacggtaccgggagaagcggcggacgaggctgttcgccaagaagataaggtacgaggtccggaagctcaacgcggagaagcggccgcggatgaagggccgattcgtcaagcgaccagctgccgctgcaggaggaggaggcgaggagctaccattgccgccccgtgcgccgtcacctagcttgccgatcgaagtcgcccgtgtcgcggcgcagtccccgtgcggcgtgccgatcggggtcaggccgcgcccgtgtccccgtgagtgtcgaggtcgttgacctgctcgatcggcatgaaatcacggactcagaatttgtcgaagctcctttagacatttagttagttggttctacacatcactttgtgtttctctcaatcatttcggcatccgtgaatccggaggggttaagacgaaaccctgctgtgcatttctacaggggtgtcgtcgcaccgtctggtttaagccaaaacagttcgggaacagacaccaaatagaaaacaatatgtaaactgcatgcatcttgtaactagccatcatgtatatatgtgcagcaaacctttaattttattttgttgtcgatt

SEQ ID NO: 128995 - DNA, 1596 bp, Zea Mays
acgggccaaccccatccactcctttcctcccacccgccagccgtcacccgcacgtgcagccagcttccctgctacccccgcgcgccgccagccgagcggacgccggccctgccccgcacgccggcacgcggcacgcgcagccagctgccccacacgacgccggccgccctcgcactccccaccgcgctacccggcagccccgcgctacccgctcctcgctcggcgtccttgattcccaccgcacggcggcccttcttctgccaccgcacaccgcgcaggagcactgcccttcgccccttgtttagctgcagcaggagcgccgcccagccggccaccaccaccgcagcttgagagttgagacctgcagttgacgaccagaggccagagggcgttgctgcgctgcgttccgctctcccttttctgctgcgacgacggctggtcgagcgccgccacactttgcagcttccttggctcttcgcaggtgacgagcgcccaccagacatgggacaaggtggacaagagaagtcgttcaatttccttcaagttttgctagagggcagcatagctggaggaactgctggtgttgtggtggaaacagcactttacccgattgatactataaaaaccaggcttcaggccgctcgaggtggaagccggattgaatggaaaggcttgtattctggattagctggaaatctcactggcgtccttccggcctctgcgatatttgtcggggtgtatgagccaactaaaagaaaattactggaaacccttcctgaaaatctgagtgcagttgcccattttactgcaggggccattggaggtattgctgcttccctcgtccgtgtccctacagaggtggtcaaacaaaggatgcaaactggtcaattcaagtctgcacctgatgctgttcgtctcattgttgctaaagaaggatttaaaggactgtacgctggttatggttcctttctacttcgagatctaccatttgatgccatccagttctgcatttatgagcaacttcgaattggctacaaacttgtggcgaaaagggagttgaatgatccagagaatgcacttatcggtgcttttgctggcgccatcactggagctataacaactccccttgatgtcatgaagacaagattgatggttcagggacaagggaaccaatacactggaattgtaagctgtgctcagacaatcctcagagaggaaggccctaaggcattcttgaagggcattgagccgcgagtgctgtggattggcatcggtgggtccatcttctttggcatgctggagaaaaccaagtcgatgctagccgagaggaggaaccgcgagcttcgggccgtcaaggacgaatgagtggagatcagctcttttttggcgttgagtccttaccctgaaacaaaatacacatttttacttgccggggacaacctcgccggcccgtacttgtactccacggcgttcacgttatcacgtacgtagaaattatgagcatgactgacggtttctacagattgaaaaccaaaacttattacatgcgctggaaacctgccactcactgtttacgttgggagttaataacactat

SEQ ID NO: 128996 - DNA, 1375 bp, Zea Mays
ctccacgttcgctccctctcttttgtgtcggggccgccgctgtgctggagccgccgcgagccgctgctggaggagccgccgccggcctccccaactcgccttaggtgccagaacgaccagaggccagagggcgttgctgcgctgcgttccgctctcccttttctgctgcgacgacggctggtcgagcgccgccacactttgcagcttccttggctcttcgcaggtgacgagcgcccaccagacatgggacaaggtggacaagagaagtcgttcaatttccttcaagttttgctagagggcagcatagctggaggaactgctggtgttgtggtggaaacagcactttacccgattgatactataaaaaccaggcttcaggccgctcgaggtggaagccggattgaatggaaaggcttgtattctggattagctggaaatctcactggcgtccttccggcctctgcgatatttgtcggggtgtatgagccaactaaaagaaaattactggaaacccttcctgaaaatctgagtgcagttgcccattttactgcaggggccattggaggtattgctgcttccctcgtccgtgtccctacagaggtggtcaaacaaaggatgcaaactggtcaattcaagtctgcacctgatgctgttcgtctcattgttgctaaagaaggatttaaaggactgtacgctggttatggttcctttctacttcgagatctaccatttgatgccatccagttctgcatttatgagcaacttcgaattggctacaaacttgtggcgaaaagggagttgaatgatccagagaatgcacttatcggtgcttttgctggcgccatcactggagctataacaactccccttgatgtcatgaagacaagattgatggttcagggacaagggaaccaatacactggaattgtaagctgtgctcagacaatcctcagagaggaaggccctaaggcattcttgaagggcattgagccgcgagtgctgtggattggcatcggtgggtccatcttctttggcatgctggagaaaaccaagtcgatgctagccgagaggaggaaccgcgagcttcgggccgtcaaggacgaatgagtggagatcagctcttttttggcgttgagtccttaccctgaaacaaaatacacatttttacttgccggggacaacctcgccggcccgtacttgtactccacggcgttcacgttatcacgtacgtagaaattatgagcatgactgacggtttctacagattgaaaaccaaaacttattacatgcgctggaaacctgccactcactgtttacgttgggagttaataacactatgcaacatttaaatgctatggtaagcctctaaaaccgc

SEQ ID NO: 128997 - DNA, 1363 bp, Zea Mays
aacgatacggctgacctagttcgtgccagctcgttatcctaaccagttaggccttgttcggttacgtttggatcgaagtggattgagggggattaaatctctttctattcaattttgactggggagggatttaatcccctccaatccagacgcaaccgaataaggccttactgagccgaggttcgataggagtattctgtcgtaatcctgccattcatttccatccagacgaccagaggccagagggcgttgctgcgctgcgttccgctctcccttttctgctgcgacgacggctggtcgagcgccgccacactttgcagcttccttggctcttcgcaggtgacgagcgcccaccagacatgggacaaggtggacaagagaagtcgttcaatttccttcaagttttgctagagggcagcatagctggaggaactgctggtgttgtggtggaaacagcactttacccgattgatactataaaaaccaggcttcaggccgctcgaggtggaagccggattgaatggaaaggcttgtattctggattagctggaaatctcactggcgtccttccactgcaggggccattggaggtattgctgcttccctcgtccgtgtccctacagaggtggtcaaacaaaggatgcaaactggtcaattcaagtctgcacctgatgctgttcgtctcattgttgctaaagaaggatttaaaggactgtacgctggttatggttcctttctacttcgagatctaccatttgatgccatccagttctgcatttatgagcaacttcgaattggctacaaacttgtggcgaaaagggagttgaatgatccagagaatgcacttatcggtgcttttgctggcgccatcactggagctataacaactccccttgatgtcatgaagacaagattgatggttcagggacaagggaaccaatacactggaattgtaagctgtgctcagacaatcctcagagaggaaggccctaaggcattcttgaagggcattgagccgcgagtgctgtggattggcatcggtgggtccatcttctttggcatgctggagaaaaccaagtcgatgctagccgagaggaggaaccgcgagcttcgggccgtcaaggacgaatgagtggagatcagctcttttttggcgttgagtccttaccctgaaacaaaatacacatttttacttgccggggacaacctcgccggcccgtacttgtactccacggcgttcacgttatcacgtacgtagaaattatgagcatgactgacggtttctacagattgaaaaccaaaacttattacatgcgctggaaacctgccactcactgtttacgttgggagttaataacactat

SEQ ID NO: 128998 - DNA, 1289 bp, Zea Mays
ataggagtattctgtcgtaatcctgccattcatttccatccagacgaccagaggccagagggcgttgctgcgctgcgttccgctctcccttttctgctgcgacgacggctggtcgagcgccgccacactttgcagcttccttggctcttcgcaggtgacgagcgcccaccagtcagacatgggacaaggtggacaagagaagtcgttcaatttccttcaagttttgctagagggcagcatagctggaggaactgctggtgttgtggtggaaacagcactttacccgattgatactataaaaaccaggcttcaggccgctcgaggtggaagccggattgaatggaaaggcttgtattctggattagctggaaatctcactggcgtccttccggcctctgcgatatttgtcggggtgtatgagccaactaaaagaaaattactggaaacccttcctgaaaatctgagtgcagttgcccattttactgcaggggccattggaggtattgctgcttccctcgtccgtgtccctacagaggtggtcaaacaaaggatgcaaactggtcaattcaagtctgcacctgatgctgttcgtctcattgttgctaaagaaggatttaaaggactgtacgctggttatggttcctttctacttcgagatctaccatttgatgccatccagttctgcatttatgagcaacttcgaattggctacaaacttgtggcgaaaagggagttgaatgatccagagaatgcacttatcggtgcttttgctggcgccatcactggagctataacaactccccttgatgtcatgaagacaagattgatggttcagggacaagggaaccaatacactggaattgtaagctgtgctcagacaatcctcagagaggaaggccctaaggcattcttgaagggcattgagccgcgagtgctgtggattggcatcggtgggtccatcttctttggcatgctggagaaaaccaagtcgatgctagccgagaggaggaaccgcgagcttcgggccgtcaaggacgaatgagtggagatcagctcttttttggcgttgagtccttaccctgaaacaaaatacacatttttacttgccggggacaacctcgccggcccgtacttgtactccacggcgttcacgttatcacgtacgtagaaattatgagcatgactgacggtttctacagattgaaaaccaaaacttattacatgcgctggaaacctgccactcactgtttacgttgggagttaataacactatgcaacatttaaatgct

SEQ ID NO: 128999 - DNA, 1026 bp, Zea Mays
tactctcgcctcgtctgcacgactgcacccgccttggccaaggcggaacgcgctataaaaagcagcgccgccgcgcgagctcttgctactgtgtggtgcaagtgcaaccaatctgatcacccagtcgtcccttccaatacccggtgcggtgatgatgatggctcggggaagaggtggtgcgatcggcggcggcggcgtcatcgcgttggtgctcctggtcggcctcttcgtggcgacgagtgccccgccggtcgccgaggcggcggcgtcgtacatggtcggcgactacggcgggtggaagttcaacgtcgacaggtgggccaaggggaggaccttccgcgccggcgacgtgctcgtgttcagctacaaccgtgcggtgcacgacgtggcggtggtgaacgcggcggcgtaccggagctgcgcggtgcccaacaagggcgcgagggtgctgcggagcgggcgcgacaaggtgaggctcggcagaggcacgcactacttcgcctgcaccgtgcggggacactgccaagccggcatgaagctcgccgtcagggccgtgtagtagtcccgcctggcaacggcggccacgcccaacttccagagtccagatccatcgatccatgcctcaggtcggctgcgtgtgggatcctgaaaaatctagacctcctagctattttgcgttgcttagttaatctaatggcgagctatcttgtcgtgtgttctgtgtacgtttatggcccttttgttgatgttcttgggttatgctatgcacgagtagtacacatgtccaaatgggctggtctgacagtgggcctgtcatccggcacagtcgtgacccggcataagcatggcctgacccgactaaaacggtactcggattggcctgcccgatagctgtgccgggcttgggccggccgtctagcccacgatgcaggcatgaatctggtccggttaaagggtaggcacgataacggctcgattgaggaactgattttataacaaccagtatatttttatctacaatactca

SEQ ID NO: 129000 - DNA, 735 bp, Zea Mays
ggacgtcggatggagatccgagtgtccacgatgacagagaccgggttttgaatctctcgtctctccatctctcatgcgttcccaacttccaactccaatgccgtctccgctggctgatcagtgatcacctctgaccctctctggtgatgtgtacccattgttaatctctccaatgaagctaccctgcctgaccaggcccacaggctgtctcctgcatacggtggcaacacaccaacactgctggcctgccctaagacacatcttcgcgttgcgtccactggatacctgctttcttagtcagcagcatgccgaaaccctccatttgtgaaacctcagcggtgataggcggtggttgtcgaacgctggcatgaaggtgtgagctcccaactgctgaatcgtgttcctcttttacatgcacgtgtccaacaagaaccaaggtggaactgtaaagccttgtgtctttgaactttgcagccacgtattcagatttttttttgagttattgtaatttatttacattccctctagaaccgagattagcgctacctcagtacactgccggtgcaagataaacgaaggaagctgggattgcatggcactgcggtctgttatgtagccgtggaacagcaagacaaaaagacatggatattccttgtttggattggggtgtttgatccagaaacagtctcattgctaattgtttcattattactacaaatcttggtcgaggcgtga

SEQ ID NO: 129001 - DNA, 1544 bp, Zea Mays
atgaacaatttggcgctctcgatgctctcgccgtcgacctcaggtttcccgccaagccccctaccctccaaggccgccacgaacgccacagctccccgatgccgcgccgcgccctcgggcgacgcctcgctgtgcgccttccgcgcgcaccacagcgccggccacgccctccacactaacccggctctgatgcccgcgctcgccgcctgcgcgcggctgccctccgccgtggccgaggccgagcagatccacgcactcctcgtcaagtcaggcggctcgcgggctgtctcccacgtccaagccttcacgtccctgattcgcgcctacgcgaggctcggccgcgtgtgcgacgcgcggaaggtgttcgatggaatggccgaccggacggtggtcacctggaacgtgctgcttgatgcgcttatcagagatggcgacttggacgctgcgtgggaggtgtttgtgaaaatgccgcagcgcaatgcggtttcttggaacaccataatttctggttttgcaaggaacgggtgggcgccggtggcagtggacttgtttatcgagatgactgtggcttatggtttagcgccagatgaggccacgatggttggcttcgtgtcggctgttcgggacattggtctacttgcaattgggaagagcgcacacgggtatgttctccgtcgggagttctcacttgatggtcctctcggggttgcactggtcagtatgtacacgaggtgcgggagcatgggtgctgcacacagttgcttcttaagtgtcaccaccaagaatgtggagcattggacctctttgatcgcaggtttcgcagcacatggtcaaccagagaatgccttgaggttgttcgtcgagatgaggcaggtgggcattgagcctaatggtgtcaccttcgtagccgtcttgagtgcctgcagccatggcgggctcgtcgatgagggcttcaagtacttcgacctaatgaggagcatgggcatcaggccgatgatccagcactatggctgcttggttgatctccttggccgtgctgggttcttgaaggaggctttcaatcttgccagcaatctacctgaagatcctggttttgtaatctggagctcgctactagcagcctgccgtagccatggcaacgtcgagatggcagagctcactgcgtcgaagttggcagaggcaaaaccaagtcatggcagctcgtatgtgctgctatcgaacacatatgcacgagcggaacaatgggaggactcgaagaggacgcggaggaggatggaggaacatagagtagccaagaaacctgggctcagctggatagagatagatggaagcgtacattcctttgccactgcagacaagctgcatatagaaagcgagggtatttatcatatgttggaggatttgaaacataattttacatcagctgcatatgaacctgaaccgttcgctatttctgaacaattgtaataaatttctttggaggaagattatcacttgttaataaaaaatccatcatatcataaatattaaatatatattcaaac

SEQ ID NO: 129002 - DNA, 180 bp, Zea Mays
attaggccagctattttcaactcaactctgaatgaagcttcagaggcaggaacacaagcacaaactactgtccagattgacgaggagccaggttctgatgaagacgacgatcttccaccacttgaagcaaacaccaacaggaatagaccatatgaactaatttatcaacgaaataactaa

SEQ ID NO: 129003 - DNA, 1051 bp, Zea Mays
aaacctcctgccctagtctcctctctgtctcacagcacagcccctgctttccccccaccgtcccacggccgccacgccgccacgcttcttcttccctttcccgtccaacctccaaccctgccggctgccgcggcggcggattaacacaataccttggcgagagacgtaatagtttctgaactcaccgcgctacgcccgatgtcggagacggcggcgccgatcggcctgtcatgggctcccaagcttccttcctttgcaacgaccagcggcggcagcaagatcgaccacgcgccggatccgagcaccgcgcagggctcgctctggaagcgcacgagcgagctcgtggacgggctgttcgtgcccccgagggaccctaggcagctgaataagctggctaggaagaacgtcaaggacaccgccggcaagggctggttcgacatgcccgcgccgaccatcactcccgagttgaagaaggatctcgagattttgcagctgaggcatgtaattgacccaaaaaggcacttcaagcgggcaggaaagtccaaggcccttcccaagtacttccaagttggtacggttgttgagcctgcatctgagttctactcaagtaggctgaaaaatagggaacgcaaggcaacattggtggacgagctgctatcagatcaatctcttaagagctacaggatgcgcaaggtacgggaaattcaggagatccgtacaccaggaggcaaccaaaagtggaagaacaagggcaagaaaacactgaagagggcgaaggataggagaaaatgagactggtgcgcccagctttgtgctccagttgtgagggaaccaaggaacgccttcaagtcgctctagtgcttttctctcaactttgcagtatagattctggttccagtgtagtgttgtggacttcatgatgaattgatttgtatttctataaattttataatattgctgtaacagcggaattcagaaatatgagttggtagactctttcaagttagctagcttcatatatgggagaagcactgtctcagctcatttttct

SEQ ID NO: 129004 - DNA, 470 bp, Zea Mays
attatgatatttttattttttttaacatgaacaagaaaaatacacgctatatttatatatgtcaccgccagtaaagagtccaatgaccattatcaccaagctcttctaccaaaattccagcttttctgttgcacttgtcaatgaggagattgtactcccctcgactgctctctctatcgctcctctccttacagttacagctacagaagtgctcctcgactagttattgccattgtagcgcacgctataactactgcggaatcgcagcccgttctgctcgtacggcgccgcgtccccatggttcacggccttgatctccacgggacggcggctggtgtccccttcctgcacggctccgaagacgatctccttcgttgcatcgcagctcggctcgtagtaggtctgcggcccggccgagtactgcctgtggtgttgcacgtactgttggtgacgcacctgctgcggctgct

SEQ ID NO: 129005 - DNA, 2409 bp, Zea Mays
aaagcccttcactgcagttcgcctgaacatctgaacacctccacagtccacacaaggaccacgagttcagggaccatggattccagttcttctttctttcttactatacgaaagacgggtttcaagttcgtcttcctcagttcctcgccataacgtgtggaggtgcatatacactgacctgtccatctgagttttgatgatgatgctggctttgatccagtatagctgacattatgtggtgggcagctaccgtgttcgtcattgttgctgtcccacaggtctctccgtctctgtctgtggcctctgacgagtgatcatcgtaggccgttccagcgctttaaattctccctgcctctcctcgtctcgcttcacttcagtaatcagtgctcgctagcccaccacgccctgaacctagcccggacacccgccaggacaggccagcccaacgcgatgcgaccgccgcctcagggtccgcgcaccaccatgtccatgggctccccggtgcagctcaggcggctgaagcctctgtaccagctggtggtgaacaacatcctggccatcgtggccgtgccgctcgccgccgcggtcctgctcaaggcgtcgtcgctcgggcccgaggagatcctggcgctccggccggcgcacatgttcctggccgcgttcctgcctgccgcggccacggtgctatacctgatgctccggccgcgcgctgtgtacctggtggactacgcgtgcttccgcaccagccccaactgccgcgtcccgttcgcgacgttcctggagcactcccgcgtgtggccgggcttcgacgagcgcagcgtccggttcatgacgcgcctgctggagcggtcggggctcggggaggagacgtgcctgccgtacgcgcagcactacatcccgccgtcgcgcgacctggagtcctcccgcgccgaggccgagctcgtcatcttctcggccatcgacgacctgctcgccaagaccggggtctccccgcgggacatcgacatcctggtggtgaactgcagcctgttcgcgccgacgccgtccttcgcggacatggtcgcgcaccggtacaggctccgcggcgacgtgcgcaacgtgcacctcgccgggatggggtgcagcgcggggctcgtctccgtggagctggcccggaacctgctgcaggtggcgccgcggggcgcgcgcgcgctggtggtgtccacggagaccatcacccccaactactacatgggcgaggagcgcgcgatgctgctgcccaactgcctgttccgcatgggcggcgcggcggcgctgctgtccaccgacggcgccggcgcgcggttccgcctggcgcgcgtggtgcgcacgctgcgcggcgcgtcggacggcgcgtaccgctgcgtgtaccaggaggaggacgagcgcggcaacgtgggcatcaacctgtccaaggacctgatgagcatcgcgggcgacgcgctgaaggcgaacatcacggcgatggggcccctggtgctgccggcgtcggagcagctgctgttcgcgctgtccttcatcgcgcgcaaggtgctgaacaaccggatcaggccctacatcccggacttccgcacggcgttcgagcacttctgcatccacgcgggcgggcgcgccgtgatcgacgagctccagcgcagcctgacgctgtcggacgagcaggtggaggcgtcgcggatgacgctgcaccggttcggcaacacctccagcagctccctctggtacgagctcgcctacgtcgaggccaagggccgcatgcgcaggggcgaccgcgtctggatgatcggcttcggctccggcttcaagtgcaacagcgccgcctgggagtgcatccgccccgccgccaacgccgacgggccgtgggccaactgcatccaccggtaccccgtgcacattcccgacgtgctcaagcactgagcccggcgccagctccagtttcgtgccgtgccttgcctttcccttttcctcctcgcccggttgccattgcacctgctgctacatttggtttgtggacatcaaaacgaaccgctggaacagcgattggccgtggtcgtgaactaggttggtggaatatgtgatggagagtgacagagtacttgtcgtgtcgtatcaacgggggctcaaggcggcggggtggtcgtcataaaggaggcgaggtcgggccaggctgccgtacatgggcgcccggggaacggacgtgtgttgtgcttgtccggggcgttgttgtattatctaccatttactatttcttacaattcattcctgcagtataccatgaaaagagatatgacatgagctactagtagacgacaagacgagcaaaagctttgatgtatgtgtgcacctactctttatacaatcaagtgttctcatttaagtaaaagcgcctacatg

SEQ ID NO: 129006 - DNA, 1152 bp, Zea Mays
cttcgccgccgcgccacgcagacccgcaccgcgcgcgcacacaaaccctccgcctcgcaagtcgcaacagagcagcggcggcagcaacgacgccaccgcacccattccacgacgccgtaaaccgcaatggggaacagcctcgggggcaagcgcaagggcgccaaggtgatgcagctggacggcacctccttccgcgtcaagcccccggcggccgcggccgacgtactgcgggaccacccgggcttccagctgctcgagtccgaggaggtcaagctcctgggcgcacgcgcgcgcccgctcgcctccgacgcgccgctccgccgcggccggctctacttcctcgttgcgctccctcgccgcgcgcccgcaggtcccatgcgccgcgcctggtcgggcaacctcaacgtcggggcccgcgagcgtctcgagtcgctcaagctcgcgcgccgctccacctccgacctctcctcgctttccgcccacgcctccgcgtcggcccccacctccccgcttcccggcggcgccgcctcccctcttcctcccaccggcagcggcgccacgcccgtgcgcgttaagatgcgtcttcccagggcgcaggtggagaagctcatgggggagagcaaggacccagccgaggtcgccgccaagatcatggagctatgtggcgcggccgtgtgcgacgcgcacgccagcgctcgggtcatcccggagcgcccgcccgggatactgcggagccaaaggttcgccaagacgccggaatggggcgccgggttcatgctgccggcggcggcggcggccaagacgccgcagcggtggcccacgctgccacgcaccaacgagaaaaaggcacggttcgtagagttgccggacgagctaataatagcgtgattctgtacttccctgaagcgagttaacacttctttttttttttttttactgtctcaaagcatgtttggtgattgtcagaccaggagataaggaattgtaaacttatctgcagtcgctgctgtatttgttcttcccgcttgctcatttgagcgaaacaaacaactatatggtttgaagatgagaagccgccgatggcttccgattcaccttcatccagtgatctgacaccgtgttagactgtcaccaagtttccttccgccttct

SEQ ID NO: 129007 - DNA, 597 bp, Zea Mays
atggggccggacctcctgggacttggcttgctgccgccgccgatggccggcggcggccacggaggtggttcagcggcgcagcgacgaccttatcagaagacgggattcgacgagcccctacgtttcgccgccgacgcccctttgccggtgcgcccgcggccccggccagtggacgtggacgacggcgtcgtccctgcagcagcacctccggcgagcatgccgaagccgcccgcgtcgtcgaccgcggcacgcaggccgccggttaccgcaggactgatctttgaggactccgcctccgcggcagtagcacggagcacccatgacgattccaccgcgccaacgacgataatctacgcgggctctgtgtgtgcctatgacggtgctatgatagaacagggcggagagtgcagggacgatgcagcatcaccctcgcagagaggagtggcggttccctgcgcaaacaacggacgctccggctgccacggtttccgcgagaaccagcgcctcgcttggcggcatggaccggcggccacgggcctcccaagaccatcccaagagaatgaaagcgagccatggcgacgaggcagtgagcactga

SEQ ID NO: 129008 - DNA, 657 bp, Zea Mays
ttttttttgcgtatttctttagaaatagacgtggtatattgtgctgcacttacctctcgcattttgatgatcacaggcagcaatgcctgccttgcaaaacaacataaggttctgtatgacaagatcatctaaatatataccctaaggctggctccaacaagggcccatgaagcatcctctattttaaatatagaggatcaaacagtactctacactctccagcaacgttctctaaatgatcctctaaatttagacgacgttgctgaattctctatatataaagtttctctaaacggttatctattcatctaaatactttaaatacctggtttaacaaaactaaaatatgtacaatacatttaagagtatgataaatatgtatgtacaaaaaataaaaataaaaaatgtctctaatataggtatttgcgtatagaagacgtgatttagaggacgttgttgaagaggaataagatatagatgatgtaatcttttagaaaagactgtaaaagacagatatcgaagatgtatatagaggacgttgctggagacaacctaaatttgttcagcgtgcaaattttggtactatctggccatctacaaaggaggcagaaatatcaggcacaaaaacaaaaaaccattagcagtcttgaacaaatt

SEQ ID NO: 129009 - DNA, 2011 bp, Zea Mays
ccgcctgccgtcgcgcacacctcagtctcctgccgtgcgtagtgtgtacgggccaggcggcagagctagctttcactacactcagtggccattgccgttgctagctttcactagctcttagctgcaatgtcggcggcggcgtcgcagagcagtgtcaaggcaatggcggcggccgcagccgctgtggcaatgctgctctcggccgcggcggcggtggccgcgcagcacgattacggcgacgccctgcacaagtgcatcctcttcttcgaggggcagcgctcggggaggctcccgccggaccagcgcctccgctggcgccgcgactccggcctccacgacggcgccgcggccggggtggatctgaccggagggtactacgacgccggcgacaacgtgaagttcgggttcccgatggcgttcacggcgacgctcatgtcgtggggcctgatcgacttcgggcgcagcttcggcccccacagggaggaggcccggaaggcggtgcggtgggcgacggactacctgatgaaggcgacggcgaagcggaacacggtgtacgtgcaggtgggcgacgcgttccgcgaccacgcgtgctgggagcggcccgaggacatggacaccccgcgcaccgtgtacaaggtggacccgtcccacccgggctccgacgtcgccgccgagaccgccgccgcgctcgccgccggctccatcgtcttccgcgacgccgaccccgcctactccaagcgcctcctcgaccgcgccgtcgccgtgttcgagttcgcggacaagtaccggggcccctacagcagcagcctccacgcggcggtgtgcccctgctactgcgactactccggataccaggacgagctgctgtggggcgcggcgtggctgcacaaggcgacgcggcggcgggagtaccgcgagtacatcaagaggaacgaggtggtgctcggcgccagcgacgccatcaacgagttcggctgggacaacaagcacgccggcatcaacgtcctcatctcaaaggaggttctgatggggaaggacgagtacttccagtccttccgtgtcaacgccgacaacttcatgtgcaccctcctccccggcatctccaatcacccccagatccagtactccccaggcgggctgctgttcaaggtcgggagcagcaacatgcagcacgtgacgcagctgtcgttcctcctgctggcctactccaactacctgagccacgccggcgggcgcgtctcgtgcggctcgtcgtcggcgtcgccggtgcagctccgccgcgtggccaagcggcaggtggactacatactgggcgacaacccgctgcggatgtcgtacatggtggggtacggcgcgcggttcccgcggcggatccaccaccgcgccagctcgctgccgtccgtggcggcgcacccggcgcggatcggctgcaaggccggcgccgcctactacaccagcccggcgcccaacccgaacctgctcgtgggcgccgtcgtgggcgggcccaccgacgactccgacgccttccccgacgcgcgcgccgtgttccagcagtccgagcccaccacgtacatcaacgcgccgctcatgggcctcctcgcctacttctcggcacatcccaacccagccgagtcgggcggcgactgaaaaaagcctagggagagtgatagatgacgaacgcacgcacgggcctgggtattttagatgggctttggtttgtcttgttcgggcccgattgttgcctggtgtatccgtacgagtagttgtaactagttaaccagagccactcccttgcctgcaaaagaaagaccagggaagaggaattagtaggctccaagattgtattagctgttaagattatatacgctagtagcaaggttaactgtgctacgtcgtctgcgtgacatgtttttgcaagtgcatgacgctttatgagtatgttatgtgactctctgtagctgcacactgacacaaaacgagctacgcacgaaaggagccgtaggtcacatgt

SEQ ID NO: 129010 - DNA, 1546 bp, Zea Mays
gtcgcgcacacctcagtctcctgccgtgcgtagtgtgtacgggccaggcggcagagctagctttcactacactcagtggccattgccgttgctagctttcactagctcttagctgcaatgtcggcggcggcgtcgcagagcagtgtcaaggcaatggcggcggccgcagccgctgtggcaatgctgctctcggccgcggcggcggtggccgcgcagcacgattacggcgacgccctgcacaagtgcatcctcttcttcgaggggcagcgctcggggaggctcccgccggaccagcgcctccgctggcgccgcgactccggcctccacgacggcgccgcggccggggtggatctgaccggagggtactacgacgccggcgacaacgtgaagttcgggttcccgatggcgttcacggcgacgctcatgtcgtggggcctgatcgacttcgggcgcagcttcggcccccacagggaggaggcccggaaggcggtgcggtgggcgacggactacctgatgaaggcgacggcgaagcggaacacggtgtacgtgcaggtgggcgacgcgttccgcgaccacgcgtgctgggagcggcccgaggacatggacaccccgcgcaccgtgtacaaggtggacccgtcccacccgggctccgacgtcgccgccgagaccgccgccgcgctcgccgccggctccatcgtcttccgcgacgccgaccccgcctactccaagcgcctcctcgaccgcgccgtcgccgtgttcgagttcgcggacaagtaccggggcccctacagcagcagcctccacgcggcggtgtgcccctgctactgcgactactccggataccaggacgagctgctgtggggcgcggcgtggctgcacaaggcgacgcggcggcgggagtaccgcgagtacatcaagaggaacgaggtggtgctcggcgccagcgacgccatcaacgagttcggctgggacaacaagcacgccggcatcaacgtcctcatctcaaaggtccatccatccatatcgcctcttggtctttttctgcgcaaacattagtcattgccttgccacgttaatgacttgttactacgcttaagtcagtactacggagacggagtgccgcaaatttgggctgttcgctgatgtcagaagcattggccacatccaaatcttttgctattattagaccgtcaccagcactggtcagcttggtgttaagaccggacagtatgcctttttattttggccgtttcttccatacctacgctgcaaaatctctgttgcgtaccgggcaacaggcgagagcacatggttggccacttggccttcgcccccatcgagggtgtcatcagcttttcggtgggctcggggcatgtcagcctccgcacgtccttgcctactttggcaatattatgttatcgaaacctcgaacacattattttatctcagcactagaatgtctagcggactttcggcatttttgcatcctttgctccaaacttatcttctataaactaaactttgaagctctacccactaaagctag

SEQ ID NO: 129011 - DNA, 1019 bp, Zea Mays
atcctcctaggcccttgtgcttcgcatgatgccgcacacgccgcacggtagagtagcagcaggggttcccagcgaagaagccttcttcacgggtgtactgaggttctgatggggaaggacgagtacttccagtccttccgtgtcaacgccgacaacttcatgtgcaccctcctccccggcatctccaatcacccccagatccagtactccccaggcgggctgctgttcaaggtcgggagcagcaacatgcagcacgtgacgcagctgtcgttcctcctgctggcctactccaactacctgagccacgccggcgggcgcgtctcgtgcggctcgtcgtcggcgtcgccggtgcagctccgccgcgtggccaagcggcaggtggactacatactgggcgacaacccgctgcggatgtcgtacatggtggggtacggcgcgcggttcccgcggcggatccaccaccgcgccagctcgctgccgtccgtggcggcgcacccggcgcggatcggctgcaaggccggcgccgcctactacaccagcccggcgcccaacccgaacctgctcgtgggcgccgtcgtgggcgggcccaccgacgactccgacgccttccccgacgcgcgcgccgtgttccagcagtccgagcccaccacgtacatcaacgcgccgctcatgggcctcctcgcctacttctcggcacatcccaacccagccgagtcgggcggcgactgaaaaaagcctagggagagtgatagatgacgaacgcacgcacgggcctgggtattttagatgggctttggtttgtcttgttcgggcccgattgttgcctggtgtatccgtacgagtagttgtaactagttaaccagagccactcccttgcctgcaaaagaaagaccagggaagaggaattagtaggctccaagattgtattagctgttaagattatatacgctagtagcaaggttaactgtgctacgtcgtctgcgtgacatgtttttgcaagtgcatgacgctttatgagt

SEQ ID NO: 129012 - DNA, 220 bp, Zea Mays
atgctgcttggacaattggtatatcttgctgcatgcttatgcaatcttttggtgattgatatgttgctgcatggctgcatgttgttggcctgttggctgttgctatcttatattggttctggcgctgtgccgcaccacttattttatcaggcactccttgtggactcaattagtctgagttctccttggtccgatttaaaccaaaaacaaaataaaaaaa

SEQ ID NO: 129013 - DNA, 89 bp, Zea Mays
aaaccaaccacaggaacactttgattctttggggaatatgctgacgaaggacgtctgtgacgaccatgaagaggtagggcgaaatgggg

SEQ ID NO: 129014 - DNA, 1030 bp, Zea Mays
acgctataaaatcccttgatccccagcctccatggccgcaaaaccagcagctgcggcatcatcgttccaccttactctccaggctccagctccgaccccggcgagccgctagagcaacgagaacgaatcagctagtagccgcccgcgtatctccatcatggccgtgctggtcgcgaggcaggggcgggagctgcagcggtacagccagagcaccggcgggcgcatcgtggtgggctgcatcccgtaccgcgtgcggtgcgacggcgagctggaggtgctggcgatcacgtcccagaaggggcacggcatgatgttccccaagggcgggtgggaggtggacgagtccatggacgaggccgcccggcgcgaggccctggaggaggccggcgtcctcggcgacaccgagccggtcctcggcctctggcactacaagagccgccgctacgtggaccagacctacgaggggttcatgttcccgctccgcgtcgccgacgagctccaccagtggcccgagatggcgtcccgcaagcgcacctgggcaacggtgcagcaggtgatggacgggtgcccgcactggtggatgcgcgaggcgctggagcggctcgtcgcgcgccacgccgtgcccgtgctgcagtctgctctctgaacgattgggcggagaggaggtcgcgcgcggcggctccggcaagaaaggaccggcggcagcgcgagccaccacggtagcgcgtgctctccctctctcggtaaagcggcaggccggccggcccggcgttcgcgggctcggatttgggtcgccctcaccggagagtcgacgtcgcaccgcgcggcttgtgctctggcggtgctgctttcttcttgaccccctctcgaggcgcggagtcgtcgttggcaaataaaatcaaactgttgtttttagcgggcaagcgattggacgaaatgtaaaaagaacgaaacaagaacagcagcgcgaaaaaaaaacaattcacgattctttcgagtaaatgcaaaaagaaaattgtaaattagtagc

SEQ ID NO: 129015 - DNA, 255 bp, Zea Mays
gagccgggaataggaacccgcaccgtggcagaaaaccgacctgtcgatccggtcccgagcagcgagcgacggctcctgagcccccccgctcgccgtggcagcgccccatcacgcagctgtgcgcatgtgcggtgcggctgtcagcctgtgtcctgtgctccgcgacgtcgctctcggctctcgctgatttttttccccccgaagcctggcccgccgataagaacgggcgggggcatgtgcgcccgcgtttcgctg

SEQ ID NO: 129016 - DNA, 1023 bp, Zea Mays
atgtttagtacatgccaaaacttgtccagctaagctaaccttatttggcccggcgcgggagcccgtcctataactgaataacccgatcgaggcgcgcaaggcacacctccgattcaggacgagcggccggccagccagcgcgcgagaggacgtacggacgcacagctaggcggaggcgatggacggccgacgacgacggcaatggccgaggtcgcgctcgggagcggccgccgcgcgtctcctcctcctgctgctcctggcggtgtccttggaaggtgggcatggtgatcacggcgcggcggctgcgggcgtcgccccggcaggcggcaacggcatgacggagctgcagaagcacgtggcgttcttcgaccgcaaccacgacggcatcatcaccttcgacgagacctaccaaggtctgcaggacgtcggagttggcgatgtcacggccaaagccagcgccgcgttcattaacggcgccctcgggcccaagaccagacctgacaattccaactcctcgcgcatggatatctacgtagagaacattcagaagggcaaacatggaagcgacacaggcgcctacgacgctcaaggaaggttcgttcccgcgaagctggacgagatgttcaccaagcacgccaagaccgtaccgaacgccctgacgaaagacgagctcgacgagatgctcaaggataaccgggagaagatggacgtcgcaggatggctgggagccaagtcggagtgggagatgctgtacaagctggccaaggacaaggacggccgcctgcccaaggacaccgtcagggccgtgtacgacggatccctcttttaccagctggcggcgcaggcgaagaagggctgattcgtttacgttaatttcagtaatcaataacaagcaacgtttttttttttgtcgtttctgaatgcttgcctgtgtggctgtgtaagaaagcgagtgggtcggactcaatggcaggcaacggttttgttttttttattattattttaacggatcggttctactaa

SEQ ID NO: 129017 - DNA, 1020 bp, Zea Mays
atgtttagtacatgccaaaacttgtccagctaagctaaccttatttggcccggcgcgggagcccgtcctataactgaataacccgatcgaggcgcgcaaggcacacctccgattcaggacgagcggccggccagccagcgcgcgagaggacgtacggacgcacagctaggcggaggcgatggacggccgacgacgacggcaatggccgaggtcgcgctcgggagcggccgccgcgcgtctcctcctcctgctgctcctggcggtgtccttgggtgggcatggtgatcacggcgcggcggctgcgggcgtcgccccggcaggcggcaacggcatgacggagctgcagaagcacgtggcgttcttcgaccgcaaccacgacggcatcatcaccttcgacgagacctaccaaggtctgcaggacgtcggagttggcgatgtcacggccaaagccagcgccgcgttcattaacggcgccctcgggcccaagaccagacctgacaattccaactcctcgcgcatggatatctacgtagagaacattcagaagggcaaacatggaagcgacacaggcgcctacgacgctcaaggaaggttcgttcccgcgaagctggacgagatgttcaccaagcacgccaagaccgtaccgaacgccctgacgaaagacgagctcgacgagatgctcaaggataaccgggagaagatggacgtcgcaggatggctgggagccaagtcggagtgggagatgctgtacaagctggccaaggacaaggacggccgcctgcccaaggacaccgtcagggccgtgtacgacggatccctcttttaccagctggcggcgcaggcgaagaagggctgattcgtttacgttaatttcagtaatcaataacaagcaacgtttttttttttgtcgtttctgaatgcttgcctgtgtggctgtgtaagaaagcgagtgggtcggactcaatggcaggcaacggttttgttttttttattattattttaacggatcggttctactaa

SEQ ID NO: 129018 - DNA, 81 bp, Zea Mays
catttattcgaatatatgtgtaccactaacacaacaacactgctccactgatcctagttctcaagtttatcgagtcttttc

SEQ ID NO: 129019 - DNA, 1187 bp, Zea Mays
gatcgaaccgtttggctggtggggcgcgagcgcgaggtgacgacggcgacgcttcagttgagtgcgggtgtagtgctcctgcgacttcggcctgtccactttttagggggtgccgaggggcgtgggggtacggccgtccgcacaataatctgcgctgcgcggaagaagggaaggggaaaagcagttaagcttgagcgcgcgcgacagggtcaagtcgagggccggggaatcgccggagaatggaggtgggcagggctccgcgacgacgggtgtccccagcggcggcggcggcggctgtgccttcgctgcttctgttcgccgttctattcgcgggccgggcggcggcgttcggccacctgcaaggcgccggcgcgacggcgctgtacaagcacgcgtcgttcttcgaccgcgatggcgacggcgtcgtctccttctcggagacgtacggcgcgtttcgggcactcgggtttggattcggcctgtccagcgtcagcgctgccctcatcaatggcgcccttggtagcaagtgcagacctcaaaatgcaacgtcatcgaagttggatatctacatagaggacatccagaaagggaaacatggaagcgattcagggtcatacgacgccgaaggaaggtttgttcctgacaagttcgaagagatattcgccaagcacgccaagactgtcccagacgccctgacgtcggacgagatcgaccagctgctgcaggcgaacagagagcccggggactacagcggatgggctggcgctgaagcggagtggaagaccctctacagcctcggcaaggacaaggacggcctcctccgcaaggacgtcgcgagaagcgtctacgacgggacactgttccacatgctcgcgcccaactggaaatctcccgacgaggaggaggaacaggaactaagcgtgatccgggagagctgaaccgagaggtacaagcaaagtctggttgagagataaggactctgggaccctctgaacatgctgtcaagcaacatgtactactagcggtgtgaacgggtggtgtgaacactcttttcatatcacatcataaaaaaaggtgtgaacagatatttcaatgtacattatcataaaataagataaattcataattcaaataaaaatattctgtgtcttaccaaaacaaacgagatacaaaacaactaaaagaaa

SEQ ID NO: 129020 - DNA, 1309 bp, Zea Mays
gatcgaaccgtttggctggtggggcgcgagcgcgaggtgacgacggcgacgcttcagttgagtgcgggtgtagtgctcctgcgacttcggcctgtccactttttagggggtgccgaggggcgtgggggtacggccgtccgcacaataatctgcgctgcgcggaagaagggaaggggaaaagcagttaagcttgagcgcgcgcgacagggtcaagtcgagggccggggaatcgccggagaatggaggtgggcagggctccgcgacgacgggtgtccccagcggcggcggcggcggctgtgccttcgctgcttctgttcgccgttctattcggttagtcgctctgcctccgccggtggcggtgcatctgctttgcgctgtcgcatctgaccatcttggctttactccgcgactctccttgctgaatccgtgcgctccttcctggctccgtgaagcgggccgggcggcggcgttcggccacctgcaaggcgccggcgcgacggcgctgtacaagcacgcgtcgttcttcgaccgcgatggcgacggcgtcgtctccttctcggagacgtacggcgcgtttcgggcactcgggtttggattcggcctgtccagcgtcagcgctgccctcatcaatggcgcccttggtagcaagtgcagacctcaaaatgcaacgtcatcgaagttggatatctacatagaggacatccagaaagggaaacatggaagcgattcagggtcatacgacgccgaaggaaggtttgttcctgacaagttcgaagagatattcgccaagcacgccaagactgtcccagacgccctgacgtcggacgagatcgaccagctgctgcaggcgaacagagagcccggggactacagcggatgggctggcgctgaagcggagtggaagaccctctacagcctcggcaaggacaaggacggcctcctccgcaaggacgtcgcgagaagcgtctacgacgggacactgttccacatgctcgcgcccaactggaaatctcccgacgaggaggaggaacaggaactaagcgtgatccgggagagctgaaccgagaggtacaagcaaagtctggttgagagataaggactctgggaccctctgaacatgctgtcaagcaacatgtactactagcggtgtgaacgggtggtgtgaacactcttttcatatcacatcataaaaaaaggtgtgaacagatatttcaatgtacattatcataaaataagataaattcataattcaaataaaaatattctgtgtcttaccaaaacaaacgagatacaaaacaactaaaagaaa

SEQ ID NO: 129021 - DNA, 3364 bp, Zea Mays
ggaggtttggtttccctcgtggccccgtcgccacctcgccaaggctagggacggaacggaacgccgcccagaggctcctctgcctactcgaaggcctgggaggcaagggatcatcgatacaccatcctgagccaagagccctctgttgcctgatgtgcgcgctttcataagctcctagtttgactccaaagttggaaattgctggcagcttcagccaagtggtagttgattggaagctgaactgttggttcatgtaacagtagattgcaacgcgggttgcaagttcacggaccaacaagcagttacttagctattgggagttcatttgactcttctgcgataacacagtgagagatggacgggttcatggcaagtgcagcgacaggggtgatgagctcccttctcgccaagctcgctgagctgcttggggaggactacaagatgcagaggggcatgaggcgcgagatcgcgttcctcaaggatgagctgggcagcatgaacgcgctgctggagaggctagccggctcggaggcgctcgatccgcagaccaaggagtggagggaccaggtgagggagatgagctacgacatcgaggactgtgtcgatggttacatgcgtcagctgcagcacgagccgcagaggaacagtggaatcacgggattcttccttgggtatgtgcagaaggtgaaggatctcgttacccgtcacgagattgccgagcagattcaggagctcaaggctcggatcgttgaggctagccacagaaggaagaggtacaagattgatgacacagctaattctggtgccgccaatgtgatccctgtggaccgtcggttgccagcgctctatgcagaattgggtagccttgttggtagcgatgttcctagagatgagattatcaagctacttgatgatggggcgctggccgtaaaggtggtgtctattgtgggctgtggaggactgggaaagactactgtcgtgaatcaggtttacataaacatcgccgagaaatttgattgccaagcctctgtgtccttgtcccaaaatcctgatatggtgaacatattccggtcgatactgtctcaagtcaagaaagatgagtgtggtagcaccagctcatgtgacaaggaacttctcatcaatgaattgagggatttccttaaggacaagaggtattttattgtaattgatgacatatggagtacccaagcatggaagacaattaaatttgctttggttgagaatacttgcggcagtagagtaatagtgacaacaagaattggtactattgccaaatcttgttcatccccattccatcatctcgtatatgaattgaggatgctaggtgaagatgactccaaaaggctattctttagaagaatttttggctctgaggacaagtgccctcaccatttaaaagaggtttcagttgaaataattaagaagtgtggtggtttaccattggcaatcattactatggctagtttgttgactactaaatcatataccagagctgactggttgaaggtttctaattcaattggatctgggctagagaaaaattgtgatgtggaggaaatgaacatgatattatctctgagttacaatcaccttcctcatcatttaaagacttgtttattgtatctaagtatgtttcctgaagattatgtgatcaagagggattatttggtaagaaggtgggtagcagaaggatttgttagtgcacatggtagaagaaatctggacgatgaaggcgaatgctattttaatgaacttatcaacagaagcttaatacaaccggtagattttcagtatgatggtagagtatatgcatgccgggttcatgatatgattcttgatctgattacatgcaaggctgttgaagaaaatttcataactgttgttactaatagaaaacaaatgttgccctcacatggcaaggtccaccgactgtcacttgagtaccatggtcttgaaaccttaagaacaaatcccatttttactactcatgttcggtccctgaacatatttagatactctgaagaaatgcttcctctttcaggcttgcactccctaagagtgcttgatctagatggcaatgagaatttggaaagctgttaccttgaagatatagggaagttatatcagttgcgatacctacggattaaggcaagtaatattacacttctggaaaggatagaagagcttcagtgtttggtaatactggatcttctgaattgccctaatctaggtgaattgcctagaagtattgttcaacttcggaacttgaaatggttaactgttcatcgagcgaacttgccagatggagttgggaacatgcaagcgctagagtttctttcacttgtagttgtggactacactacctcaacaaacttattggaagagctgggcagcttgaccaaattgagaactcttaggttggattggcgcatcaaccccctgcacagggataaaaaaacatatgagggtaattttgtttcttcacttggcaaactaggcagttcaaacctttcgatacctaacactcatcagtccatggtcactcgacttcctgttggaaccttggtccccaactccacatttccttcaggagttagtgatcaaaggatggcatctcaacaatattccagtctggatggcctcgctaaccaacctcacctacctggacgttgaggttaaagttagacaagaaactctccagatcctcggagatttccctgccttacaattcctgaaggtgtcctcaaatgcagcaggatctgaggcaatgtgccttgtcgtcagcaacgatggattccgatgtctgaagaagttcagtttcgttggctgggtaaacatgatgttcaaagaaggagctgttccagcgcttgaaactcttgagtttcaaatcatagcgcacgagatgcatactgcacgcagatttggtcctcctgatttcggcatcagccacctctccaccctcaggaatctcgtcgtcaatgttcactgtgaaggttcaagggttaaagaggtggaggcagtagaggctgctatccagaagtcagccagtacgcttcctaattatcccacactaggtttgcacagatttctcgagtcagaactggtaaaagaatgacgttaatggagaagcggcagagccatgagggaggacaagaaacagctaataagccttgtctagttctgctcccaagtgccttaaggtatggactatggagtaatgagtacttagctctatttgcagttcttatgcaagtcattggttatataatatacccaggatttgttttttatgtactgccttcaatcttcatgatgcaacaaatgcccactgtctaaagcttga

SEQ ID NO: 129022 - DNA, 673 bp, Zea Mays
ctcgaattctcccgcaaacttgacgctgaagcctgcacgagaggacatggccatggccacgcccacgcgtgtcacggcagcagcagtcgtcctccgggttctctcgttgctgatcctgctgcgcacgggcacgtgcgccgacgactactcggcgttcgtgtacgcggggtgctcgcagggccgctacagcgccgattcgcagtacgcgtcgggggtggactccgtgctcacctcggtcgccagcagcgcgccgtacgccccctacgacaacttcacctcgccgaccgactcgtccgtggtcggcctctaccagtgccgctccgacctccccgcctccgtctgcagcggctgcgtccgctccgccatctccaggctctcctctctctgcgcctgggcggtcggcggcgcggtgcagctgcgggcctgcttcgtgcgatacgggaacgactcgttcctggggaagcaggacacggcggtgctgttcaagaaatgcggcggcacgcccggggacgccggcggggtggccatgagggactcggcgctcggcgcgctcgtggccgcggcggcgccggcgggcggagggttccgcaccggagggtccggcgccgtgcaggccatgtcgcagtgcgtgggggacctcggcgccaagccctgctccgactgcgtctcggcc

SEQ ID NO: 129023 - DNA, 172 bp, Zea Mays
cagtttttgctcttgtgctcaaactcaaatggtgttcatgtagcttaactctgtctctttctttctcaagtcttataactgtaaatttcttacgtcgtatgcatgcaaactatgctaaatcatgtataagtaatctttttactacagcttaccaccattattaatcttatga

SEQ ID NO: 129024 - DNA, 987 bp, Zea Mays
catcccacgcaacaccttagcgacccaccgccctcctctccgctcccctcggtaaagccgaaatccctcccccacatcgcacggcgtacccgatctccaaatcgccccccttcccaaaccctcttcttcccccttcccgtgctcgacccagatcgagggctcgatccgtcggccatggcgctggagtgggtggtgctgggctacgcggcgggcgcggaggcgatcatgctgctgctgctgacgctgccggggctggacggcctgcgccggggcatgatctccgtggtgcggagcgcgctgaagcccatgatgtcggtggtgcccttctgcctcttcctgctcatggacatctactggaagtacgagacgcgccccacctgcgacgacgagcacgcctgcaccccctccgagcacctccgccaccagaagtccatcatgaagtcgcagcggaacgcgctcctcatcgccgccgcgctgctcctctactggatcctcttctccgtcacccagctcgtcgtcaggctcgagcagatgcagcagcgcgtcgacaagctcaggaagcgcgacgactgatggatccgcatccatccggtgggctcgttcttcctctgcctgccttgtgttcctgctttatgttgtggtgctgatgttttagatctcggatcgtaatttgagacctgctggtagcatctgcttcctttgccttgccgtcttcagataaaaaagaacagcgctcttggaaacgatgataatgtttaggatgtttggacgaatggtatctgtcgtaattgatgtcttcatccatgaattggttggtgtcactgaatgtacactgagatattggttaatagctactagtgctgtttttatcatgtgattatgcccatgctgtaatgagttagttcttgtttgtaataagatgacattagaggtcggattttatatcttgcctaaaaataagctccgaattggaagctagttgttctt

SEQ ID NO: 129025 - DNA, 2330 bp, Zea Mays
gcaagtgctagagagtgccaggcgacacggttcgctcggcggcggcgccatctggcagcttctgcaaaactgaagtgcccattccagccctcccgtagcgatcgacctctgaactacgcagcggaaaaatcccatcaaaaaacaaggggaaaaaacaacacagcatgaactgcttgaagaactcgcgttctgtcctctcgcgactccttcgccacaggccccacgtagcagcgccaccgccgccgacgccggcgacggcgccgcagtcaccggcttcacggtactactactacgcctcccgcgtcaagccagccgtctcccgaccgccgccgccgccccagttgccgagatctaggcactactacacatccccgcggcggcagcaggtcgtccacttcaaccgccgccgcggcgggtcccggtggtaccacgaccagcggaagctcacggcggcggtcttaatcagcggcggcggggcggtcgcgttctacttcggccatttggagaccgtgccctacaccaaccgctcccacctcgtcgtcctctcgccgaagttcgagcgccagctcggcgagtcccagtttgcccagctcaagaaggagttcgggcccaagatcctgccaccgctccaccccgacagcatccgtgtccgcctcatcgcctcggagatcgtccgcgccgtccaccgtggcatctccgtccaacagcgccacgacgccttctacggagaggacgcctcgtatgggtatggcggcatcgccgacgacctctccatcaagaaccgcgacgccgacgctgctgcagcgctgcttggtgcttcccccggcaagaacgccagtgctgccgtggccgctcagcgagatgacgagctcctggatgacaggtgggtgaccgagagtcggagccgaggtaaggcacgtggggcgcaaccgcagacgggtcacctggacggggttaactgggaggtgatcgttgtcaaagatgacctcgtcaatgcattttgcctgcctggtggcaagattgtagtcttcactggattgcttaacaacttcagggccgatgctgaggttgccactgttgttgggcatgaggttgggcatgctattgcgaggcactccgctgagcagatcactaagaacctctgggtggcaatcctgcagattgtcatcctgcagtttatttacatgccggacttgataaatacggtgtcaacactactactcaggctacccttctcacgaagaatggagatagaggctgaccacatcgggctcctgctgctcgcttctgctggttacgatccgcgtgtcgccccttcggtctatgagaagctaggaaagatcggaggagattcagcactgaataactacctctcgactcacccgtccagcaagaagagggcgcagcttctgtcgcaggccagtgtcatgaacgaggcgctgaaactgtatagggaggttagtgccggccaaggcaccgaaggtttcctctagattctgggacctgctcctctgcttgtttcaaacgcctcacaaagaggttggtggtcttgttagctgcagtagtgacggcctgtggcatcggcgttctgagtggttcagaagcctggaagattaaactaagctatttgctcctcgttatttccagtcgttctgatgtcgaacggggccctcgtcgcttcccctagcagacgcaggatagctgtttctgcatttgtcattaggaaaaaaaagaaattaagcaccgtattattgtcaataattgttggttgacaccagctcctgtttcaagtgtggttttgctctattcatgctgacgcctcaaatgtccgtccatgataaaaaaaaatcttgagcattatttcgtacgcagatatgacatctagtcaggattctaaatattcgccagtcgtaaatgacaaacaatatctcagctttgcttccatcagcagcaacaacatattatagagcaaggactggttggtattatctctgctcttgaatatttgtcatctattaatttatttttaaactaaaacatggtaaacaaaaaagaaattagagagtatttggtcctgacagcgtcatgactcacgagtgattagaccgcagcctgcttgtgtcgcttccgccggatttttgtctcatcggaggcgcggatcgatacgaatatgcagtgccatatacaattgcgctccacggaaacggagtagtttaatagtgagatttatcgatgacccagggctacaaggcaaggcagtgagccgtgatttgttgctttctgtcatgccggccaatcagccctttccggcagcaaaaggatggctggcc

SEQ ID NO: 129026 - DNA, 2035 bp, Zea Mays
agcgatcgacctctgaactacgcagcggaaaaatcccatcaaaaaacaaggggaaaaaacaacacagcatgaactgcttgaagaactcgcgttctgtcctctcgcgactccttcgccacaggccccacgtagcagcgccaccgccgccgacgccggcgacggcgccgcagtcaccggcttcacggtactactactacgcctcccgcgtcaagccagccgtctcccgaccgccgccgccgccccagttgccgagatctaggcactactacacatccccgcggcggcagcaggtcgtccacttcaaccgccgccgcggcgggtcccggtggtaccacgaccagcggaagctcacggcggcggtcttaatcagcggcggcggggcggtcgcgttctacttcggccatttggagaccgtgccctacaccaaccgctcccacctcgtcgtcctctcgccgaagttcgagcgccagctcggcgagtcccagtttgcccagctcaagaaggagttcgggcccaagatcctgccaccgctccaccccgacagcatccgtgtccgcctcatcgcctcggagatcgtccgcgccgtccaccgtggcatctccgtccaacagcgccacgacgccttctacggagaggacgcctcgtatgggtatggcggcatcgccgacgacctctccatcaagaaccgcgacgccgacgctgctgcagcgctgcttggtgcttcccccggcaagaacgccagtgctgccgtggccgctcagcgagatgacgagctcctggatgacaggtgggtgaccgagagtcggagccgaggtaaggcacgtggggcgcaaccgcagacgggtcacctggacggggttaactgggaggtgatcgttgtcaaagatgacctcgtcaatgcattttgcctgcctggtggcaagattgtagtcttcactggattgcttaacaacttcagggccgatgctgaggttgccactgttgttgggcatgaggttgggcatgctattgcgaggcactccgctgagcagatcactaagaacctctgggtggcaatcctgcagattgtcatcctgcagtttatttacatgccggacttgataaatacggtgtcaacactactactcaggctacccttctcacgaaggattgaagttgatcgagacatgccaagtagagaggagtgctgagtgcatcatggtatacttagccttgtggaggaggctcagcatcatgttatactgagatgccaattgcatcaagttatacttggacggtggtgaattggaaccttttatgaagaacccaggcccagcatataaaagccttgtccatttctgctattacagagtcttgattttgacttcatgtgtcatatccatctatctacattgttgcctgctggaagcccttctgacatttttccgaccgccctgcagaatggagatagaggctgaccacatcgggctcctgctgctcgcttctgctggttacgatccgcgtgtcgccccttcggtctatgagaagctaggaaagatcggaggagattcagcactgaataactacctctcgactcacccgtccagcaagaagagggcgcagcttctgtcgcaggccagtgtcatgaacgaggcgctgaaactgtatagggaggttagtgccggccaaggcaccgaaggtttcctctagattctgggacctgctcctctgcttgtttcaaacgcctcacaaagaggttggtggtcttgttagctgcagtagtgacggcctgtggcatcggcgttctgagtggttcagaagcctggaagattaaactaagctatttgctcctcgttatttccagtcgttctgatgtcgaacggggccctcgtcgcttcccctagcagacgcaggatagctgtttctgcatttgtcattaggaaaaaaaagaaattaagcaccgtattattgtcaataattgttggttgacaccagctcctgtttcaagtgtggttttgctctattcatgctgacgcctcaaatgtccgtccatgat

SEQ ID NO: 129027 - DNA, 2538 bp, Zea Mays
atgtgtatctctgtgccgtataaacgagattgaagcctaagggagtatgacttacaatctgttcccaaagtataggttcgacatcaatttagcttgattaaattctccaggagcacgtcttgattaaaactaaccaaactagagaacttaaaagggtggcatatattagtctaaacaccaatcgttcaacagcacaaatggtagcacttgttcgatgatgagaacaccgaacgcttcagtatttgcatccgagaaccaaagccgtgattcgcgtctgaaattctgaatctgttttttgctcgattggcaagacacaggtgcgttccgcctcgcgtcagtctcgctgcaacaaaccaaggtgggagtgcgacggtgcgaggccccatggaatgcaatggaaagcaccgggtgcccgtcccgtcccgtccggggtgctctcctctccctcttgctccctgccgcgtgccgctcctttcactttctgccgctggtattcttctacggagaaaaggagtggcaaaggatctcacagccgccaaggaaagcaaagcaaaaccgagtccacatcggtccaggtccacttgaccactaccgcggcgaccgcactccgcaccaccaatcaatcaggcgctggagtgacagcggcggcaacaccacgcccacgcggctgccggagccgaccccccgatggatctcccgccgctctcccaccaagcgctcttcgccgccgtccgatccgccgacgcggccgccgtccgcgcgctcctggccgacgccgaggcgtcgggcacctccctggccgcgctcgccgccgcgcagacggacgcgggggagaccgcgctgtacgtcgccgcggaggccggcagcgaggagaccgtgagcctcctcctcccgctctacgacctcgaggccgccaccgtccgctcacgcctcgatctcgacgccttccatgtcgccgccaagcagggccacaccggggttgtgaaagagtttttggggcggtggccagggctttgctcagtctgtgactcttccaacactagccccctctactccgctgctgtcaaggatcacttggatgtggtaaatgctatactggacactgatgatagctgcataaggattgtgcggaaaaacgggaagacatccctacatactgctgcaaggattggataccatcgtattgtcaaggcactcatagagagggatccaggaattgttccgatcaaggataggaagggacaaactgcacttcacatggctgtgaaaggcaagaacacagatgtagtggaagagttactgatggctgatgtttccattctcaatgtgcgggacaagaagggaaatactgctttgcacatagctacacggaaatggaggccccagatggtacagcttcttcttagctacgaatcacttgaaattaatgctatcaatattcaaaatgaaacagctatggatttggctgacaaagttccttatggtgagtctaaaacggaaataatagagtggttgacagaggctggtgcaaagaatgccagaaatgtggggaaaattgatgaggcatcagaactgaggagaactgtgagtgatatcaagcacaatgttcaggcacagcttagcgagaatgctaagaccaataaacgagtgactgggattcgcaaagaattgcagaaactgcatagagaagctattcagaacaccatcaattcagtcaccatggtagcaaccctgattgcctccattgccttcgttgccatattcaatttgccaggtcaatacttccaagatgtgaatagcgggggagacattggtgaggctcaaatagccaagcttactggttttcgtgtcttctgccttctgaatgcaactgctctcttcatttccctcgcggtggtcgtcgtgcagatcaccttggttgcctgggaaactggtgcccagaagcaagttatcaagatcgtaaataagctcatgtggaccgcatgccttagcacaggtgcggcttttatctcactggcatatgttgtagttggcccgcagcatgcctggatggccttcacagtatcagccatcggaggtccgatcatgattggaaccctcctgttcctagcctatctgttgttgcgcccacggttcaagtttggcgaagacagacagcgccgcatcaagagggcaagcggcagcaagtccttctcctggtcactccatgatggtttttcagatctggaagccttctctgatcatgagaagaagatatatgccctgtaggaaggtgtaacagtaattactcttgcatgagaagaggcaattgggagagtgcaaatggttcgtgtatatatttggtttagctgttttaaccttttaggtctgtggtgagccgcagttggaccttctcgtgtactatatctaagaatgaagagctgcacctattatgaagtgcaagtatatgaccaaaagttactcgtgtactgagcatgcttgaaactgttgccgcttgtgaattggctacacgttgtatcgtatcattattccccttct

SEQ ID NO: 129028 - DNA, 270 bp, Zea Mays
atggcgaacgacgagcaactgccgctgcagtgggcgaaggcggcggtggtacctccaaatcgacgtccatgggggccgatgcagacgatcccgcgtcaaacaccgacgctggtggcgacggggatgcagtggggagtccacactccaccaccggcagcggaaccaccgctgtccatccatggagaacgcagaagtgcacattttgcacttgcacacggcgttcagggatctcgtgcaccggtgggagtgcagtggcttgcccaacggtga

SEQ ID NO: 129029 - DNA, 2380 bp, Zea Mays
gaacacacacaccgtttgtgagcaagacaagacaaatcgctagtggaggagcaacgcgctcaccgcctagcagcaagacacctccgctaggtttttccgccgctgaccggggcattgcggaggcagcaagccacgctacagcgcggcggaacgggagctcggcggcggcggagcgccagtccgggtggcggcggctgatttggatggtgggttgcccagctggggttcagatctgaagatggccgacggcgggggcgaagaggggaatgcttcggcgcacaagggctccgcgcgccgccggggcccggtgcaggcgggcctggacgcggacgacctcctcactctcatgcacggctcggatcccgtcaaggtcgagcttaaccggctcgagaacgaagtcagggataaggatagggagctgggcgaggcgcacgcggagataaaggcgctgcggctgtcggagagggcacgggagaaggcagtcgaggagctcactgctgaattagagaaggtggatgagaagctcaagttgacagagtctctccttgaaagcaaaaacctagaactgaagaaaacaaatgatgagaaaaaggctgctatggctgctcagtttgcggcggaagcaacactacgaagagtacatggagctcagaaagatgatgatatgccacctattgaagccatccttgcgccgcttgaagcagagttaaagctttgtaggaaggagattgcaaagcttcaagacgacaatagagctttggaccgtttaacaaagcaaaaggaggcagcactgctagaagcggaaaggactgtacaaatcgcaatggctaaagctgctatggttgatgacatgcaaaataagaaccaagagttgatgaagcaaattgaaatttgccaggaggaaaataagatcttggataggctgcaccgccaaaaagttgcggaagtggaaaagctgagtcaaactgtgagagagttggaagaggatgttctgcaaggtggtgcagctgccaatgtcgttagggattaccaacgaaaagttcaagaaatgaatgaagaaaagaaaattcgtgaccgtgaacttgctcgagctaaagttactgcaaatagggttgctgttgtggtcgcaaacgagtggaaagatgctaatgacaaagtaatgcctgttaaacagtggctggaagagcgaaggttcctgcagggtgagatgcagcagcttcgtgacaaacttgctattgcagagagaactgctcgatcggaagctcaattaaaggaaaagtatcagttgcgcttaaaagttttagaagatggcttgaggggcactccaagtggatcttgtcgtccttccatggaaggaaaatgtataagtaatggacctccccgtcgactttcactaggtggtgctgatagtatatccaaaatctctccaaacggtgtgttaatgaggaggtctccatctttcaattcaagatcccccctctctaccagcagttgtttggtcctgaagcatgcaggaagaacttcaaagtcatttgatggtggtaccaggtcattagaccagggaaaagttctggggagtggacctcattcactcaatagatctacggatgcagttagagattgtgagacagctgatagttggaaggctaatgcagaagaaaaaagtaatgaaaccgcaaacaatgattcagctgacatggtctctggtgtactctatgacgtgttgcaaaaggaggtggtttccttgagaaaggcatgccatgagaaagaccaaactctaaaggacaaagaagatgcaatggagatgctagcaaagaaagtagatacattacataaagcaaaggaagtggaggctaaaaagaagaggcaagagatagctgctttggagaaaaaatttgccgcggtgtgccttgaacaagaacggcttggtaatttgagaggacctggaacttctcagactgtttcgggaagaactgcatcacgaggtggattgacgcgcaacctccaatagcatacatctaacttcaggcaggcatggaattcgtccataggcttcatttccattgtatttgttcccgtgttcttattcgttttgtgatcaaatagcacagatgaccctgcgatacctagatggggggaaagagtaggttttcatctgacatgacttgcttgtagtgaaggtaaatccttcggtcggtgaggtttaaccttgcggcccgccctcattttgtggaggcagtgctgtagtggttgtataggttggacgagcctgtgcctttctataggtagggtgaggtactgtgtttgtgttgttgcatcttgcatgttcgggttgtgaatatatcattgtattctgctgtggtttctcctttccactcaa

SEQ ID NO: 129030 - DNA, 779 bp, Zea Mays
tttttttttgtttaaaatgtaacagtaataagagaaaaataaaatgtgtgcgtctgaagactgaacctgcctttatatcttgagctttgtatccctccctaatgactaattgactttgtcactacattgttgctgtagttgtgatatgcaccatggttgggagaactattcaggtccaaggttttgctctaactgacagtgccgaatctgtcaaattgtttttggagcgaattgctggtgctggaaccatctgtgctctcaagctcaggcatccaaggaacatctctgccaactcaagggcatttgctatagttcagttccagtcacaggaaagtgcttcattggtagagaatgcggctcaaagacaggttctcaagattggacggttttatctgagaaccagacctgcagaccgggacattgttccaagaccaaggattccaatgttttctctagaggacattgtgctgcatttgggatgcttggttaaggaaaatatcctatctgctctttttagagcaagtaatgtttcggttcaatttggatttgatatgaaaaagatctacttctacctctcctacaattttactaaatttaaacttgaactttcttacgaaagtatatgggagatgcagcttcaccgtccacctgcttataggtcacggacacagttccttttgattcaggttggtttctcatataatttacccttcttggacattttagcagattttaggctctacctttttaatcttctgaaaagatacataagtagatga

SEQ ID NO: 129031 - DNA, 2524 bp, Zea Mays
aaaatgtcttctaacatttctagatgcaaaatcatcaatgatggcttcaatattgacatcatctaataatttcttctcaatacataaagttgctagcccgtttaacttttcttgagacatttgtagaccttaaataattcttcaataacttaagctttgagaaagctgatgccacaattattggtatagtaaataatatccgataagcaacaaatatattgggatagtaatccattctcctaacgaactcaaaaatttccatagcaaacattgatctatctggcagtgtcatttgcaatattcttaactctgatgtcagattattttcctcaaaatcaaatgaatcatcaacagagagtttttgccaacatggtacaataatccctgagtttaatgtgatccaatgatttcaatgatgctgagttaagaagaggcccaaatataccattgaatacttggaggtcttcaaatctattttttaatgaactgcttgccatatcaagcataactaaaaaataatttacttcaaaatctttctcaccttgtagatttgcctcattgctgcaatcattttcatcataatgctttttccttagagcacgacgctttactggaaatgatgcctccacacccattacagaagcaatatccttggcaaccaccatactagaagcaaacccttcatttctatacttgtcaaagtaactcattataccatctatttgctctaaggtagagtgaagacacattgatgatgattgcaacttcttgctcacaacatttacagcatataaaatatcatgccatataaccataccaagaatgaactcaaaggtaccaatcaagtcatacaaactctttgcatcactctttgccatcggatcagtatcagaagcatgatgtaactcaaacaaagccgcccttatatgaggagcttgatatctaattgctgccacacttttgatacgactttcccaacgagtgttgcacaatgatttcacagttaaacttggcacatgatcaagtaaaactttccatctttttgtagaacctgaaaacaatgtatatattctttgcacaattccaaagaatgaaacagctttactacaagattttgccatatcacaaagagtaagattaagactgtgacaagcacatggcatataaaaagctcttggattcttatcaagcaaccgtttctgtactccttgatgctttcctttcatattagaaccattgtcataaccttgaccccttatgtcatcaatattaagaccaaatgactccaatgaatcaatcaaaacattgaaaagccccaaactagatgtgtcatccacctttagaaaacccagaaagtactcctcaacctcaattttgttgctagatatgttgacacatcgaactatcaaaggcatttgttcttcatgactaacatctttggagtacaatcgagaatgatagagaagtattttgcctctttaataatctttatgatagtattagtaatatcagaagccaaaaaaaatatcagctcattctgaattttattactaagataatggtaatgaatatcctttctttcaattcgcctaaggtgatcttgcattaccaaatcaaattctgcaaccatctcaacacaagccaagaaatttccattttgttcatttaaagatgattattggaccctcgaaacgctaaattgcgtttaccaagaaatttcacgatggcaactattctgaataaaacttgtctcatgtggtctttctcctttgtaatttgtcgttccaaatctttatcgattgtttcttgttttcttagtctatccctcaattcattccaactgttcataccagtaatgtgctcagcactattttcatgttctttcagtctctcactaatatgtttccaatctctatatccatcatgtgctaatgaacttgtgcaactatcagaattgaaaagtttacaacagaagcaaaacactctatcaacatgctttgactaaactaaccattttctgtcatgttcctcaccattgcttaattttctaaaataatgggaataggaaaaatgcctagagttgccatccattggaaagacaagattcttttctcttatcggtcccttctcgactaatgtatctcttgctttgttatcaagattattccaatttcttggatcatatatgtctatagtcactactggcggttcatcaacactagcagattatgtagcagttggatgagatatattatcatggtcacttacattatggtctgtaggtccttggtattctgaattcccaccaatttgttcgtccaccggctccacaagcactattgccaattcatttgtgtttctcggatctcccatatcccttttaagaaatttatccatggctcctttctgtgacaagacaaaatcctcagtgtgtttccttctttttcttttttggcttcctgatgcatattttctaggaggcatgatgtcaacaacaatctgcaagaaatcaataaaaataaat

SEQ ID NO: 129032 - DNA, 3402 bp, Zea Mays
aagcctgcacagttgggaacgcctgatttccctgtgcccgcgtatgcaggcaagaggccgctttttcactatttggggccagcatatgagagctattcgagcatccaaacaaccttgtttgcactaccagagactgttcacggagttgtgcagcgtaccaaacgcacccataaactcggtttttccatgttccaggttcaggcagctcctaaaatttataaactgctcccaggccgtccaggtcttatgtttgaggatcctttcttcaactggtttagggatgacacagatgaacaatggaccaggacaattgattttactccatcagctagcatcgggcaatcatctattttatgtctggaggtgccacaacagtgtgagcttccaagaattggcgactactttgtttactataaagagcagaatcttgactttgaatgtcggaatgggtattcatattcctgtggtagcaaccttgtaccaattgtgaaatctcctgattacatagaggtcccttatgagatactcttcaaaatcaaccatttggttcagaatgggacactcagtgggccaacagttgatcatagtttcttccgtcatgttagcccaaaatttgaacctattgatcatataaaacgagcacttttaaagatgacatatttgaaaagcacctgcttgaacccaacagattggttatctgtgcaatactccagaatacggaaatcacgccatgcatcacaaaagttatctaatatatctctggatgatggcttggtctatgtccacagggtgcaagttacccctgctaaagtgtatttttatggacctgagataaatgtctccaatcgcgttgtgcggcatttctctgcagacatagataacttccttcggatttcatttgttgatgaagactgtgagaagctccgttcagctgatttgtcacctcgatctacttctggaaatgatgcaaggagaactgctctgtataatagagttttgtcagtcctttcaaatggcatcaatattggtgacaagcactttgagtttcttgccttttcttcaagtcagcttcgagataactctgcatggatgtttgcttctcggcagggattgactgcgagcgacataaggaagtggatgggggactttcgagatatcagaaatgtggcaaagtatgctgcaagacttgggcaatctttcagttcctcaacagaaactttaaaagtacacaaatctgaggtggaacgaattcctgatattacaaatggcacaaagtacatattctctgatggagttggaaagatctcagctaattttgcagtggaggtggctatgaagtgcaaattgaaacgctttgctccttctgtttttcagataaggtatggcggttacaaaggtgttgtcgctgtagatacaagatcaaatcataagctttctttgagaaaaagcatgtcaaagttccagtcagaaaatatcactcttgatgtccttgcatacagcaagtaccaaccatgcttcctgaatcggcagttgattactcttctctcaacacttggggttagcgataatgtctttgagctaaagcagaaggaagccttaaggcagttgaacagaatggtaactgaaccacaggctgctcgtgaagcagttgaacttatgcccatgggagaagtaaccaatgtagttaaagaattgttgtcatgtggctaccagcctgatcatgagccatatctttccatgctgctacaaacttttagagcatccaagcttctagagttgaaaacaaagtcaaggatattcatcacacaggggcgagcaatgatgggttgcctggatgaaacctgcacacttaagtacggccaggtattcgtccaagcttcttacagtgcagatgaccatcgcaaggtcgttgtaactggaaaagtagttgtcgccaaaaatccttgtctccaccctggtgacatacgggttctccaggctgttgatgttcctgctctgcaccacttgtttgactgtgttgtctttccacagcagggaccaaggccgcaccctaacgagtgttcagggagtgatcttgatggggacatatattttgtttcttgggatccacatcttattccgagtcgtttggtggatcctatggactatactccagcttcagcagaaacattagaccatgatgtcactattgaggagatacaggagtacttcacaaactacatagttaatgagagtcttgggattatcgccaatgcgcatgtggtctttgcagatcaggaacgtatgaaggctgagagtccaccgtgcgttcaactggccaagctcttctctatagctgtcgatttcccaaagactggagtgccggctctgattccacatgagctacatgtcaaggagtatcctgacttcatggagaaactcgacaaagtcacctatgaatcaaagggtgtgatcgggaagctctatagggaaataaagaagcacacaccacacataaagcacttcacgagggaagtggcaaggcggtcttatgacaccgatttgattgttgatggctatgaagattacattactgaggctatagagttcaaggaagagtacgatttcaggctgggtaatcttatggaccactatggcataaaaagtgaagctgagataataagtggatgtattctaaagatggcaaagaatttcaccaagagtagtgatgctgatgcaattagaatggcggtgagatctttgaggaaagaagctaggtcgtggttcaatgagatgagcacaggagaggatggccaagatgccatggaggccaaggcctctgcttggtaccatgttacttatcatcagcagtactggggcagctacaatgaagggtatgatcggccgcatcttattagcttcccatggtgcgtatatgacaagcttgtggccatcaagcaggggaggaatctcctcacgcggatggatcgaaacttgaggttccgttgagcattgccagcaggtttgctcctgtacatatccctgatcgtttgcactcagcactgccagcaagtgtgcatgaacgatctgatgaattaagacgggcaaactgccgcaagctgacgctctggcctacgtgcgtcttgaaactttcggatgctgccgtctaactaaatgcatgttccttgatttccactgggaccttgagtttgaagtgtgtaaatatgctgcttatgatgtttttagtattggacctctatcaactgccgttctagttagtaacaatggttgccagtcatggattaccaggtttcgccgagctcctgtatggacgaccacgaaggtctatttcttccattaccaagtgcgaagtgtcacatctaacttgcgtagttgcattcaccttttttctcaaaaaaaaaa

SEQ ID NO: 129033 - DNA, 4064 bp, Zea Mays
atggaagatagtaatgccctgattttgccctgcaaaaggaagaacaaggcgcaagtgaaagccaaggatggtaagaaagccaagaaggaagacccaaagatgagcaagacgaagctcaaaaagctgcaaaaattggagctatgttggtttggttgcgtccaggaggaaaagaaaaagaagctgctacaagctaaaagcatcgaggttttgcagaagcacaagatctcagaggatgcatattcactgcttcatgcttcagggactattggtcaagctgagactttgaaagaaaaacggaggcgtgctgtgcaattctcaaaggctggcctggatgttcctgaagaactctcactgttcaagaaaagcggtggtacgaaagttcctgaaaacagtgatgttggggagcaagtttccccattaaagtttgttgagccagcaccaattgtggattctggtagagaatgtaataacaaaatgaaggatctagtgaaagctattgaatgccaaccgattatgggttttggagctggcattccagagccagaaactgaagagcctagtgatgatgctcatatgttgacaaatcagaaaattcagttgtcaattccaagttgttctggagcagaattagatttgcagggtaaagaactaggacaagggcagcattctgtacaggagtgcataaatcctccaattgttgtacctgtgtcaagactgcatgaagttgagaaggcaaggagggatctcccaataataatgatggagcaagaaataatggaagctatctatgaaaattctgtagtaattctgtgcggagagactggctgcggtaaaactacccaggttccccagttcctatacgaagctggcttcggcactagtgaccgagctgatagaaaagggatgattggtatcacacaaccacggcgcgtagctgttcatgccacagctaagagggtttcctatgagttaggacttaagctgggaagagaagttggttttcaagttaggcatgatagaaaggtaggaagtgaatgctccatcaagttcatgacagatggtattttgctgcgagaaatccagggtgattttctgttgaagcgctattcagtgatcatattggatgaggcacacgaaaggagcttgaacacagatatacttattgggatgctttctagaattataaagattcgcaaggatttgtatgcaaagcagcaggaaaaattacggtctggatttaagatcaaaccagaggataagatcagtcagttaaaggtggtgctcatgagtgctactctgcagttaaaggactttatttcaaatagaaggttgtttggcgtgatcccaccagctgttaaggtacctgtgcggcagtttccagtatcagttcacttctcaaagaggacacatgatgattatttagggctagcttataaaaaggttatgtcaatccacaagaggcttccaccaggtggaatcctcgtatttgtcactggacaacgggaagtggagtacttgtgtaagaaactgcgaagagcatccaaggtgcaaactgctaagaatcctgggaaaactgatggtgaagacaatggtccatgcccaaaagtagatgaaaaggaaatttttgaagcatatgatattgacagagatgaacccgagcaccgatatgacatgttttcctcgtatgatgacgatggtatgtatgatgacgatggtatgaatgttgagacaaatattgattcttctgacaacgaaacggagagcgaaatggatactgaaaccgatgacgaagagtctgttactattgaaactacagaagaggatgttccagtattagcatttttgaaagatgctgagagctcatctgcgttgaaggcatcatttggagctttgtcgggaataccaaatgtgctggaaagtgtcgaggaattaagtgatgctaaatgtgaagaaaagaccagcacttcacttcgttgttttagtaaatgcacagaacataagcctgtttcacatggtagacttcgtgtcttgccactttatgcaaagttatcagcttcacaacagcttcaagtgtttgaagatgtcccagagggggaaagattagttgtggtggcaactaatgttgccgaaacctctctaacaattccaggcataaaatatgtagttgatactggaaaagaaaaggttaagaattatgatcatgctactgggatgtcaagttatgatgtccaatggataagcaaggcatcagcatcccagcgtgctggaagagcaggaagaacagggcctggccactgttaccgtctctactcagctgcagcatatggtaaagatgatttattccctgaattcgctgaacctcagattaagaaaattccagttgaaggtgttgtcctgatgctcaagttcatgtctattgataaggttgagaactttcctttcccaacaccaccaaacaaggaaagtttggttgaagctgagcgttgcttaaagacattggaagcacttcatagtgatggaaaacttacacctatgggcaaggcaatggcacagtaccccatgagcccaagacattctcgtcttcttcttacagtgattaagaatttgaagaataagcagcaaggctttgctagatctaacttcatattaggatatgctgctgctgctgcatcaggtttgaattttactaatccttttctcaagcaattggatgaatgtgacacttatggtgaatcagtagaaaacactaatctggaagctaatggtccatgggaaaggaagagacagaagaagctcaaggctgtggttagagaggcacgggaaaagttttctaaccctagcagtgatgctttaaccatcgctcgtgccctgcagttctttgagttgtcagaaaacccagtggaattctgcagagccaattcacttcatcttaaaaccatggaagagatgtcaaagttgagaaagcagcttctgcagttaatatttcgccatagcaaatggtgcgaggagtttgcttggaattcgggtgactctgctgaggttgaacgggcctggaggaacgagcccagtatattgcagttgaatgaagaggaacttcttgggcaaggaatttgcgctggatgggctgatagagttgcaaggaggattcacacctatttgaaaccatcagaagacgatcgaaaggttcgagccgttcgttatcagtcttgtgcacttgatgatacaatatatctgcaccgatcatcatctgtcgcccaagttgccccagagcttgtagtttactcggagctacttagtacaaagaggctatacatgcacggtgtaacgaccgtaaagccagggtggcttttgaagtatgctagttccctctgcaccttctctgcaccgttggaagatccgaagccgtactatgacccactgaacgaccaagtctactgctacgttagcccggtcttctctcgtcataactggcagcttccgttgcacagtttacctatcaaagacggtgcgagccggctgcaggtgtttgcatgcgcgttgcttaaaggggacgtcctgccatgtctacgggacgccaaggatttcctcgcgctgtcaccatccgctgtgttggggcctgccaggcaacggagagtgggagatcttcttagcaggatgaagatcggtccgaagttagtcgacagcagggcagcactgagaggcgtgtggaattttgatcctggttttctctatcctgagctcaagttgtggtaccaggatagattccatgaccagtttgacttggtgtgggagcagatgcaccaacaggttctccttgaggggcgcaagcttttcccaaagaggtccaagaaagttaaaggctaggccaaaatttttggtgcagttggttggctggcagaagcttttttgtgtgtgtggttttaaggaatagatacgagagatgcagtgagacatcatgcacaagcagttttgtctagacattttgccttgatctggatttgttccattgcatctccgtgttgaactgttgatgtacaccgttcctctgcaagcaaccttcaccc

SEQ ID NO: 129034 - DNA, 556 bp, Zea Mays
atggccgtgctgaagaacagcaacctcgtgctggcggcgctgatcatgctgctcatggcgtcgtcgatggtgctcggctcggccgcggcgcggcccctgctagtaggcgaggaactggccggagaggccgccgccgtcggcggcggcggcgactccatcgtcaggttcatccggcagctatactggcagcggctaagcgggccaggcccctcgtgcaagggctcgacctgggacccaaacaatggatgcccaccgccgccgtgatgaattgcagtctcgcagaagctagcgcgcgcatggcaacccagccatcgtcgagctgttttagtagcctgttttaacgtgtagttatatgtgcgatgttcttttatttgtttttggaagaggtcagggactatacttcccatgttaactccctcacacaacattagaagaatgcatggttattgcatacggggagagttgttacatgtattttttttccgctccttggcatgtctgctagattcatgcacctgaggaatttgaaataatatactccattgaacacaaaata

SEQ ID NO: 129035 - DNA, 78 bp, Zea Mays
tgtctgtgctcacctgcactgcgggatgcaacatctcgctgcgagccaggctgtggagaaacgagtttcatttctgta

SEQ ID NO: 129036 - DNA, 489 bp, Zea Mays
atggccgtggcgaggaggttcgtcgtcgcgccggtgatcgtggtgttcttggtgctttcggcggcagcggcagcaacaaccgtcgtcgtcagcgcagcgcggcctttggcgggagatgacgaaccctccgctggagccaccgccggcgccggcgagtccgttgccagcaggttcctccggcagcggccaagcgggccagggcactcgtgccaaacctggaacccgaacgattcaaagagctatttcagtcaagcttctagtggaagtagactaagcactcgcgctagtggagtttgcaatgaaccagaatacaagttggagttcaagagaataatagtgaagatgtcaatggtgaaaatattaatggtcaagtcgaagctacacatgtcagagttgtcgtgcccggcctcttgggagttggggtttgtgagaactggggaatccatggctcatggattccccatagacggacgactgctccttccatga

SEQ ID NO: 129037 - DNA, 117 bp, Zea Mays
ctgatttttcctcatctacccttatccctaaccttccacgccgccggctctctttcctccccaatcttccgccgccaggatcgtccttccttgtgtcctcgcgttccagcgtctacc

SEQ ID NO: 129038 - DNA, 252 bp, Zea Mays
atggccatgaccagcaagttcgttctgccgctgctgctggcggtgctgatgctgttggtcgtgtcaggctcggcgcgcccattgcaagacgatgagtgggccggcggcgaaacctcctccgcctccgcctccgtcgttggccatcctaccatacagttcctcaaacggctctacctgcaacaactggcaagtccatgtccctccaacatgacctacgacccaaacagcaacccgcattgccatcgtcggtga

SEQ ID NO: 129039 - DNA, 243 bp, Zea Mays
atggccatgaccagcaagttcgttctgccgctgctgctagcggtgctgatgctgttggccgtttcaggctcggcgcgccgagtggaaggcgacaggtgggccggcggcgaaaccgccgcctccgtcgttggccgtcccaccatacagttcctcaaacggctctacttgcaacagctggcagctccatgtccctcaggcatgacctacgacccaaacagcaacccccattgtcatcatcggtga

SEQ ID NO: 129040 - DNA, 2036 bp, Zea Mays
ggagtggaggcaataaagggaaagctgggcggagtgctcgggtaccgtagccggattagttattaatgcccgcgagcagctagtcgtaggcgtaactattttaaggcagctgtcgccgctggggacttgcgaaagcttcgcctcttttgagaagctctgcaccacgcctggctccgccccgctccccctccacctccaggcttccttcacagtctcgctgttgctagtgctgccttgctgctagtgataggggtcccggggccctcaagttctgggtgggcggcaaacatatggtgggcaccgggcgggggaataaggaggaagagaaagaggaggaggagcggcagtagatttgggccgcacaggcagggatggggggcaagtaccgcgcggcgaggacgaagaggtggtggagggggctggcagcggccgggtgggtgctaaccgcggtggtctgctccgcggtgatgcactggaccctgcgccgggacagcatggaccgcgccgaggagcgcctcgtcagcatgtgcgaggagagggccaggatgctgcaggagcagttcggggtcaccgtcaaccacgtccacgccatcgccattctcatctccaccttcaacttcgagaagtcccctccagccatcgaccaggacacctttgcaaaatacacggcaaggacatcatttgagcgaccactgctcaatggggtggcattcgcacagcgtgtattccatcatgagagggaaatgtttgaaagccagcagggatgggttatgaatacgatgcagcgggagcctgcacctccgcaggttgaatacgccccagtgattttctctcaggatacggtttcctaccttgcacgcattgacatgatgtctggggaggaggaccgagaaaacattttccgggccaggactactggcaaagctgtgttaacaaacccattccggttgcttggatcaaaccacttgggagtagttctcacgtttgctgtgtaccgccctgatctccctgctgatgcatcagttgagcaacgtgtggaagcaactattggatatcttggtggagcctttgatgtggagtcacttgtggagaatttgttgagcaaacttgctggcaatcaggatattgtggtaaatgtctatgatgtcacaaatgcttcagatgctatggttttgtatggaccttcaagtttggacgagcaagtgcctttcttgcatgttagcatgttggattttggagatccatttaggaagcatgaaatgagatgcaggtatagacaaaaacttcctatgccgtggtctgccatcaccaatcctttgggcacatttgtcatatggatgcttctagggtatagcattgctgctgcatattctcgatatgacaaagttactgaagattgcagaaagatggaagagctaaaaacacaggcagaagctgctgatgttgcaaaatctcagttcctggcaactgtgtcacatgagatcagaacacctatgaatggcgtccttggaatgctggatatgcttttaggaacagatctaactatgacacagaaggattatgctcaaactgctcaaatgtgtggcagagcattgattacactgataaatgatgtccttgatcgagcaaagatcgaggctggaaagttagagcttgaagcggtgccttttgacctgcgttctctcatggatgatgttgtttccttgttttcttcaaagtcacgggagaagtgcattgagcttgcagtatttgtatgtgacaatgttccaaaggttgttattggagatccttggaggtttcgacagatattgacaaatttggtcgggaatgcagtcaaagtaagcagccaattttggtatttggtatcctcacactacaacttcaaatgatgttggttagaagtatttgataagtctgtcatcaaatacatgcacaaaaatgcactgatatatctattgtctgttccagttcacagaacgaggtcatgtatttgtgcgggtctgtttggctgaaaactcaaatgtggaagccaatca

SEQ ID NO: 129041 - DNA, 3870 bp, Zea Mays
ggagtggaggcaataaagggaaagctgggcggagtgctcgggtaccgtagccggattagttattaatgcccgcgagcagctagtcgtaggcgtaactattttaaggcagctgtcgccgctggggacttgcgaaagcttcgcctcttttgagaagctctgcaccacgcctggctccgccccgctccccctccacctccaggcttccttcacagtctcgctgttgctagtgctgccttgctgctagtgataggggtcccggggccctcaagttctgggtgggcggcaaacatatggtgggcaccgggcgggggaataaggaggaagagaaagaggaggaggagcggcagtagatttgggccgcacaggcagggatggggggcaagtaccgcgcggcgaggacgaagaggtggtggagggggctggcagcggccgggtgggtgctaaccgcggtggtctgctccgcggtgatgcactggaccctgcgccgggacagcatggaccgcgccgaggagcgcctcgtcagcatgtgcgaggagagggccaggatgctgcaggagcagttcggggtcaccgtcaaccacgtccacgccatcgccattctcatctccaccttcaacttcgagaagtcccctccagccatcgaccaggacacctttgcaaaatacacggcaaggacatcatttgagcgaccactgctcaatggggtggcattcgcacagcgtgtattccatcatgagagggaaatgtttgaaagccagcagggatgggttatgaatacgatgcagcgggagcctgcacctccgcaggttgaatacgccccagtgattttctctcaggatacggtttcctaccttgcacgcattgacatgatgtctggggaggaggaccgagaaaacattttccgggccaggactactggcaaagctgtgttaacaaacccattccggttgcttggatcaaaccacttgggagtagttctcacgtttgctgtgtaccgccctgatctccctgctgatgcatcagttgagcaacgtgtggaagcaactattggatatcttggtggagcctttgatgtggagtcacttgtggagaatttgttgagcaaacttgctggcaatcaggatattgtggtaaatgtctatgatgtcacaaatgcttcagatgctatggttttgtatggaccttcaagtttggacgagcaagtgcctttcttgcatgttagcatgttggattttggagatccatttaggaagcatgaaatgagatgcaggtatagacaaaaacttcctatgccgtggtctgccatcaccaatcctttgggcacatttgtcatatggatgcttctagggtatagcattgctgctgcatattctcgatatgacaaagttactgaagattgcagaaagatggaagagctaaaaacacaggcagaagctgctgatgttgcaaaatctcagttcctggcaactgtgtcacatgagatcagaacacctatgaatggcgtccttggaatgctggatatgcttttaggaacagatctaactatgacacagaaggattatgctcaaactgctcaaatgtgtggcagagcattgattacactgataaatgatgtccttgatcgagcaaagatcgaggctggaaagttagagcttgaagcggtgccttttgacctgcgttctctcatggatgatgttgtttccttgttttcttcaaagtcacgggagaagtgcattgagcttgcagtatttgtatgtgacaatgttccaaaggttgttattggagatccttggaggtttcgacagatattgacaaatttggtcgggaatgcagtcaaattcacagaacgaggtcatgtatttgtgcgggtctgtttggctgaaaactcaaatgtggaagccaatcaggtcctacatggagccatgaatggcaaaggtggtagagttgagtcaacaactaatggtgccttcaatactttgagtgggtttgaagcagcagacagacgaaatagttggcaatattttaaactgctcctctccgataaggagtcacttttggatgatcttgagggcgaaaattctaatcaaagtgattcaaatcatgtcacactagcaataagtattgaggacacaggtgtcgggataccactgcaagcacaagatcgtgtttttacaccgtttatgcaggctgacagttcaacttcaaggaattatggcggtactggcatcggtttaagcatcagcaagtgtctagctgaacttatgggtgggcagataagtttcactagccatccttctgttggaagcacgttcactttctcagccacactgaagcactcatacaaagatatttcggtcgattcaagtaggagcttgacagaggcactaccaactgcttttaagggaatgaaggccatcttggtagatgggagacctgtacgtagtgctgttacaagatatcacctcaagaggttgggaatacttcttcaagttgtgaacaatatgaatgcagtagtaaaagctttcccaggacaaaatggagcaaccggttctagggaaaaagcatcaattctttttattgagagtgacttctggaggcctgagacagatgttcagttattgaaccatctacgcgagcagaagaacggtcagttgtcggatgggcacaaggtagttcttttggtcacctctgaagccgacaaggacaaatatggatccatatttgatattgtgatgtgtaagcctataagggcaagcacaatcgcttcatctattcaacaactgctcaaagtagagatagccgaaagaaaagataatcaaaaccggccgtcgtttcttcgaagcttgctggttgggaagaatatattggtcgtagacgataataaagtcaacctcagagttgctgcggctgcactcaagaaatatggtgctaatgttagctgtgttgaaagcggcaaggatgctatcagtctacttcaacccccgcatcgcttcgatgcatgttttatggatgttcagatgccagagatggacgggtttgaggcaaccggacaaataaggcaaatggagttgaaagcgaacgaggaaaggaagaacaagttggcttcgattgaaggctcgacaactgccgagtaccatctgcctgttctggcaatgacagccgatgttatccaggcaacttacgaagagtgcataaaatcgggaatggatggatacgtatctaaacccttcgacgaggagcagctataccaagcagtctccagattggtagtgggaacgacggattcggctgtttgatgttcaaaatacgatggacctgacttctcattcatcgaagtgaagcatcaccatcttgcctctgtccagctgactctatatcccttgacaatgggcctctgacatggcctctcacaagactagatgaaaaaagaagatgaaagtgccgtgagttaggtacgtgtcacacatgacatgaagttgctgcggcagcccagaggagtgtaggtagatcaccctgtaactctcttgttctttgatgtttataggctgttgtgtcttctgacaattcattggaaataccacatctcgttgcaatccccctagtttcagaactgccctgcctcgtctcatccacattatccaggaaactgtttccttcagggctagtttgggagtccaaaaaccggaggggattagagggactaaaattccctgcttattcaaaattgaataaggaggggattttagcccgtccaatccccttcggttttgtggctcccaaactagccctaagcgcgaaggaaaacacgggtaaattggctgtaggacttacttgagtattggtatttgctaatggatactaatcaatctc

SEQ ID NO: 129042 - DNA, 2098 bp, Zea Mays
aacacgctgtgcctgtgcgtgcgcttgtgtcggggcggggtcgcagcagccagccaggatataatccccgcgcgcgccgctcgtaaacagaggagggcgagagggaggccggcgaggtgagccagtcctccgatcacgcgcccgcacacacgcacggagcgcggcagccggcagggaggaagagcttacagggccacagcaggcaggcaggcaggcagggcacggagaggctatccaccaccgctgccgcacatgcgagcgggcgcagcagcgcgcggggactctcctcgtgcaatgagcgccgccgcgacgccgcgccaccggctcggggtcgcgcttcttctcctgctggtcctcggtggcgccgacgcgaaggcgcacagctacgaggacgcgctgcggaagagcctgctctacttcgaggcgcagcgctcgggccggctcccgcacagccagcgcgtcacctggcgccaccactccggcctcaccgacggcctcgagcaaggggtggacttggtcggcggatactacgacgccggggatcacgtcaagttcgggctccccatggcgttcaccgtcaccatgctgtcgtggagcctgatcgagtacggcgccgacgtcgcggcggccggcgagctcggccacgcgctcgaggccgtcaagtggggcaccgactacttcgtcaaggcgcacaccaggcccgatgagctgtgggctgaggtgggcgacggcgacacggaccactactgctggcagcggccggaggacatgacgacgtcgcggcaggcgtacaaggtcgaccgggaccacccgggctccgacgtcgccggcgagaccgcggcggccatggcggccgcgtccatcgtcttccgcgactccaacccgcactacgcgcacctgctcctgcaccacgcccagcagctgttcgagttcgccgacaagtacaggggcaaatacgacagcagcatcgctgaggtgaagagctactacgcgtccgtgagcgggtacaaggacgagctcctgtgggccgccctgtggctccaccgcgccaccggcagggctgactacctcgactacgtcgtcgacaatgccgacagcttcggcggcaccggctgggccatcaacgagttcagctgggacgtcaagtacgccggcgtccagatcctagcagcaaggttgctgctgagaggggagcacgcgacgcgccaccggagcacgctggagcggtacagggccaaggcggagcgctacgtgtgcgcgtgcctgggccggaacacggaaggcggcgcggacgccaacgtggagcgcagccccggcgggatgctctacgtccggcagtggaacaacatgcagtacgtgaccagcgccgcgttcctgctctccgcctactccgactacctggccgaggccggcgtccggaccgtgtcgtgcgcgggcggcgagaccgtggcggcccgggaggtggccgcgctcgccagggcgcaggtggactacgtgctcggcaccaaccccaggggcgtcagctacctcgtcggctacggccccaagtaccccagccgggtgcaccaccgcgccgcgtccatcgtgccgtacaagcacagcaaggagttcatcggctgcacgcagggcttcgaccactggttcggccgccggagctccaaccccaacgtgctcgtcggcgccatcgtcggcgggccggaccggcgggacaggttcagggacaaccgggagaactacatgcagacggaggcctgcacgtacaacacggccccgatggtcggcatgttcgccaagctgcaccggttggcgcggcaggagcgggaacaggggccgacgccggcgccggcgccggcgcccgtcacgtctgcagcggccgatgtgtaaatagataggaatgtagagggggggctgtacaattttccccattctttggttcattttttgttgggctctgaatttcattttacacagatccaggttattgtatacaaaagaaaaggtagaggcatcgacatgtgcaaatgtaaatccactaccagtacatacgagggaaagaaatggcattcttaacttattggtcgttcttgtctgtaccttt

SEQ ID NO: 129043 - DNA, 130 bp, Zea Mays
gttgaatgttaaatcttgctctcttgaatattaaatatcctactctactacttttgaatattgtttcactgtttcgggtagtttgctattacccaaacccgtacccgaaattacgggtacccgaaattac

SEQ ID NO: 129044 - DNA, 161 bp, Zea Mays
tcgtgctggaaggagagggattgatacagttgggcatgctgttcttgttcagactccatatgaagggcctgaagagtgttgtgacatcatctttgccggacttgagccacttgtctcacaattcactgcatcatatgggatggttttgaatcttcttgccg

SEQ ID NO: 129045 - DNA, 1096 bp, Zea Mays
gtattgatttgcggttctctatatgaaatatttaccagattagcaaagtcatacaagaggctagagcattggatatcaatactcaggtaatctatcctttgggtgagacggcagcggctatacgaggggaaaatgagctatggcttgctatggttcttaggaacaaggtcctcttggatctaaagccatctcaactggcagcagtttgtggaagtttagtttccgaagggatcaaacttcgtccttggaaaaatagcagctatgtatatgaaccttcttctgttgttactggtgttataagttatttagaagagcagagaaattcgctaatcgatctccaagagagacatagtgttaagataccttgcgaaatagatgcccagtttgctgggatggttgaagcctgggcttcaggactgacttggagggagataatgatggactctgcaatggacgatggagatttagcccgtctactcaggcgctctatagatttactagctcagattcccaaactgccagacattgatccggttctccaaaagaatgcacaaattgcttgcagcgtcatggaccgagtaccgattagtgagcttgccggttgaaaactcaacctttaacagttgtcacagtgaaattcaagagcagctcatatcccactgactaaacatgtttttcaagaagatcagcaactacagtgattggttcaaggaatcaacattcagaatgatgaacaagacaaatgatcacatcaaaggttcataggattattcatccaaaaaattctatcactaccaattccagaattttcaaccacgtgaccaatcaaatggatatggagatcaaagcgcagcaacaatctctaggttttctcacggcttctagatgcctgaacaccagaaatactcagaatcagaactgcagtgtcaatggatatgactattaagggcatgttcgtttcacccccaatccatatggattgaaggggattgagtgagtttcaatccctgataaggccttgttgggttattcacatctcacatgggttggaagggattggaaaattttaagaagaattttgacttgctatggattt

SEQ ID NO: 129046 - DNA, 576 bp, Zea Mays
atggagtggtcggtggcctgcacattgaccttgtcccaatgcaacggcttaagcttcgcctgctgctcgccggcaccggatggcatgcccggcgctgtcggcggcctagaagaggacgtcgatgccccaccttttggaggaggcggaggcggacctcctttctttcctcctggtggtggcggcggcggaggggacgggcctttgggcggtggcggtggaggcgggccacctctgggcggtggcggcggaggtgggccgcccttcggaggtggcggtggaggtgggcccttggccagtggtggcggcggcggcggcgacgcggcggctggttttggaggtggcggtggaggcgacgcgacagaggcagcaaccatgggtggcgcaggtggcgggcttgctctcccaggcggcagcggcagacccggcgaggcggcaggcgcaggccgcggagtcgggcggggcacggagctgacagcgactgccggggtcggcggcggcggacgcgcggacacggagaaggacgagctggagccggcgctgggcgggtgcagcgagtcgtcgaacacagcggacgcg

SEQ ID NO: 129047 - DNA, 760 bp, Zea Mays
gccgcctggagctgcctcgcatgcgtccacggctacgtggccaggcgctccgacgccacgtccagggaggggatcggccgggccgggtccctgcctttacgcgtcccggcttcctataagcagacagcggcgggctcccgatcagaacaaacggccgtccctatctatcggattgcttccagttccagctcgagcactggggcttcgcaggcgagatgaagaggctgcttgctcatggccagtccggttgcccttcccggactttggttggcagaatccctgccctgcctgtactttgcaacaacgttcttcccgaccataggtactattcagccgagaaacacgatgacgacaccacgctaggtgagatcggggataaggcaaggtcgacagccgaggagttcctgagggtggccaaggagaagaccgacgacgtcgcggagggcgcgaaggagacgctgcacgagacgaaggaagcggtggtcggggagtcggacgacgagaaggagaagttcaaaaggagggtggaggaggggaagtaccatcatcagaagaaataagtggcttgtgttctcttggctgcgtatgcaagtcatggcttggattactatacatactcgataggccttgtagtttgtacaagtttactctttgcatccagacgtgtcgatgtcctgtagaataaataagaagttgccttttgtgcttcaatacttacatgccatctctcactgaataaaaagttttgccttgtgaagaa

SEQ ID NO: 129048 - DNA, 1505 bp, Zea Mays
tcagcagcttccatgagttcggctggcgggcaagagctgagccagatccggcggcacgagcctgcagcagaagctatgctctctctctctcacgccgtgtcgctctcgtcgcaaccgagccttccttctctcccgtcgttaggcccccgcgacctaaacgtcagcccttgccaccaccgctgcgtcgccacactcagagaccactcctcctacgtctcggctctcgccgtcgacggccactcgctgtacagcgcctcgtcggacggccgcatcagagtgtggccgatgggcgacgcgagcgggaggcaggatgacgacgacgacgacagcggcggcggcggcggcggcggttgcgggtctgctacggtcgttgccgcgtgcgacagctccgtgaagtgtcttctcgccacggcgggcagcaacggacacggtctcctcctcagctcccaccaggacggcaagatcatggcgtggcggaccgggagcggcaggaaggacgggaccccgagcctcgtcctgcgcgccgtcctgccgacctgcgtggaccggctacggacgttcctgctcccctggagctacgtgcaggtccggcggcaccggtggcgcacctgggtgcaccacgtggacgcggtcgccgcgctcgcggtgtccccggacggcgcgctcctgtactcggcgtcgtgggaccggagcctcagggtgtggcggctgccggggttccggtgcgtggagtccgtcgcgcccgcgcacgacgacgccatcaacgcgctggcggtgtcgcccgacggccacgtgtacacgggctcggccgacaacaagatcaaggcgtggaggcggcacccggagcggaggcacaggcacaggcacaggcacgtgctcgtgctcgtgcagacgatggagcgccacaggtcggcggtcaacgcgctcgctctaggggccgacgggagggtgctctactccggcgcgtgcgaccggtctgtggtggtgtgggagcgggccgacggcgccggcggcggccgcatggaggccactggcacgctcagagggcacacgagggcgatcctgtgcctggcggcggcgggggacgtggtgtgcagcggctcggcggaccggacggtgcgggtgtggaggaggggagcggagaatacggggtacactctcctggccgtcctggaaggacacggcgcgcctgtgaagagcctagctttgctttacggacgtgaccgcggcttgttcagtggttggggcgacccagaggagggatcgtccggtggtggcggcggcacccattgtgctattgtttgcagcggcgcgttggacggcgaggtgaagatttggagcacgcttgttccttgattcctttcccttcacagataacaaagtgtagttctccttgtagacagtataccactggataaagcatgaatcacgatgctgaatgcctgcgtgtttgaacattgagattagcgttacgggatttactgcagttgttgtttcaaaaaaaa

SEQ ID NO: 129049 - DNA, 1983 bp, Zea Mays
ctcggtcgcgtctccctccctcgtgtcacccacccattttcgtcggcctcctcttccccccgcctcgccagcccgaattaggagctacgacgaatctaccgggccgagctcgccagctggcctccccgagggcgaggccctatcggctgccgttcccccattgacagggagctcagccccgccaccgccgcggctgcggcgtgtggacgtaaccggagctcctcgcagccgctgataagatccgaagggttcctaggctttttgtggcgggaggcgactggttccgtcgggtggtccggtgagcatggcggggcccaagtttgggtcgttcaaggcagaaaagggggactcagcggcggctgcaggcgcggcggcgcagaggagggacccatacgaggtgctcggggtggggcgtaatgctactgagcaggagatcaagagtgccttccgccgcatggcactcaagtaccatccagataagaattcagacgaccctgttgcctcagagaagtttcaagaggccacattctcctataatatcctgtcagatccagacaagaggcgccagtatgacgcatcagggtttgaggccattgaagcagatagtcaggaactggagctggacctatcaagtctcaatactgtaaatacagtgtttgctgctctgtttagcaaactaggtgttccaatcaagaccactgtctcggcaacagttttagaggaggcattgaacgggtcagtagagatttctcagcttcagctgggcaaatctctatgtaggaaggtagaaaagcagtcagctcacttttattctgtggacataacagataaagaagccaaaatgggcttagtttgtagagttcattcaacttctaaaagtaaatttaagttgctgtattttgagcttgaggacaatggtggattaagccttgctttacaggaagatagtgcaaaaactggaaaagttacttctgcgggcatgttctttctaggctttcctgtgtatcggtttgaacaaaataattcagctgctgctgcgaaggatcctgacagtgctttctttaaaagattggatggctttcaaccttgtgaagtaaatgaactgaaagcaggaagccattattttgctgtatatggtgacaatttctttaaaagtgcaagctatactattgaggttgtatctgctgaacccttctctgctcaaaaagagaagctacgaagtgtggaggcaaagataattgcaaaacgatctgagctgtctaaatttgagtctgagtatcgcgaggttttggcaaagtttactgagatgactagcagatatgctcaagaaatgcaaacgattgatgaccttctaaaggaaaggaatgcaattcatgcatcctataccaacaacccaactctgcagcggagttccagtagcagcaaagggaaatcaccctctaaagggtccagaagtgaggatgaccaaactgtaaagaaggaaaagaaatccaagagccagccaatggagggatccaaaagcgatgatgagggtcccgaaaacaaaaaggaagaaacgcctaaagatcggattcgaaggaagaagtggttcaacattcatttgaaagtggacaagagaaggccctgctgataactgcgatatatcatgtactcctcaagatctctgctccaagtacaaggaaaaaattcccatttgacgtccaggaagatgcatcttgtcgatcattcccatgatcaagcccattctatttcctgaaaagtcaggaacctcgccagcttcaaaaatggtgtatgtaccacttagttttggacccctagtcggatactgttgtatttatatcaagttggacggttatgtacaatagataccttaatagtgtgatgtccagaatggcagaatccaattcagatttgttcaatttgtttgatgttgtccgtgtcaaactttactacccaacttgactcagccatccgatctgaact

SEQ ID NO: 129050 - DNA, 1595 bp, Zea Mays
cacgttaagcgttacaacttacaagcgtgcgcgcagggagtgttgtccaccgtttacaactcctcttcttccggttgtgtccaccgcaaagctctccccgccactccctcggctccgttcgcctgccctccattgcctccaagaacggccgctcctcgcatttcttggacccgtacacccgctcttccaagttaggaggggagcacccatcagccaagagctatccatacgcacagcgatgcaccagcacgagatactagccatcatgcgcctgtcgtccctcctcctcgtcgtggccgccctctcggcgcgcgccgcggcgcagcaggtgccgccggtgggcggcagcgctctgaagccggactactacagccagtcgtgcccgcgcgcggagcggatcatcgcggaggtgatgcagacgaagcagatggcgaacccgacgacggccgcgggcatgctgcgcgtcttcttccacgactgcttcgtcaccgggtgcgacgcgtcggtgctgatcgcgtccacccagttccagaagtcggagcacgacgcggagatcaaccactcgctccccggggacgccttcgacgccgtggtgcgcgccaagctggccctggagctggagtgccccggggtggtgtcctgcgccgacatcctcgcgctggcgtcgggggtgctggtcaccatgaccggcgggccccggtacccgatcccgctggggcgcaaggactcgctgtcgtcgtcgcccacggcgcccgacgtcgagttgccacacgccaacttcaccgtggaccgcctcatccagatgttcggcggcaaggggttcacggtgcaggagctggtggcgctgtccggcgcccacacgctgggcttctcccactgcaaggagttcgccgaccgcctctacaacttccgcagccagggcgggaagccggagccgttcgaccccagcatgaacccgtcctacgccagggggctgcaggacgtgtgcaaggactacctcaaggaccccaccatcgccgcgttcaacgacatcatgactcccggcaagttcgacaacatgtacttcgtcaacctggagcgcggcctcggactgctcagcaccgacgaggagctgtggacggacccccgcaccaagcccctggtgcagctctacgcgtccaaccccactgccttcttcaccgacttcggccgcgccatggagaagctcagcttgttcggcgtcaagaccggcgccgacggcgaggtcaggcggcgctgcgacgcgtacaacagcggccccgacgttggcggcgccatgcctatggctatgcccatgcccaagatgtgacgctgcgcgcgctacaagtacaacgacggcggccgcacgcgtgcttgtctgccgatcgatcgacggccgagctgtgtggcacgatgacccctgctgctcctatagtcctatacggcggtcacgatggtgttaaaaaaaatatatgcggagatgtgatatgtttcctgcttgatcaagtaatttatttctaatccgtgtgctgcgaaaaaaaactcttcgaagtgttgctgcttgctagtataaattaatttatttttttatcctttga

SEQ ID NO: 129051 - DNA, 818 bp, Zea Mays
ggctccacgaccacgagcccaaccgggtagcttcttcttcgtccgctgttacccacaccgcgggaagcctccatgcgatcccctgggcggcgcctaccagcgccggcgcggctcgtcgcggctgccctcctcctcgcagctctcaccgggggagccgtcggcgccgatgggtacgggcgggcgaggagggtgtacatgaagaacaaggtcctggagatgttttaccatgcctatgacaactacatgacttatgcattccctcatgatgaattgaagcctcttactaaaagtttcacggactcgcttagtgagcttggcaatttaaatcttgaacacttgccacaggattatagtggatccgcgttgacactggttgagtcattatcaagtcttgttgtcttaggtaacctcacagagtttgagagaggagttctctggctttcagaaaatctgacatttgatgttgatgctcggattaatctttttgagtgtaacataagacttcttggggggcttatttctgctcatattcttgcaaaagactacagcagccagtttaagcatgggctgtatcaagatcaattactacgtcttgctgaaagtttaggcaatcgttttctaccggcatttgagacacctactggattgccgtattcatggattaatcttaagtatggggtgatggaaaatgaaacaactgaaacaagcacatcagggtgtggctcccttatacttgaaatgggtgtgttgtcacgtttgactggtgattctagatatgaagctgcagctcttcgtgctctccgcaagttatggagcat

SEQ ID NO: 129052 - DNA, 474 bp, Zea Mays
gttgattcattttatgagtatctgattaaagcatatattcttttcggaagtgatgagtactgggatatgtttcattcagcttatcttgcggtgcagaagtacttccgacatggtccatggtatcatgaggctgatatgaggactggagaagcaacgcactggcagctaactagccttcaggctttctggccaggtcttcagttctactgtactgaacagacacttcttggagacgtaactgctgcaaatctatcacaccgtgagttttacaatatatggcaaagatttggtgtgctacctgaaagatatcttttggactatggaatgttgcatcctacagagaagtactatcccttgcgtcctgagtttgctgagtcaacattttatctttatcaagctactaaaggtgcacccaatacacaccagaaggatatattcgttttatcttcatccagctctcatgttttcatctag

SEQ ID NO: 129053 - DNA, 706 bp, Zea Mays
tctttttttcccctctccatcccttgatttctgaaacacttctcttatagatccttggtacctagaagtgggtgaaaccattgtgaggtcacttaattactatactaaagtggatggaggttttgctagcatcagagatgtttcaacaatgaaacttgaagatcaccagcacagcttctttctttcagaaacgtgcaaatatctttttcttctgtatgatgattcattcttgaggaatcaaaattacatatttacaacagagggtcatccccttccaataagaagcacgtggcatgagaaatttcctgcagcatatgttcccagcaattggacatctgttaaggatgagatccaaccaattcgcgcgagcgcattatcgtctcaagtttgtcccgagacgattttcggaagaagtgttggtaccccatgggagagtgcgtgccatgttccagatgcgcacgctagccacagatgcaggactgacgatgactgtggaatagaagcaataacatgcaagaagaggacctgcagtatggctggctactgcggcttatttttttataatggaaacaagagttccggctttagcatgataatgcgtacagccaatacaagtcgattattacaattaagaactgctgcatgaatagtgatactaactcaaaggaactaaattacaatactatgactaacactagtcatactc

SEQ ID NO: 129054 - DNA, 1900 bp, Zea Mays
agagagaggctaatgctatgctatatgctacgtgtataaatcagggcaagagtggtcgctcccccggtggtggactggtggcctggcctcacaagtcacaaccggctgatagcagcagagcgatcaaaagtgaagctaacaagcgagaaaaggaaacacctacttctctcgtctagccacttccatccgtctctagattctagtcgcccttcaacactagctagcctgaaatcaagtgcaggctcgccagctgtggccactgagaagtgacggaaggaagacaagcagctcgccggccggccgggcgccccgtgtgcccccgttctacgagggttgaagtgaagcttcgtagtacgtagtactccatatagcagctgagctcccacttcggagctccatccatcgttagctcccgctgctgctagctggttcgaggcctcctcaagcagcttcttcgtttctgctgtctgcaatggaggagcagctcagcccgctggccgtgacgcacctgctccagcacacgctgcgcagcctctgcggccacgacgacgcgcagtgggtgtacgccgtcttctggcggatcctccccagaaactacccgcccccaaaatgggatctccagggcggcatatacgaccggacaagagggaacaggaggaactggatcctggcatgggaggatggattctgcaacttcgcagcctctgcctgtgaccacgagggcgcagctgctcctgccgccgccgccgcctcctcctcctacacggcggagtgtgctgctgccgggcaggaggccgccaagggcctgcagcctgagctcttcttcaagatgtcccacgacatctacaactacggtgaagggttgatagggaaagtggcagccgaccacagccacaagtgggtgttccaggaggcccaggagcacgagatcaacctcatctcctcctggagcaaccctgccgactctcatccgaggacatgggaggctcagttcaagtctggcatcaagaccatcgctctgatcgccgtcagagaaggcgtcgtgcagcttggctccatgaagaaggtggcggaggacctgagctacgtggtgatgctgcgccggaagttcggctacctggagagcatcccgggggtgctgctgccgcacccgtcgtcggccgcgttcccggcgggcgccatcgctggccccgccgccgcagacgcggcctgcagctggccgcctggactcgtcatgccgccgccggtggagctctacgacccctacgcccagtcagcggccgcggcggcgcagatgcacatcgtaccgtcgatgagcagcctggaggcgctgctgtcgaagctgccgtcggtcgaccctgcggcggccgcgatggccagcaaagaggagatggacgccgtggagcacggcgagcgccacggcatggccgacgtagtggccgcagggagcggcggcgagagcaccagcgttgctgccgccgccgcagtatcttactacgtgaacgtggccaagcccagcgagggattctagtccgtctccgactctccgtctcaagttggtgcacgtacgtacgcatgcgcctagctagtgggcgtggtagttgcgacgtctctttcctggagcgcgccgcgctgcagcatgattactctacatggaaccaatcatgtgtcgtgctctgtactacgtgtccttggagtagccgtacctcgacgtacgtacgtacgtgcgtgtactgtacccgatcaattggtcgttagataaggtcggtcgacagaggcacgtacgtagctagcttgtagtacattcagtgtggtcgatcggtatatatattgaatgttgtatgtatgcgttctgtgatgcagtgctagcatcacctaatcaaaagacatggcatgcact

SEQ ID NO: 129055 - DNA, 2021 bp, Zea Mays
agagagaggctaatgctatgctatatgctacgtgtataaatcagggcaagagtggtcgctcccccggtggtggactggtggcctggcctcacaagtcacaaccggctgatagcagcagagcgatcaaaagtgaagctaacaagcgagaaaaggaaacacctacttctctcgtctagccacttccatccgtctctagattctagtcgcccttcaacactagctagcctgaaatcaagtgcaggctcgccagctgtggccactgagaagtgacggaaggaagacaagcagctcgccggccggccgggcgccccgtgtgcccccgttctacgagggttgaagtgaagcttcgtagtacgtagtactccatatagcagctgagctcccacttcggagctccatccatcgttagctcccgctgctgctagctggttcgaggcctcctcaagcagcttcttcgtttctgctgtctgcaatggaggagcagctcagcccgctggccgtgacgcacctgctccagcacacgctgcgcagcctctgcggccacgacgacgcgcagtgggtgtacgccgtcttctggcggatcctccccagaaactacccgcccccaaaatgggatctccagggcggcatatacgaccggacaagagggaacaggaggaactggatcctggcatgggaggatggattctgcaacttcgcagcctctgcctgtgaccacgagggcgcagctgctcctgccgccgccgccgcctcctcctcctacacggcggagtgtgctgctgccgggcaggaggccgccaagggcctgcagcctgagctcttcttcaagatgtcccacgacatctacaactacggtgaagggtacgtatttagcagtaaataacactacagtggtttactagtagaggactactggtcaaccatcatatcgcgcgcggtcccgttgcctggtgatgtgcttgtgtgctttgcgttattgcaggttgatagggaaagtggcagccgaccacagccacaagtgggtgttccaggaggcccaggagcacgagatcaacctcatctcctcctggagcaaccctgccgactctcatccgaggacatgggaggctcagttcaagtctggcatcaagaccatcgctctgatcgccgtcagagaaggcgtcgtgcagcttggctccatgaagaaggtggcggaggacctgagctacgtggtgatgctgcgccggaagttcggctacctggagagcatcccgggggtgctgctgccgcacccgtcgtcggccgcgttcccggcgggcgccatcgctggccccgccgccgcagacgcggcctgcagctggccgcctggactcgtcatgccgccgccggtggagctctacgacccctacgcccagtcagcggccgcggcggcgcagatgcacatcgtaccgtcgatgagcagcctggaggcgctgctgtcgaagctgccgtcggtcgaccctgcggcggccgcgatggccagcaaagaggagatggacgccgtggagcacggcgagcgccacggcatggccgacgtagtggccgcagggagcggcggcgagagcaccagcgttgctgccgccgccgcagtatcttactacgtgaacgtggccaagcccagcgagggattctagtccgtctccgactctccgtctcaagttggtgcacgtacgtacgcatgcgcctagctagtgggcgtggtagttgcgacgtctctttcctggagcgcgccgcgctgcagcatgattactctacatggaaccaatcatgtgtcgtgctctgtactacgtgtccttggagtagccgtacctcgacgtacgtacgtacgtgcgtgtactgtacccgatcaattggtcgttagataaggtcggtcgacagaggcacgtacgtagctagcttgtagtacattcagtgtggtcgatcggtatatatattgaatgttgtatgtatgcgttctgtgatgcagtgctagcatcacctaatcaaaagacatggcatgcact

SEQ ID NO: 129056 - DNA, 2261 bp, Zea Mays
agagagaggctaatgctatgctatatgctacgtgtataaatcagggcaagagtggtcgctcccccggtggtggactggtggcctggcctcacaagtcacaaccggctgatagcagcagagcgatcaaaagtgaagctaacaagcgagaaaaggaaacacctacttctctcgtctagccacttccatccgtctctagattctagtcgcccttcaacactagctagcctgaaatcaagtgcaggctcgccagctgtggccactgagaagtgacggaaggaagacaagcagctcgccggccggccgggcgccccgtgtgcccccgttctacgagggttgaagtgaagcttcgtagtacgtagtactccatatagcagctgagctcccacttcggagctccatccatcgttagctcccgctgctgctagctggttcgaggcctcctcaagcagcttcttcgtttctgctgtctgcaatggaggagcagctcagcccgctggccgtgacgcacctgctccagcacacgctgcgcagcctctgcggccacgacgacgcgcagtgggtgtacgccgtcttctggcggatcctccccagaaactacccgcccccaaaatgggatctccagggcggcatatacgaccggacaagagggaacaggaggaactggatcctggcatgggaggatggattctgcaacttcgcagcctctgcctgtgaccacgagggcgcagctgctcctgccgccgccgccgcctcctcctcctacacggcggagtgtgctgctgccgggcaggaggccgccaagggcctgcagcctgagctcttcttcaagatgtcccacgacatctacaactacggtgaagggttgatagggaaagtggcagccgaccacagccacaagtgggtgttccaggaggcccaggagcacgagatcaacctcatctcctcctggagcaaccctgccgactctcatccgaggacatgggaggctcagttcaagtctggcatcaaggtagagccggccgagctggagtctccatttgcgtgactgaaaaagctccgcactgcacgcatgacaccaaagctgaccgtgcacttctttcatcgttccctcttgcagaccatcgctctgatcgccgtcagagaaggcgtcgtgcagcttggctccatgaagaaggtacaccccgccgacactgttctacgcccactccactcagccactgcactgcagctagcgtgacttggtggtgcgtgcatgcatgatttctcgcctcgcgtgcatgcacgcacgacaagacgtacacactaatgtgtacctgcgttgtacgacatcgtgcggcgtgtgtgttgctgcgtgtgctgctgtttgacgaattgctgcgcgtgcatgttttgctcgctgcgccgtatacgtacgcgcgcgcgcaggtggcggaggacctgagctacgtggtgatgctgcgccggaagttcggctacctggagagcatcccgggggtgctgctgccgcacccgtcgtcggccgcgttcccggcgggcgccatcgctggccccgccgccgcagacgcggcctgcagctggccgcctggactcgtcatgccgccgccggtggagctctacgacccctacgcccagtcagcggccgcggcggcgcagatgcacatcgtaccgtcgatgagcagcctggaggcgctgctgtcgaagctgccgtcggtcgaccctgcggcggccgcgatggccagcaaagaggagatggacgccgtggagcacggcgagcgccacggcatggccgacgtagtggccgcagggagcggcggcgagagcaccagcgttgctgccgccgccgcagtatcttactacgtgaacgtggccaagcccagcgagggattctagtccgtctccgactctccgtctcaagttggtgcacgtacgtacgcatgcgcctagctagtgggcgtggtagttgcgacgtctctttcctggagcgcgccgcgctgcagcatgattactctacatggaaccaatcatgtgtcgtgctctgtactacgtgtccttggagtagccgtacctcgacgtacgtacgtacgtgcgtgtactgtacccgatcaattggtcgttagataaggtcggtcgacagaggcacgtacgtagctagcttgtagtacattcagtgtggtcgatcggtatatatattgaatgttgtatgtatgcgttctgtgatgcagtgctagcatcacctaatcaaaagacatggcatgcactct

SEQ ID NO: 129057 - DNA, 103 bp, Zea Mays
gtcttgttgggcacgagatttttttgaaaggagcatattattactctgcttttaagaaagcatataagagatccacacggagcagacacactagagttgagag

SEQ ID NO: 129058 - DNA, 2230 bp, Zea Mays
cgtataaaatctcagaaggttcaacttcaacaaaagatcaagcaagagtctgaacagtttaggtcttggaaggctgcccgtgaaaaggaagtacttcagctcaagaaggaagggagacgaaatgaatatgagatgcacaagctcttggccttaaatcagaggcagaagatggtcttacagaggaaaactgaggaagcagctgctgctacaaaaagattgaaggagttgctggaagcaaagaagtcatcacgggaaacatatggcagtgcaaatggttcggggatgcaggccttaatacgagctattgaggatgaactagaagtcactgtaagagcacacgaattgcgctcatattacgagcgacaaatgcaagagagagcagcaatatccaaggaaatagcaaaactaaaggaggaatcaaagcacaagatcagtgattgtcctcaagctatgtcacctagtgctagaagttctaggatatcagcattagagaatatgttgtgctcatcatctagtgctatggtatctatggcttctcaactgtcagaagcagaggagcgggagcgtgtattcaatggtaaaggtagatggtacaatgtcaggtccctcccagaggcaaagaatataatgaattaccttttccagttagcatcatctgcaaggtctcaagtactggataaagaagtaatttgtaatgaaaaagaacacaccattactgaattgaaggaaaaggtggttgtgcttaatggtggaattaggcagttagaaacacaagtgagggatctaaggagccaaaatacacagcttttcactgcattgaacaatgcaaagaaatctgctaggtcgaatggcactggatttgctcagcgtaagagtgttcgagcttcccagcattttggttatagtaaggacaacttcaattgggtggatgatatggacatttcagacagtgagcactcggatgagttagagaatatgagtgatggatccgattcagactgggtacagtcgaccaggaaagccaaaaaacaccagagaagagtgtctagccattcaaatcctaacctggattgtcaaaatacacaaggcaatgcagaaccagagaagccctcagatgaaaagtgcattttgcccaaatatatttcatcagacggctgttcatgctcaaaatcctcctcatgcaagaccaacaaatgcgagtgcagaggctcaggtgcacaatgcggtgcaggctgtggttgtaaggattccaaatgttctaacagggattcttctatagaaaaagccaatcagggagccatgcttcttcagaacgcgttttctgagaaggattcccaagatgcaaagccaaggaagcctttgattaacattggtaataatatggttaaccaaactgccgagacaaagaagcccaggaaaaactggcgcaagtcgacaattcaactcgtcccaggacctctcctgccgtccgagccagtggccaccgaagctgcccctcgggacagagccgacattcccctcaagctaccgagagccatgtcctcggtgactcctgtggagagcaaccctcctcccctcacagaccgcaatgctgccaaaccggacgaatcagtgagcaccggcagcaagaatagcaccggagctgcagtcacgagggcaccgtctcagctgagaaaaaacgcaaccaccgagaaggagaaccagttgcgataatccgattgctgacatgcagtatccgtgtcgcttaaggccttgttcgtttgtgccggattggtgggtcggaacgattcgtaatcggattgcttctctaatttatataaactttgattagctggaacgattccgggtgcaatccgacacaaacgaacaaggcctaagccttctgtttaacagtggtcagtgggggaggctgcctcggcgtcctttggagtggcatgtagactctggaagggctggcgctgtggggaatgacgtgttctgtggaaagccttagctctgctttggctggaatgctaccttgtataatggaaaagtaacatgctggattaagctatgtcagtctcgtaaatggtctccgttcatattgaacatactgaggaaatcaatctgcgcatctgtatgcttaggctggtagaggtgcgattggtacaaggacatgccactggcaatctgtgcatctgtatgcttagagtggtagaggtgctattggtaaatagggtatgccggtcaa

SEQ ID NO: 129059 - DNA, 867 bp, Zea Mays
gcgacccccgccctatctcctctgactgggcgacctcgcctattcctcgcaaaccatgccgtggtgagcgtgcggtgcgataaaggcaattgccacgacggcacggccgcagaagcggaccagaccctcatccggtggcggcacgagcgcgcatcgcagtagcagcagccacagcgacgacggggcggagggtaaaagaggcaaggcttctccagtttttcgaggttggagaccgtatgctcgagggtgccgttctcgatggtctcctcctccaacagcgcggatgtgtagatattagccacgacctcggtcgcggcgtggagcgaagcctggagaggtccccgcggtagcggggcgtgagcagacgaagggaaggcagcccctgcgccgcgtgggaggaggaggcagatcggggagctgcgcttccagctagagctgatttggtggacatggaattagagtggatctatgtgggagcaatccttccctatttaaatttgaatagagaggggattactttctcatgaatcacttcaatttcatgtccaccaaaccagcccttcagtgacgacaataatctgataatggtgttgagctcagtttcactactagcagacgaatttcatgcgatagaagacgagaacattctatagaacaatctgctaatgctcttgttctcattttttctgattttgcttgaatatgtgtattttctttgtgcaattcggagaaagtgtcatccacagtcctgttggcgttgttgtgtcttttaatatcttggcgccgctgtgtcttttaagattctcacatgtagcaataattcaagcatattggtataatgctgggaacaaggtatcgattagcctt

SEQ ID NO: 129060 - DNA, 302 bp, Zea Mays
tactcaccggcgtggacttgccctcaatttgccacccccgcgcgtgattgttgatcggagaatgccctcccaggatcgcgcacacctcgcccgctcgaatccggactccagacgaagtcgcggtcagaaaatcacagcagcggcaaccaacacacccgttcaccacacttttggttctaatggtggctagaactaaattcaatcgaacggtttagggcacccgagctctccaagctttatagggactgcactaggctggtcaaatccaccaaggccgacgcgcgtcatcaggggagttcgtt

SEQ ID NO: 129061 - DNA, 2625 bp, Zea Mays
cgcgattcccctcttccatcccgattcctccgcccgtgactccccgcgcccgcagcccccgccgccgtcctcgcgacctgcctaggacagctgtcacgcccgcaaatcacgtgaccatgcccttccatgtcctcgcgtcctccactccgcccgcgattcccctccccgcacccgcagcccccgccgtcgtcctcgcggccagccgaggacagccaccgcgcccgcaaatcacacgaccatgcccttccatgcccgcaaatcacgtcaccccttccatccatggcagtcgcgctccctctgcgcccttccatccatggtcgcggatccctacgcgccgcgattcttcccatacgctccctctgcgcccttccatccatggccgcggatccccgatgttgagatctgggagctgaagctggagatctcgcggatgcgggtgcggctgacggcggacgacggacggcgcaagaattgcggcggccggagctcccagtgctccgacggcaaggcccgcaggcggtagaaggcatccttcgcctatgactgatgcttcgctgctggcgtcgacagtggaggcgcgacaggcggtgatcgtggatggatgcggtctcagcgtctggaggatcggtcggagctaagcagggacggtggctgctgacagctgagtgatacgtgtatttctaggaagatcaagcccagagctgtcgcagagccagaagtgcatctacttccacggcaccgtcagcaaggacctcctcacacacaagttggtcatccagctctctaggaagatcaaggacgacatatgaagactggagtactttgaagtttgatgaacaacaaggacatcctcacgcacaagtttgatgaacagtcaacaaaattcttgagccagttcactccaacccaatgggacaaggatcagtggcatcctttcatggggccactgcggtccatccaagtgttgttcatttgtgttgtcttcatgatcgtggagatcaacacattcttccttaagcttgtgtcctgttgccgagttcctcaaaaggacaaagtcgttactgtggttcagtctctacttgaatgatattagtgacaaggtaaaactattcctttattgttaattattttctatatgcatgatggcagtaactaaaatattggattgtgttggacatacaacaagttctagaagccattagctaaccacataatcactgaccttaacccagtgaccatttaacaacgtatataatataaatttacattagatgctttatttttgcactgtagacctattgcacatataagtgctccttagaacttaggttgttattttcagtctcattattccattctttactaaagaattgtacatcaaacaaatttatgtagtacatatattgcagaggtcctcaaaatctacaccaagttatgtcagggactatatctccactcaactcattttaaccttgtacatttcaatcaaatccaaatacatgtgaaataaatgtagtaggttactctgaccagtgttgcgctcgcgcgccagcatgctcggactaaccaacgaaaaaggtgaagtgggatggtataccatttgcaattgacatttatggtttttgctacgctggcactcagtgtttccaaatatctattagtcaatgtgcgatcgtaccaaattcaacagggctctctacatatggtatgtataactatctcaatttgaactgcattctggtgggagtcgctcttattgtttagtaatcatttttctcaatgttatgtctaaccgtgttattcaattttgcaatatgcacggcaatttatggtgctatatctattataggctacctcatgtttggagacaagatgctctcataaataactttcaatcttctgaaagattcatttgcagcaaaagttgcacgatggaccacgataactattattgtcggtttctctgattcaattaagtgggaacccttggtagtgattcaattaagtgagaagtgagaaccctcattgtgctatttttttgtttcaggtgatcattcctttcacaaagtatccttacacatcttagttatcaactctggttgttatctatctttgtagccgaagaaacaatcctgagaaagaatggaaagctccttggctaggaataatgtttctaagtggaatcacctgggttatgcgagaagcacatcaatggattccactggtcctctgttagctggtaggagaagtagcagacatggctcaagtgagatgggggactgcatattcagctcaatgagacattttcttcagttggcgaatcaattactaggagaatttgttagatattaagattaatagtaacatgtattaattcaattttatataatcgttgtgcaccaacattttatttgaaagggagaaataaatcctagcaaaattgactatgggagaagggatataggaacaaaaatggaatatgggagagggaacaaactcatcggcctatgcgccttgattagaatgtctcctaaaagttttaggtattgaaaatatgataggacatttattgtaatatgtttattttctgaaatactaattttgatgtatagaatattgacaaaa

SEQ ID NO: 129062 - DNA, 3045 bp, Zea Mays
cgcgattcccctcttccatcccgattcctccgcccgtgactccccgcgcccgcagcccccgccgccgtcctcgcgacctgcctaggacagctgtcacgcccgcaaatcacgtgaccatgcccttccatgtcctcgcgtcctccactccgcccgcgattcccctccccgcacccgcagcccccgccgtcgtcctcgcggccagccgaggacagccaccgcgcccgcaaatcacacgaccatgcccttccatgcccgcaaatcacgtcaccccttccatccatggcagtcgcgctccctctgcgcccttccatccatggtcgcggatccctacgcgccgcgattcttcccatacgctccctctgcgcccttccatccatggccgcggatccccgatgttgagatctgggagctgaagctggagatctcgcggatgcgggtgcggctgacggcggacgacggacggcgcaagaattgcggcggccggagctcccagtgctccgacggcaaggcccgcaggcggtagaaggcatccttcgcctatgactgatgcttcgctgctggcgtcgacagtggaggcgcgacaggcggtgatcgtggatggatgcggtctcagcgtctggaggatcggtcggagctaagcagggacggtggctgctgacagctgagtgatacgtgtatttctaggaagatcaagcccagagctgtcgcagagccagaagtgcatctacttccacggcaccgtcagcaaggacctcctcacacacaagttggtcatccagctctctaggaagatcaaggacgacatatgaagactggagtactttgaagtttgatgaacaacaaggacatcctcacgcacaagtttgatgaacagtcaacaaaattcttgagccagttcactccaacccaatgggacaaggatcagtggcatcctttcatggggccactgcggtccatccaagtgttgttcatttgtgttgtcttcatgatcgtggagatcaacacattcttccttaagcttgtgtcctgttgccgagttcctcaaaaggacaaagtcgttactgtggttcagtctctacttgaatgatattagtgacaaggtaaaactattcctttattgttaattattttctatatgcatgatggcagtaactaaaatattggattgtgttggacatacaacaagttctagaagccattagctaaccacataatcactgaccttaacccagtgaccatttaacaacgtatataatataaatttacattagatgctttatttttgcactgtagacctattgcacatataagtgctccttagaacttaggttgttattttcagtctcattattccattctttactaaagaattgtacatcaaacaaatttatgtagtacatatattgcagaggtcctcaaaatctacaccaagttatgtcagggactatatctccactcaactcattttaaccttgtacatttcaatcaaatccaaatacatgtgaaataaatgtagtaggttactctgaccagtgttgcgctcgcgcgccagcatgctcggactaaccaacgaaaaaggtgaagtgggatggtataccatttgcaattgacatttatggtttttgctacgctggcactcagtgtttccaaatatctattagtcaatgtgcgatcgtaccaaattcaacagggctctctacatatggtatgtataactatctcaatttgaactgcattctggtgggagtcgctcttattgtttagtaatcatttttctcaatgttatgtctaaccgtgttattcaattttgcaatatgcacggcaatttatggtgctatatctattataggctacctcatgtttggagacaagatgctctcataaataactttcaatcttctgaaagattcatttgcagcaaaagttgcacgatggaccacgataactattattgtcggtttctctgattcaattaagtgggaacccttggtagtgattcaattaagtgagaagtgagaaccctcattgtgctatttttttgtttcaggtgatcattcctttcacaaaatattctttagtgataaaaccattagcttagagtatggaagggttgtgtccagcaaggtttatgacggatagtcttcgctgttatgctgcgtactcgatgtgttgcctttctcctaccattctttggtacataactaacacattatgcttaaacatggagtcattatcttataaattctttttctatcactaatcattgttttggttcctatttggcataaattgtctaaatacttataaatgtgttgtcctatattttttgttctggacattgtttggttcccctgcttccagaatttatatgacttgtgaattttaaatgaaagaaaagaaaggaaaattatgaatcatggattattgattcatgccataacattgacttttgtgcagggttgttatctatctttgtagccgaagaaacaatcctgagaaagaatggaaagctccttggctaggaataatgtttctaagtggaatcacctgggttatgcgagaagcacatcaatggattccactggtcctctgttagctggtaggagaagtagcagacatggctcaagtgagatgggggactgcatattcagctcaatgagacattttcttcagttggcgaatcaattactaggagaatttgttagatattaagattaatagtaacatgtattaattcaattttatataatcgttgtgcaccaacattttatttgaaagggagaaataaatcctagcaaaattgactatgggagaagggatataggaacaaaaatggaatatgggagagggaacaaactcatcggcctatgcgccttgattagaatgtctcctaaaagttttaggtattgaaaatatgataggacatttattgtaatatgtttattttctgaaatactaattttgatgtatagaatattgacaaaatcttcatgtcagtttcccttcccaagtaagaatagagcaatgcacttgttctgcccgtaa

SEQ ID NO: 129063 - DNA, 2811 bp, Zea Mays
cgcgattcccctcttccatcccgattcctccgcccgtgactccccgcgcccgcagcccccgccgccgtcctcgcgacctgcctaggacagctgtcacgcccgcaaatcacgtgaccatgcccttccatgtcctcgcgtcctccactccgcccgcgattcccctccccgcacccgcagcccccgccgtcgtcctcgcggccagccgaggacagccaccgcgcccgcaaatcacacgaccatgcccttccatgcccgcaaatcacgtcaccccttccatccatggcagtcgcgctccctctgcgcccttccatccatggtcgcggatccctacgcgccgcgattcttcccatacgctccctctgcgcccttccatccatggccgcggatccccgatgttgagatctgggagctgaagctggagatctcgcggatgcgggtgcggctgacggcggacgacggacggcgcaagaattgcggcggccggagctcccagtgctccgacggcaaggcccgcaggcggtagaaggcatccttcgcctatgactgatgcttcgctgctggcgtcgacagtggaggcgcgacaggcggtgatcgtggatggatgcggtctcagcgtctggaggatcggtcggagctaagcagggacggtggctgctgacagctgagtgatacgtgtatttctaggaagatcaagcccagagctgtcgcagagccagaagtgcatctacttccacggcaccgtcagcaaggacctcctcacacacaagttggtcatccagctctctaggaagatcaaggacgacatatgaagactggagtactttgaagtttgatgaacaacaaggacatcctcacgcacaagtttgatgaacagtcaacaaaattcttgagccagttcactccaacccaatgggacaaggatcagtggcatcctttcatggggccactgcggtccatccaagtgttgttcatttgtgttgtcttcatgatcgtggagatcaacacattcttccttaagcttgtgtcctgttgccgagttcctcaaaaggacaaagtcgttactgtggttcagtctctacttgaatgatattagtgacaaggtaaaactattcctttattgttaattattttctatatgcatgatggcagtaactaaaatattggattgtgttggacatacaacaagttctagaagccattagctaaccacataatcactgaccttaacccagtgaccatttaacaacgtatataatataaatttacattagatgctttatttttgcactgtagacctattgcacatataagtgctccttagaacttaggttgttattttcagtctcattattccattctttactaaagaattgtacatcaaacaaatttatgtagtacatatattgcagaggtcctcaaaatctacaccaagttatgtcagggactatatctccactcaactcattttaaccttgtacatttcaatcaaatccaaatacatgtgaaataaatgtagtaggttactctgaccagtgttgcgctcgcgcgccagcatgctcggactaaccaacgaaaaaggtgaagtgggatggtataccatttgcaattgacatttatggtttttgctacgctggcactcagtgtttccaaatatctattagtcaatgtgcgatcgtaccaaattcaacagggctctctacatatggtatgtataactatctcaatttgaactgcattctggtgggagtcgctcttattgtttagtaatcatttttctcaatgttatgtctaaccgtgttattcaattttgcaatatgcacggcaatttatggtgctatatctattataggctacctcatgtttggagacaagatgctctcataaataactttcaatcttctgaaagattcatttgcagcaaaagttgcacgatggaccacgataactattattgtcggtttctctgattcaattaagtgggaacccttggtagtgattcaattaagtgagaagtgagaaccctcattgtgctatttttttgtttcaggtgatcattcctttcacaaagtatccttacacatcttagttatcaactctatattctttagtgataaaaccattagcttagagtatggaagggttgtgtccagcaaggtttatgacggatagtcttcgctgttatgctgcgtactcgatgtgttgcctttctcctaccattctttgggttgttatctatctttgtagccgaagaaacaatcctgagaaagaatggaaagctccttggctaggaataatgtttctaagtggaatcacctgggttatgcgagaagcacatcaatggattccactggtcctctgttagctggtaggagaagtagcagacatggctcaagtgagatgggggactgcatattcagctcaatgagacattttcttcagttggcgaatcaattactaggagaatttgttagatattaagattaatagtaacatgtattaattcaattttatataatcgttgtgcaccaacattttatttgaaagggagaaataaatcctagcaaaattgactatgggagaagggatataggaacaaaaatggaatatgggagagggaacaaactcatcggcctatgcgccttgattagaatgtctcctaaaagttttaggtattgaaaatatgataggacatttattgtaatatgtttattttctgaaatactaattttgatgtatagaatattgacaaaatcttcatgtcagtttcccttcccaagtaagaatagagcaatgcacttgttctgcccgtaa

SEQ ID NO: 129064 - DNA, 2781 bp, Zea Mays
cgcgattcccctcttccatcccgattcctccgcccgtgactccccgcgcccgcagcccccgccgccgtcctcgcgacctgcctaggacagctgtcacgcccgcaaatcacgtgaccatgcccttccatgtcctcgcgtcctccactccgcccgcgattcccctccccgcacccgcagcccccgccgtcgtcctcgcggccagccgaggacagccaccgcgcccgcaaatcacacgaccatgcccttccatgcccgcaaatcacgtcaccccttccatccatggcagtcgcgctccctctgcgcccttccatccatggtcgcggatccctacgcgccgcgattcttcccatacgctccctctgcgcccttccatccatggccgcggatccccgatgttgagatctgggagctgaagctggagatctcgcggatgcgggtgcggctgacggcggacgacggacggcgcaagaattgcggcggccggagctcccagtgctccgacggcaaggcccgcaggcggtagaaggcatccttcgcctatgactgatgcttcgctgctggcgtcgacagtggaggcgcgacaggcggtgatcgtggatggatgcggtctcagcgtctggaggatcggtcggagctaagcagggacggtggctgctgacagctgagtgatacgtgtatttctaggaagatcaagcccagagctgtcgcagagccagaagtgcatctacttccacggcaccgtcagcaaggacctcctcacacacaagttggtcatccagctctctaggaagatcaaggacgacatatgaagactggagtactttgaagtttgatgaacaacaaggacatcctcacgcacaagtttgatgaacagtcaacaaaattcttgagccagttcactccaacccaatgggacaaggatcagtggcatcctttcatggggccactgcggtccatccaagtgttgttcatttgtgttgtcttcatgatcgtggagatcaacacattcttccttaagcttgtgtcctgttgccgagttcctcaaaaggacaaagtcgttactgtggttcagtctctacttgaatgatattagtgacaaggtaaaactattcctttattgttaattattttctatatgcatgatggcagtaactaaaatattggattgtgttggacatacaacaagttctagaagccattagctaaccacataatcactgaccttaacccagtgaccatttaacaacgtatataatataaatttacattagatgctttatttttgcactgtagacctattgcacatataagtgctccttagaacttaggttgttattttcagtctcattattccattctttactaaagaattgtacatcaaacaaatttatgtagtacatatattgcagaggtcctcaaaatctacaccaagttatgtcagggactatatctccactcaactcattttaaccttgtacatttcaatcaaatccaaatacatgtgaaataaatgtagtaggttactctgaccagtgttgcgctcgcgcgccagcatgctcggactaaccaacgaaaaaggtgaagtgggatggtataccatttgcaattgacatttatggtttttgctacgctggcactcagtgtttccaaatatctattagtcaatgtgcgatcgtaccaaattcaacagggctctctacatatggtatgtataactatctcaatttgaactgcattctggtgggagtcgctcttattgtttagtaatcatttttctcaatgttatgtctaaccgtgttattcaattttgcaatatgcacggcaatttatggtgctatatctattataggctacctcatgtttggagacaagatgctctcataaataactttcaatcttctgaaagattcatttgcagcaaaagttgcacgatggaccacgataactattattgtcggtttctctgattcaattaagtgggaacccttggtagtgattcaattaagtgagaagtgagaaccctcattgtgctatttttttgtttcaggtgatcattcctttcacaaaatattctttagtgataaaaccattagcttagagtatggaagggttgtgtccagcaaggtttatgacggatagtcttcgctgttatgctgcgtactcgatgtgttgcctttctcctaccattctttgggttgttatctatctttgtagccgaagaaacaatcctgagaaagaatggaaagctccttggctaggaataatgtttctaagtggaatcacctgggttatgcgagaagcacatcaatggattccactggtcctctgttagctggtaggagaagtagcagacatggctcaagtgagatgggggactgcatattcagctcaatgagacattttcttcagttggcgaatcaattactaggagaatttgttagatattaagattaatagtaacatgtattaattcaattttatataatcgttgtgcaccaacattttatttgaaagggagaaataaatcctagcaaaattgactatgggagaagggatataggaacaaaaatggaatatgggagagggaacaaactcatcggcctatgcgccttgattagaatgtctcctaaaagttttaggtattgaaaatatgataggacatttattgtaatatgtttattttctgaaatactaattttgatgtatagaatattgacaaaatcttcatgtcagtttcccttcccaagtaagaatagagcaatgcacttgttctgcccgtaa

SEQ ID NO: 129065 - DNA, 723 bp, Zea Mays
gcgctctgtttaatcgaccactacttcgcggacctcaccctctggccgacgctgcaacgcttcgacagcggctcgctgcacgattttctgcgcgagcaaaccggaattgcgctgcgccgcagccagacgcggatcagcgcccgccgcgcccaggccaaagagtgccagcgtcttgaaatcccgaatatgtcgccgctgctgtgcgtgcgcacccttaaccaccgtgacggtgaaagcagcccggcggagtactccgtcagcctgacgcgcgccgacatgattgaattcactatggagcactgaatgcacgcagataccgcgacccgccagcactggatgtccgtgctggcgcacagccaaccggctgaactggcagcacgcctgaacgcgctaaacatcaccgccgactatgaggtgatccgcgccgctgaaactggcctggtacagattcaggcgcggatgggcggcaccggcgaacgtttttttgccggcgacgccacgctgacccgcgccgccgtgcgcctgactgacggcacgctcggctacagctgggtgcaggggcgtgataaacagcacgccgaacgctgcgcgctgattgacgcgctgatgcagcaatctcgccactttcaaaacttatcagaaacccttattgccccgctggacgctgaccgtatggcacgcattgccgcacgccaggccgaagtgaacgccagccgggtcgac

SEQ ID NO: 129066 - DNA, 933 bp, Zea Mays
atggtgctcactggcagcggcatgctttgcactaccgctaacgccgaagagtattatttcgaccccattatgctggaaaccacaaaaagtggtatgcaaacaaccgatctgtcgcgtttttcaaaaaaatatgcacaactaccaggaacttatcaggttgatatctggctgaataaaaagaaggtttcacagaaaaaaattacatttaccgccaatgcagagcaacttctgcagccacagtttacggtagaacaactacgtgagctgggtattaaggtggatgaaatcccggcgctggctgaaaaagatgacgatagcgtgatcaactcgcttgaacaaatcattcccggtacagctgctgaatttgatttcaatcatcagcaacttaatttgagcattccccaaattgcactgtaccgtgatgcaagaggttacgtctccccttctcgttgggacgatggtataccaacgctgtttaccaactactcgtttacaggttctgataaccgttaccgccagggcaatcgtagccaacgacagtacctgaatatgcaaaatggtgctaattttggcccctggcgattacgcaactattccacatggacacgcaacgatcagacatcaagctggaataccatcagtagttatttacaacgtgatatcaaggcgttgaagtctcagttgcttctgggagaaagcgccaccagcggcagtattttttccagctacacctttactggcgtgcaactcgcttccgacgataatatgttgccaaacagccagcgcggatttgccccaacggtacgcggtatcgcaaacagtagtgcaatcgtgactatcaggcaaaatgtttatgtgatctatcaaagcaacgtgtcagcgggtgcctttgaaattaacgatctctacccctcttccacagcggcgatttag

SEQ ID NO: 129067 - DNA, 1890 bp, Zea Mays
cacggttccagccccacccggaaaaggaagccaaaaagccacgctctcaccaccgcagccgcttcgccgtcccttgccttgcctccctcgcacgcccatctccaccgtcaccagccacccccgggcaccggctcccgtcgccaccactgtcaactcagctgagcagctatcctcctcctcctcctcgaattctctgtgtctcgcttgcttaccttcctccgctccgctgcaatcccactgctgacccgggctccacccgaaaatgcccacgcattttggtctctagtgcttggagccttctcggttgcaccaaatttggcctttttaggtggggtggggggctccgatcttttcagctacagcttttatttgcatgtttcttggttgggtttgtgccacagatttgagtcgccctccgcacatgttgatcagatgagttgtgggtgtctcctcccaatccgagattgctggagatggttgtagcagtagcttcgtgccaatcttcctccacgcccctgtcaccctacccgtcttcgcccagcctccgcagcttcatcagggacgccccgccttacagcacccagaccccgccgcaggtgcagacggctggtgtcggtggcggcggcggcaatggaaagatcagccctgcggtgctgttcatcatagtgatccttgcggttatcttcttcatctccgggctgctccacctcctcgtgaggatactgatgaggaagcagcacggccgcggtgccaccatgggggagtctgcgccgtcgccgccccggaccggcgcgcgggccgcggcaatggaccggcagctgcaggagctgttccatctgcacgactccgggctcgatcaggcgttcatcgatgcgctgcccgtgttcgcgtaccgtgaggttatcggtggcaacaaagagccgttcgactgcgcggtgtgcttgtgcgaattcgacggggaggacaggctcaggctgttgccggtgtgcgggcatgccttccatctgcagtgcatagatacatggctgctgtccaattcgacgtgcccgctttgccgtggcacgctctttgtccccgggatgactgtagacgacctgctgttcgatgattttgatgagaggttggaggagcctctaccggaggagtgtgaggatggacaccaagtttccaggcagaaacccatggatgaggagcagccaatggccgagaagagggtgtttccagtaaggcttgggaagttcaagagtgttgcaaatcagggtgccatcggcggcgtggttgtcaatggtaatgaagctggtatagtgagtaaggaggcaggggagagtagcagtagcagcttggatgcaaggagatgcttctccatgggcacttaccagtatgttcttggggtttctgaacttcgagtggctcttcagacaggtcatggcagaaacggcgcgagcagcaggtttaaaggaagagttgctggcttaagttcggtcaatgctgacattatggagggcaagaggatttgtgcgaggagcaaaggcgagagcttctctgtatcgaagatttggcagtggtctagtctgaagggcaagctgccagctcctccagacacttgctcagatactgggagcctagcatggatgaaaagaaatgctgctggagataagtccaatatgtgactctgtctataatcctttgttttttttcctgcctgatgttggctgctaagttgcttagctctagctatttccacctgatttagggtgtctcaacaatcattcatcaagggatcaattttgacaggcttgctatattgcacatagtttgttattgttcacaatggtgtagtctatattcccatgttgttggtattccaggaatccccttcagaagcctatc

SEQ ID NO: 129068 - DNA, 543 bp, Zea Mays
tagtgacacaagatttatactagtccgggctctcctaaaagataatacccgtccgtggcttcttttttatatttgtctgtgcccccttaggggcatctcccctcccttttatagtcgaaggaaggggttagttacaagaaaaatgaatatagatctcctcctagattaccggatctatctctatctacaactccttatatctcgagtgttgttgttaaaatgcaaaatattcagataagacctccttatcacccaatcttctctccaatgtaggattctagacactcaagtctgagtccgaaccctagaggaatccgagtccgagttactgaaaggatctgatccacgagcagaaccgagttgggcccatagtcttgcttctcgaattgcttgagtgcttggggtacccccgatacatatcattcacggtgtatgtatatactctagtcataataataaatttgaaatgaagcaacagtttaaattgttttgcagcaaacaaatgtaaataaggacattgactgataccttaacaaaaagaag

SEQ ID NO: 129069 - DNA, 1059 bp, Zea Mays
catatgatctttatctgtcacactggttgctgcaaatgctacttttcgccacttctactgaatagtttggttgatgtgcaggcggagtggatggcaccagaagtacttcggaatgaacgatcggatgaaaaatgcgatgtttttagctacggagtcatattatgggaactttgtacactactacagccttgggaaggtatgaatgccatgcaagtggttggtgcagttgggtttcagaatcgtcgccttgaaatcccagataacatcgatcctgctgtagcagagataatagtgcaatgctggcatacggatccaaagttgcggccatcatttgcagatatcatggctgcactaaaaccactgttgaagaacttgaccagcaatctagcccctaagagagtgcaacaaacagatgagtgagacaaggaggttgacaaccgcccaacgtccgtaacttgtaggattatttctgtacattaacagcaagcatgtgttcaaagatgaaaaaagatgtgatgttggtatgtttgctactctatccagctagaggtgcaacatttcggattggcaaagccatggtaagcttaaggccgcttgccattgatccacattcgaagatcagtgctggtatacccgtgaaagaagacggaggagggctgtgatctatgcaaagaattgtgcagaacagtaatgttttggcactgtggaacgattgaaccaggaactcgtatgggtggcagaccggggcttttgttcataccgtccctttttttttcttttgttgcctcaccgaatggtgggtattattatgtgtaaggtggcgattggttcacgaaacgtaatgtaaatgacaacggtaatgattcatgtttgattaccagcggtaacaagtttgaataggactatatcagtttctagggtgatatatgattacattacacataaacaaatatggtttacgttatctgttaccgttgaccttacaaatacgtgaacctgccaacctgaaaagagagggaaaggttgccctgcttgtgttgcgagtttggactcacctca

SEQ ID NO: 129070 - DNA, 1323 bp, Zea Mays
ttgaccttacaaatacgtgaacctgccaacctgaaaagagagggaaaggttgccctgcttgtgttgcgagtttggactcacctcacagctgacgcgtgtccacttcgcctctcaccatccgtcgtgaacagtggatcccgagcgcgctgggcgttcccgcttccattccatctaaccagttcccagccacgaaaactccgcaaacatcgcacgcacgtacgccgtttccatgccatgcatggacaccacgcgctagttaacccgagatcggccccccatcgctgatgccaggaccgatcacccgacgacgcacaaacaccactccgcacggattagccgacgccgacggtgagcagcccatcagagcgcgacgatggcgggcgtcttttggggaggcgggagggcggacgaggtggctgacttcgacgagtacgaccccaccccctacggcggcggctacgacatcgccctcaccttcgggcgtccgctgccgccctccgaggagacctgctacccgatctccaccgcctcctcgtacgaccgtccgcagcagcacggaggccggaggcccggggccgaggagtcccacggctcagctgcagggtacggtggaggcggcggcgggtacgcgggggcggggcggcctcatcagcttcataaggaggaggagacccacggctacgggaggaaggggggacacgacgacgaccacgagcagcaggcgtaccgaaagccgaagccctcgtacgggcacggggacggcgacgacgaccaccaggcgtacaggaagccgaagccgtcgtacggggacgagaggcccagctccggccggaagaagaagaatgacgacgacgatgactctgatgacgacggcgcgaggaagccacgttacaaaaagaaagacgacgacgactcggatgacgatgacaggaagaagcgctacgagaagaacgaccgccgccgccgccacgactatgacgattgagctatatgcatgcagtctcgtatatacacatgtgctcgagtcacgcgttatgcaatgtatcatccccattgcatctcctactagcagtactgtagtaaataagcgaagctgagatgcagggggatgcatatggtggacacagttttgatttcaagtgacgccgctttacagcctacttcttccttgtttttgttcttcaccttttgtactgttctgatggtaacctgtatactcgcgcggttacttgcgaccattgtttttttttgaacaaaatattactgtcgattttcaggttcacagtaactaaaaaaaacgtcatatacatgacatgctatgct

SEQ ID NO: 129071 - DNA, 1385 bp, Zea Mays
gatttcacaaggcgtccgtccgctgaaacccacagccttttgcactctctcaccagggcttgctgctgcttgcaacctcaccctcctctccgggagagcctctcgcctacagctccccagctgcccttccacgccacgccgaccaaggcgccaaaagcaaacgctacgccagtacgtggtgagggagcttgtcacggctgcgttgcttgccacctcgtcttcgcggaggtcctcgccgcgacgacgacgatggaggttgccgaggcgcccgacgaggacggcctggacgagcgtggcgtggcgctgcacctgcacctcccgaggctgctggccggcgtcgtctccggcgccctcactggcctcttcgctctcggtactttacttgcactgtcgcacatgctcctcacgcctcttgccccgttttagccgtcctgaggctgagagctcgacgttggctttgtggtgcatgtgccgcgcccccccgcgcgcgcgtaaagctggagctctgacgggggcggtcaccggcgcggtggcgggcagggcttccgacagcggcggcgttctgcggggagctgggctgggggcggtcgccggagccgtcctctccatcgaggttctcgaggcttctcgcgcctactggtgctcggaccggctgcggctgggctcgcacggcgcgtcgtccatggctaatttcattgagcagcttcttcgtgcccggtttgtgcaagagcagtttacaacttcaggatatgcatcatatcgctggcaggtgagcatatcggattttggtcacgatgacctatacgacatattcggggacatctcatcgaaagggctcccacaagagtcgctgaagaaactaccacactatgtggtcactgaccagacgcgcgcggactcgttcggccagatcctgtcctgccctatctgtctacaggacatcgtagccggcgacacagcgaggaggctgcccagttgctcccacactttccaccagccttgcgtggatagatggctcgtggatcgcggatcgtgccccgtctgcaggcaggacgtgtgagatagccagataggtgatcgacctgagtagatggagcaatagctgggtgatgcgaaatgtttgctcctacactaagttcatatatatatatagctactagagagaagatacgtactgtggtgtaaattagcagagaatctgcctgttctgttccactaccagccagcgtaaacggccgtgcgcatcggacttcgtttcttgcacccggttccaacgtgtaatgaaataataacactgctgttgggaagcagtactacctgtttctgtagaatctgtctgtatgtctgtttggcactctgcgtagtttctggaacagattccattc

SEQ ID NO: 129072 - DNA, 1290 bp, Zea Mays
cacaaggcgtccgtccgctgaaacccacagccttttgcactctctcaccagggcttgctgctgcttgcaacctcaccctcctctccgggagagcctctcgcctacagctccccagctgcccttccacgccacgccgaccaaggcgccaaaagcaaacgctacgccagtacgtggtgagggagcttgtcacggctgcgttgcttgccacctcgtcttcgcggaggtcctcgccgcgacgacgacgatggaggttgccgaggcgcccgacgaggacggcctggacgagcgtggcgtggcgctgcacctgcacctcccgaggctgctggccggcgtcgtctccggcgccctcactggcctcttcgctctcgctggagctctgacgggggcggtcaccggcgcggtggcgggcagggcttccgacagcggcggcgttctgcggggagctgggctgggggcggtcgccggagccgtcctctccatcgaggttctcgaggcttctcgcgcctactggtgctcggaccggctgcggctgggctcgcacggcgcgtcgtccatggctaatttcattgagcagcttcttcgtgcccggtttgtgcaagagcagtttacaacttcaggatatgcatcatatcgctggcaggtgagcatatcggattttggtcacgatgacctatacgacatattcggggacatctcatcgaaagggctcccacaagagtcgctgaagaaactaccacactatgtggtcactgaccagacgcgcgcggactcgttcggccagatcctgtcctgccctatctgtctacaggacatcgtagccggcgacacagcgaggaggctgcccagttgctcccacactttccaccagccttgcgtggatagatggctcgtggatcgcggatcgtgccccgtctgcaggcaggacgtgtgagatagccagataggtgatcgacctgagtagatggagcaatagctgggtgatgcgaaatgtttgctcctacactaagttcatatatatatatagctactagagagaagatacgtactgtggtgtaaattagcagagaatctgcctgttctgttccactaccagccagcgtaaacggccgtgcgcatcggacttcgtttcttgcacccggttccaacgtgtaatgaaataataacactgctgttgggaagcagtactacctgtttctgtagaatctgtctgtatgtctgtttggcactctgcgtagtttctggaacagattccattccacccgtgtcggcaacggcgatattcttgctgtc

SEQ ID NO: 129073 - DNA, 1544 bp, Zea Mays
ccgctgaaacccacagccttttgcactctctcaccagggcttgctgctgcttgcaacctcaccctcctctccgggagagcctctcgcctacagctccccagctgcccttccacgccacgccgaccaaggcgccaaaagcaaacgctacgccagtacgtggtgagggagcttgtcacggctgcgttgcttgccacctcgtcttcgcggaggtcctcgccgcgacgacgacgatggaggttgccgaggcgcccgacgaggacggcctggacgagcgtggcgtggcgctgcacctgcacctcccgaggctgctggccggcgtcgtctccggcgccctcactggcctcttcgctctcgctggagctctgacgggggcggtcaccggcgcggtggcgggcagggcttccgacagcggcggcgttctgcggggagctgggctgggggcggtcgccggagccgtcctctccatcgaggttctcgaggcttctcgcgcctactggtgctcggaccggctgcggctgggctcgcacggcgcgtcgtccatggtatatagtaatatataagcttcttttcttccatgcccggtctttgctctgttcagctgtgtttgctttcggttgcgtattcttgtaaattacggttcttgattgggggcgccgttggaatggacgttaggtgtgagcgtaaatactaggccatctcttcaacgtcatcgtgtagtatgtcagtaggtgtgagagtgactgttactagtagtacttcatgaggttcccttttgtttcattaaaaaaaagagcttctcttgtgtgcactactattgcttggtcgtttgaggcctactgtatatcataaatatgagttaatttggtgtgcaggctaatttcattgagcagcttcttcgtgcccggtttgtgcaagagcagtttacaacttcaggatatgcatcatatcgctggcaggtgagcatatcggattttggtcacgatgacctatacgacatattcggggacatctcatcgaaagggctcccacaagagtcgctgaagaaactaccacactatgtggtcactgaccagacgcgcgcggactcgttcggccagatcctgtcctgccctatctgtctacaggacatcgtagccggcgacacagcgaggaggctgcccagttgctcccacactttccaccagccttgcgtggatagatggctcgtggatcgcggatcgtgccccgtctgcaggcaggacgtgtgagatagccagataggtgatcgacctgagtagatggagcaatagctgggtgatgcgaaatgtttgctcctacactaagttcatatatatatatagctactagagagaagatacgtactgtggtgtaaattagcagagaatctgcctgttctgttccactaccagccagcgtaaacggccgtgcgcatcggacttcgtttcttgcacccggttccaacgtgtaatgaaataataacactgctgttgggaagcagtactacctgtttctgtagaatctgtctgtatgtctgtttggcactc

SEQ ID NO: 129074 - DNA, 1265 bp, Zea Mays
ccgctgaaacccacagccttttgcactctctcaccagggcttgctgctgcttgcaacctcaccctcctctccgggagagcctctcgcctacagctccccagctgcccttccacgccacgccgaccaaggcgccaaaagcaaacgctacgccagtacgtggtgagggagcttgtcacggctgcgttgcttgccacctcgtcttcgcggaggtcctcgccgcgacgacgacgatggaggttgccgaggcgcccgacgaggacggcctggacgagcgtggcgtggcgctgcacctgcacctcccgaggctgctggccggcgtcgtctccggcgccctcactggcctcttcgctctcgctggagctctgacgggggcggtcaccggcgcggtggcgggcagggcttccgacagcggcggcgttctgcggggagctgggctgggggcggtcgccggagccgtcctctccatcgaggttctcgaggcttctcgcgcctactggtgctcggaccggctgcggctgggctcgcacggcgcgtcgtccatggctaatttcattgagcagcttcttcgtgcccggtttgtgcaagagcagtttacaacttcaggatatgcatcatatcgctggcaggtgagcatatcggattttggtcacgatgacctatacgacatattcggggacatctcatcgaaagggctcccacaagagtcgctgaagaaactaccacactatgtggtcactgaccagacgcgcgcggactcgttcggccagatcctgtcctgccctatctgtctacagcgtcctcttcgtccgtcttgcaggacatcgtagccggcgacacagcgaggaggctgcccagttgctcccacactttccaccagccttgcgtggatagatggctcgtggatcgcggatcgtgccccgtctgcaggcaggacgtgtgagatagccagataggtgatcgacctgagtagatggagcaatagctgggtgatgcgaaatgtttgctcctacactaagttcatatatatatatagctactagagagaagatacgtactgtggtgtaaattagcagagaatctgcctgttctgttccactaccagccagcgtaaacggccgtgcgcatcggacttcgtttcttgcacccggttccaacgtgtaatgaaataataacactgctgttgggaagcagtactacctgtttctgtagaatctgtctgtatgtctgtttggcactctgcgtagtttctggaacagattccattc

SEQ ID NO: 129075 - DNA, 117 bp, Zea Mays
atgtcaaagtttcagaactgcaaaagcttgatatccagcaaagcctggcagatggagagtgatcgtgcttttaacttcttccctaacacagataggtccctgttcctgcttctttga

SEQ ID NO: 129076 - DNA, 2684 bp, Zea Mays
gggatggtccaaggagagcttggggctcgctgccacctcgcgcgccagcgcctaaataaatcactcccacgcacacccaccaccgcgccgagcacctcctccttcccttccttctctctcccaccctcctcactagctctatctagctgagtgaactgaacagcccactggctcgtcttagctaagctcagctgtaaagctaaggttcggagtagctagcgtggtggccggagagtgtagcgagcggcgttcagctcaccgggggctgctgggtgagtgagggagccagcgtcgtgagagcgctccaagatgattacggggacggacttctaccacgtcatgacggccgtggtgccgctgtacgtggcgatgatcctggcctacgggtcggtgcggtggtggcgcatcttctcgccggaccagtgctccgggatcaaccgcttcgtggcgctcttcgcggtgccgctgctgtccttccacttcatctccaccaacaacccctacaccatgaacctgcgcttcatcgccgccgacacgctgcagaagctcatggtgctggccatgctcaccgcgtggagccacctcagccgccggggcagcctggagtggaccatcacgctcttctccctctccacgctgcccaacacgctcgtcatgggcatccccctgctcaagggcatgtacggcgacttctccggcagcctcatggtgcagatcgtcgtgctccagtgcatcatctggtacacgctcatgctcttcatgttcgagtaccgcggcgcgcggatgctcatcaccgagcagttcccggacaacgccggggccatcgcctccatcgtcgtcgacccggacgtggtctccctcgacggccgcagggacgccatcgagacggaggccgaggtcaaggaggacggcaggatacacgtcaccgtgcgccgctccaacgcctcgcgctccgacatctactcgcgccgctccatgggcttctccagcaccacgccgcgccccagcaacctgaccaacgccgagatctactcgctgcagtcgtcgcgcaacccgaccccgcggggctccagcttcaaccacaacgacttctactccatggtcggccgcagctccaacttcggcgcggccgacgcgttcggcatccgcaccggcgccacgccgcgcccgtccaactacgaggacgacgcgtccaagcccaagtaccctctccccgtggtgaatgcgacgtccggggcgggggcggctcactaccccgcgccgaacccggccgtggccgcggcgcccaagggcgccaggaaggcggcgacgaacgggcaggccaagggcgaggacctccacatgttcgtctggagctccagcgcgtcgcccgtgtcggacgtcttcggcggtggcgccccggactacaacgaggccgcggccgccaagtccccccgcaaaatggatggaggcaaggacagggacgactacgtggagcgcgacgagttcagcttcgggaacaggggcgcgatggacagggacgcggaggcgggggacgggaaagccgcggcggcgggcggggaccccagcacggtggccgcgccgacggcgatgccgccgacgagcgtcatgacccggctgatcctgatcatggtgtggcgcaagctcatccgcaacccaaacacctactccagcctcatcggcgtcatctggtcgctcgtctgcttcaggtggaacttccagatgccggccatcgtcctgcagtccatctccatcctgtcggacgcggggctcgggatggccatgttcagtctcgggctgttcatggcgctgcagccgcggatcatcgcgtgcgggaacaaggtggcgacgttcgccatggcggtgcgcttcctgaccggtccggcggttatggcggccgcgtccttcgccgtgggcctccgcggcacgcttctgcacgtcgccatcgtccaggcagctctgcctcagggcattgtccccttcgtcttcgcaaaggagtacaacgtgcaccctgacattctcagcaccgcagtcatttttggcatgctcatcgccctgccgatcacgctcgtctactacatcctgctcggcctgtgaccgacccgtgggtgatggcaatggcatgccccgcattgctgtaactgtaaagaccgctgctgccactttccgttcaagggaggcaagtgaggagactgtctgctacgacatttgcttggcgcttcaaaaatgagtggcttgtttctctctctcttctatctattttttattttttctctagaagtaggtgtgaggattgtatggatggaaagtgtgggaggtggacaagtcgcggtagctaggtaggacgacaatggtgaggcaaaacggaccaaaaggaggtgcaagtacaaaagcttgaagggaacaggagatccagtttaagcacgtcacgggatgggttggatatttcaacgggttcagggtattttggttggctgcgctgaccgatgtaaaatcagcgcgccattgtgacaggagatcgatcttgcttgagataaacagctcacctccggagtttgatggcttgagataagggctcaactcaaaatagacagaaatatataccgtatttgtcactgaaacaaatcagtcttttatacacttggtattttaaaaaaaattgaactttcttattcgacttggaa

SEQ ID NO: 129077 - DNA, 203 bp, Zea Mays
cgtgctccgacaccggggctttgctgtcctccatcgtggccgcctcgatgaggtttactgctctggatgttggacaggacaacgttgctcgcccgtgtttgcattgtatatatacaagagctcagtggagtgtgcatgtggattaggtggttctgatgtgagcacgtgatgcgcgcgtacgtgttgccggccggggaatgcag

SEQ ID NO: 129078 - DNA, 978 bp, Zea Mays
atcagcgagccaaacatgcccgtccgcccagtctcactccaaaccaaagccatcggaggagcagctggacgaccatggcctcgccgctgctcaagtcgcactctcagctcgccgccgccgccgccctgcactccgtgaggagagccgaccgctgccctgcgacaatacacctgggcaagttccatgaccacgggctcaggtccggccgttctaagagatccggttcagcgaaggtgggcgccttcccgtcgctggacgtggtgccgctgatggtgacgatggtggagcacgtggacatgtcgcgggactacgtcgtgaccaagtccatctggcatctcagcgacgcagccctcaagagcgtctataccttctacgccatgttcaccgtctggggagtctgcttcttcgcgtccatgaaggcaagcgtttgcagtactactataacacacacacgcaccatgtaattgcactgttttgctggagtgttcatggcacagcttgcttgcgtgcatgggtcaaatcgaaacaggatcccttctacgacagcgagacgtacaggagccagggtggcgacgggaccgtgcactggtactacgacaggcaagaggacctggaggcgtctgcgagggaggagctgctgcgggaggagctgctcgaggagattgagcagagggttgggggcctcagggagctggaggaagcgagcaaggaggagcagctcacaaagtgatcacgcgggcgaatgggctactcatcagctctctatctgagcttcgttagcaaataagttcagacttctctttactgccatgctcaagtctgtatatggccaaaacccaaaacgattgatcaactgcgctactgcagtgcaatagcaggatacgtatagttttcttttcaagggaaacaggaggggagtgcagtgcacccccgcccatactgcatgttattaataaaagaaagttatttacagaatca

SEQ ID NO: 129079 - DNA, 884 bp, Zea Mays
atcagcgagccaaacatgcccgtccgcccagtctcactccaaaccaaagccatcggaggagcagctggacgaccatggcctcgccgctgctcaagtcgcactctcagctcgccgccgccgccgccctgcactccgtgaggagagccgaccgctgccctgcgacaatacacctgggcaagttccatgaccacgggctcaggtccggccgttctaagagatccggttcagcgaaggtgggcgccttcccgtcgctggacgtggtgccgctgatggtgacgatggtggagcacgtggacatgtcgcgggactacgtcgtgaccaagtccatctggcatctcagcgacgcagccctcaagagcgtctataccttctacgccatgttcaccgtctggggagtctgcttcttcgcgtccatgaaggatcccttctacgacagcgagacgtacaggagccagggtggcgacgggaccgtgcactggtactacgacaggcaagaggacctggaggcgtctgcgagggaggagctgctgcgggaggagctgctcgaggagattgagcagagggttgggggcctcagggagctggaggaagcgagcaaggaggagcagctcacaaagtgatcacgcgggcgaatgggctactcatcagctctctatctgagcttcgttagcaaataagttcagacttctctttactgccatgctcaagtctgtatatggccaaaacccaaaacgattgatcaactgcgctactgcagtgcaatagcaggatacgtatagttttcttttcaagggaaacaggaggggagtgcagtgcacccccgcccatactgcatgttattaataaaagaaagttatttacagaatcaggacaggctctacagg

SEQ ID NO: 129080 - DNA, 512 bp, Zea Mays
ccgccgccgcctcctctatttaaccccacaacctcaccccacttcacttcactccccagtccccatagactccagccctgagctgcaccgtgagcgctcgccgctccgcatcgccgtcccagtcccacaccccgcatccagcctgcccccagcgtaatggcgcttcgccaggccgtcctcctggccgtggtcctcgccgcgctgctcccgctcgccctctctcgcgggttgggcttggtgcacgggcatgtgcggccgcacacgcacgggctggggctcggccaccaccacgcccagccgcacccgcacccgcacgggcacgcaccgctcgtaggtggcgcgtggtcctctgctcacgccaccttctacggcggcggcgacgcgtccggcaccatgggtacgtgagctaaccccattctcgaacatttcgcctttactacccgtagactgcagtccccttccttcctagattcctgggactgaattctgcatctggacgtgcgttcgtgcag

SEQ ID NO: 129081 - DNA, 1723 bp, Zea Mays
ccgccgccgcctcctctatttaaccccacaacctcaccccacttcacttcactccccagtccccatagactccagccctgagctgcaccgtgagcgctcgccgctccgcatcgccgtcccagtcccacaccccgcatccagcctgcccccagcgtaatggcgcttcgccaggccgtcctcctggccgtggtcctcgccgcgctgctcccgctcgccctctctcgcgggttgggcttggtgcacgggcatgtgcggccgcacacgcacgggctggggctcggccaccaccacgcccagccgcacccgcacccgcacgggcacgcaccgctcgtaggtggcgcgtggtcctctgctcacgccaccttctacggcggcggcgacgcgtccggcaccatgggcggtgcgtgcgggtacggcaacctctacagccaggggtacggcaccaacacggcggcgctgagcacggcgctcttcaacaacgggctcagctgcggcgcctgcttcgaggtgcgctgcgacgcggcggggggcgggagccactcgtgcctgccgggctccgtcgtggtgacggccaccaacttctgcccgcccaacaacgcgctcccctccgacgacggcggctggtgcaacccgccgcgcgcccacttcgacatgtcgcagcccgtgttccagcgcatcgcgctctacagggccggcattgttcccgtctcctaccgcagggttgcgtgcaacaagaagggcggcatacgtttcaccatcaacggccactcctacttcaacctggtactggtgaccaacgtgggaggcgccggcgacgtgcacgcggttgccgtgaaggccgagcgctcccccgggtggcaggccctgtcgcgcaactggggccagaactggcagagcaacacgctcctggacgggcaggccctgtccttccgcgtcaccaccagcgacggccgctccgtgctctccaacaacgccgccccccgcggctggtctttcggccagactttcagcggtgcccagttcaactgaacacacccccaccgttcatgcagcgtcgacgcagtggcactagtactagttgttccgtccaccccgattggagcctgccgagaggcgccatggttttatgaatggtctgcacctcgcatttgctcctgggaattaccagtagtttaggcctagtaatagcgcgggttttatcgtgcttgcgttagcatggtgttttagtgttccttggttgtatccggcttggaaattggaggtggtggtaaggctggtctgcagataaacggaggcaggctgccttgtatcacccgccaattatgcgtttagggcctcatggtgatggctccttcgagatgagatgttttctgagttattcaagtgtgttagttgtaatgaatcttatcaagttactatttcctaatatattatccttcggaaatgggtgcttgagtttaagcaggaacttcagtgtgcctctcctgagactcaattttattctggaatttgaatgtattttggatccgtcatcaactttctcatttactacgacatggtttcctcggctgttaacttggattccggacttaggcccctaaccctgttgatcctgtttctatcatgattcctttcaatttacacatcagacattgcagccgttccgactgcttgattcactgccctgagtctacagtaaactgcttaaataagaaaaaaaaga

SEQ ID NO: 129082 - DNA, 954 bp, Zea Mays
ccactggtacttggccttgacgagcacgtcctcatacagcacggcggcgtggtcccagctgaggtcctgcgccatgccgcgcgcctccaggccgcgccagctctccttgtagttccggaacgtgttgaggcagtgcgagagcgcgtcgatcatccgattcgcctccgcgcggtcgaacgtccaccccagcccggtgtcgttgaacgggtcgaacggcgccaccgtgtcccggagcccgcccacggcgtgcaccacgggcacggtcccgtacgccatcgcgtagagctggttcagcccgcacggctcgaaccgcgacggcatcagcaggacgtccgcgcccgccgtgatgcggtgcgccaagggcaccgagaaccccacccacgcgcgcaccttgtcgctgtgctccgcctcgcaccgccgcagcatgtcctccaggtcggggcgccccgtgcccagcatcacaagctgcacgtcctgtcccgcgatccagtggatcgcgtcggcgatgatgtccacgcccttctggtggtccagccgcccgatgaacccgattagtggcacgtcgtcgcggacctgcaggccgagctgccgctgcagggcagccttgcactgccgcttgcccgtgtccagcgtctcgaacgtgtagttggtgtattcgtcggagtggaggtgcacgtccacagcggggttccactcgctcatgtcgatgccgttcacgatgccctgcagcttccagtcgttctggtttatgatgtcgtggaggccccacccaccttccgatgtcctcagctcccataggtatccattactgacggtcaccacctggtctgccatcttcagccctgcggcaaaaacgttgcagtgctcgccaccgatattgtcgtacagtttgaagtgatcgatgtagtgttcaggcaagtcaaagttgacgaagtcgtctacagggccacgacc

SEQ ID NO: 129083 - DNA, 1941 bp, Zea Mays
tacggcacccgcactagagcacgtcgagctcaaacgaaagatcctcctccctcccaaaggtgaggccgttagccaggaattccggcaacaatgacttccctctcctccgcggtggcactgccgtcctcgtgccgggcccggccggcggggggcagccggagggcgcggatggtggtgacgcgcgcggcggcgtcgagcccgaagctgccgaacgggcggcggctgcgggtggctgtggtgggaggcggccccgccggtggcgccgcggcggaggcgctggccaagggcggcgtggagacggtgctaatcgagcggaagatggacaactgcaagccctgcggcggcgccatcccgctgtgcatggtgtcggagttcgacctgccgctcgaccttgtggaccgcaaggtgaggaagatgaagatgatttcgccgtccaacgtcgccgtcgacatcggccgcacgctcgcgccccacgagtacatcgggatggtcaggcgcgaggtgctcgacgcctacctccgctcacgggcacagtccgtcggcgcggaggtcgtcaacggcctcttcctaaggtacgaggcgcccaaagagccgaacggctcgtacgtggtgcactacaaccactacgacggcagcaacggcaaggtcggcggcgagaagcggtcgttcgaggtggacgcgatcgtgggcgcggacggcgccaactctcgcgtggccaaggacatgggcgcgggcgactacgagtacgccatcgcgttccaggagcgcgtcaagatccccgacgacaagatggtgtactacgaggagcgcgcggagatgtacgtcggcgacgacgtctctcccgacttctacggctgggtgttccccaagtgcgaccacgtcgccgtcggcaccggcaccgtcacgcacaaggccgacatcaagaagtttcaggccgccacgcgcctccgcgccaaggacaagattgagggcggcaagatcatccgcgtcgaggcgcaccccatccccgagcaccccaggcctaagagggtgtccgggcgggtgacgctggtgggcgacgccgcggggtacgtgaccaagtgctccggcgagggcatctacttcgcggcgaagagcgggcggatgtgcgccgaggccatcgtggcgggctccgccaacgggacgcggatggtggaggagagcgacctgcgcaagtacctggccgagttcgaccgcctctactggcccacttacaaggtgctggacatcctgcagaaggtgttctaccgctccaacgcggcgcgcgaggccttcgtggagatgtgcgccgacgactacgtgcagaagatgaccttcgacagctacctctacaagcgcgtcgtgccgggcaacccgctcgacgacatcaagctcgccgtcaacaccatcggcagcctcgtcagggccaccgcactgcgccgggagatggagaaggtcaccttgtgagccgccgcccgcgacgtcattgccgtcgaaatggtgtcgcagctgatcggccggtgtattagtagagatttgcggctgatcgggttaatttaggccaacatgcgtgggcagtgggcgcggagaggaagagaaacaagttgtgcaagtgcagcaagtagatcaaaagtgctgcctgtttgtatcgatggatcctgcaacatatagcatctggtgatgttgagaattcggagcagttcatcgactggattctgacgccggcaagcatcgacgtcaatgaatgtctaatacttagtacatcaagacatgtaataaaactgaaactcccccgttctggttctgattactgtaaccctaatccatgtatcttcagtttctgaactctggcgagaaagcaaatgtacagagactattggactgctcgtccaccaggcaccagctctcatacagaattcaatgcaaaaactgtgataaaatccg

SEQ ID NO: 129084 - DNA, 1641 bp, Zea Mays
gtgcaccggccacatctgctagcagctagctcacttctcggggacctgcctcgttcttctcccctataaatacctcctagaagagcgaacaaacaagcaagcaagcaagagactgagagaggcaggtaatacatacctgcgactgcgacgagtgagtaaagcttcatcttcttcctccttcctccggcctcttcctgagtgctgcacgcagtgcgtaggaaggaactcgcgtacgtacgtgtgctagctagctagctcgaccacgcgcagcacgcaggcgcgtagtagctcgatcgatcgaccgccggccggaaatgtcgaccaactcgaggtccaactccagggccaacttcaacaacgagatccatgacatcggcacggcgcagaactccagcatgccccccacgtactacgaccggtcgctggcggacatcttccctccgcacctcctcaagaaggtggtctcggaggtggtgtccacgttcctgctggtgttcgtcacgtgcggggcggcggggatctacggcagcgacaaggaccgcatctcgcagctggggcagtcggtcgccggcgggctcatcgtcaccgtcatgatctacgccgtcggacacatctcgggcgcgcacatgaaccccgccgtcacgctcgcgttcgccgtgttccgccatttcccctggatccaggtcccgttctactgggcggcgcagttcaccggcagcatctgcgcgtcgttcgtgctcaaggccgtgctgcaccccatcgccgtgctgggcaccaccacgccgacggggccgcactggcactcgctcgtcatcgagatcatcgtcaccttcaacatgatgttcgtcaccctcgccgtcgccacggacacgagagcggtgggtgagttggcggggttggcagttggttccgcggtttgcattacgtccatcttcgcaggggcagtgtcgggcggatcgatgaacccggcgaggacgctggggccggcgctggcgagcaacctctacaccggcctctggatctacttcctgggccccgtcctcggcacgctctccggggcctggacctacacctacatccgcttcgaggaggcgcccagccacaaggacatgtcgcagaagctctcctccttcaagctccgccgcctgcagagccagtccgtcgcggtcgacgacgacgagctcgaccacatccaagtgtgattcatgctccatcgatcagagagtgcgcacttgtttactcctcagtcctctcactctatgtatcggcaacactccctaggatatactagtggtccgtagtcatggtctatgtctatgtgtcgctcttctctcgatccatgcacgtccgtggcgcggtgtggatgggctcgctctgtcaaatgtgccaatgagctggagcttaattttgggacgaacactgtgccgtgtgctgtgtgcagccagtcgtactcgtacctctcctgctatcacttgttccaaaagctcttggtgcttacataaagatcatctgtgccttgcacgataaaaatctctattcttgcactccagttacctcgtacaaaaattccaagccttgactttgagttatatgacaaataatgaaataagtagaataattaggtaaaacaaagaaaaaaaa

SEQ ID NO: 129085 - DNA, 2010 bp, Zea Mays
gtgcaccggccacatctgctagcagctagctcacttctcggggacctgcctcgttcttctcccctataaatacctcctagaagagcgaacaaacaagcaagcaagcaagagactgagagaggcaggtaatacatacctgcgactgcgacgagtgagtaaagcttcatcttcttcctccttcctccggcctcttcctgagtgctgcacgcagtgcgtaggaaggaactcgcgtacgtacgtgtgctagctagctagctcgaccacgcgcagcacgcaggcgcgtagtagctcgatcgatcgaccgccggccggaaatgtcgaccaactcgaggtccaactccagggccaacttcaacaacgagatccatgacatcggcacggcgcagaactccagcatgccccccacgtactacgaccggtcgctggcggacatcttccctccgcacctcctcaagaaggtggtctcggaggtggtgtccacgttcctgctggtgttcgtcacgtgcggggcggcggggatctacggcagcgacaaggaccgcatctcgcagctggggcagtcggtcgccggcgggctcatcgtcaccgtcatgatctacgccgtcggacacatctcgggcgcgcacatgaaccccgccgtcacgctcgcgttcgccgtgttccgccatttcccctggatccaggtcccgttctactgggcggcgcagttcaccggcagcatctgcgcgtcgttcgtgctcaaggccgtgctgcaccccatcgccgtgctgggcaccaccacgccgacggggccgcactggcactcgctcgtcatcgagatcatcgtcaccttcaacatgatgttcgtcaccctcgccgtcgccacggacacgagagcggtgggtgagttggcggggttggcagttggttccgcggtttgcattacgtccatcttcgcagggtaaacaaatacataaatacgcacgcacgccggccgggctattcaattcgtaggatacttaatccaagttagaaaaatagtttagttgagagggctacgtcgatttcagtactagactactagtagtaaacaagagcaaagatccaaagcatgattagccgacagtaacaattctttaattcagctagctagcaagcatgtactactaactaaaccctgagtgagtagctagcacgccagcactcctgagcccctgacctggctcgcaacgtgaatctgacccggtcccggacggccacgctgacatagtgacaatagatcgatgaactgagcactgagacgcgagggaaaaccgagtggtgattgcagggcagtgtcgggcggatcgatgaacccggcgaggacgctggggccggcgctggcgagcaacctctacaccggcctctggatctacttcctgggccccgtcctcggcacgctctccggggcctggacctacacctacatccgcttcgaggaggcgcccagccacaaggacatgtcgcagaagctctcctccttcaagctccgccgcctgcagagccagtccgtcgcggtcgacgacgacgagctcgaccacatccaagtgtgattcatgctccatcgatcagagagtgcgcacttgtttactcctcagtcctctcactctatgtatcggcaacactccctaggatatactagtggtccgtagtcatggtctatgtctatgtgtcgctcttctctcgatccatgcacgtccgtggcgcggtgtggatgggctcgctctgtcaaatgtgccaatgagctggagcttaattttgggacgaacactgtgccgtgtgctgtgtgcagccagtcgtactcgtacctctcctgctatcacttgttccaaaagctcttggtgcttacataaagatcatctgtgccttgcacgataaaaatctctattcttgcactccagttacctcgtacaaaaattccaagccttgactttgagttatatgacaaataatgaaataagtagaataattaggtaaaacaaagaaaaaaaa

SEQ ID NO: 129086 - DNA, 113 bp, Zea Mays
atgttacacgataaaccatttcagtgtgacacttacacacacatcatgttagaacatctcaagcagttttgtaaaaaaaagcccctaaaaacaaatgtaggaagttgctaaat

SEQ ID NO: 129087 - DNA, 2562 bp, Zea Mays
acaagggtgcaaaacgttagccaaatggtaggaagggaaaccctacaaagtaaccaaccaagagagctaagactacgagtctgcaacttaaagctgcttcttccttctctgagattttgtgctagcttttctccaaatttagttagtctttgataagagcagagccagtgcttagtgacccaccttgtttggccccaaagaaatatatggtagtcccacactgagtggaagaaagggttcgttttagctccagtaatcagcagaaaccagaatcttttagctacttcctaccgagtgaagtttgaccatacagattaaccgttaggttttgtagctggtaacttcttgtaactagaagcaggtgagcactgcttgagatatacagcatctaaccagtagtttgttgtactgtgtaaacatatggatgccatcagaagtgatgacatagagaagcaagatgaagttatgttacctggattcaggtttcatccaacagatgaagagcttgtcaggttttaccttaaaagaaaaatccagcagaagtctctccccattgagctcatcaggcagctagacatctacaaatatgatccatgggatctcccaaaactggcgagtactggagagaaggaatggtatttctactgtccaagggataggaagtatcggaacagcacaagaccaaacagggtaactggagcaggcttctggaaggctactggaactgacaggccaatctactcttctgatgggagcaagtgcataggcttgaagaaatctcttgtcttctacaaaggtagagcagccaaaggtgtcaaaaccgactggatgatgcatgaattcaggttgccatcactcactgacccaacactgctgcagaagaagccactggagaagaccattccaccaaatgattcctgggcgatctgcaggattttcaagaaaaccaattcaacagcacagagagctctctcacattcctgggtatctcctcctctatccagcacaaatgaaaactacattcgcctatcctcacaggctacacagagaagttatcacagctcagagaacacatcctctacgatgacagacatcatctcctccatccagttcactggtagtagttacatgccttcaatagtttcctcttgccgcaaccctctgagcatcattgacagcagcagcaggccggctgcgtccctaatgctcccctcatctggagcagaacatcacgccatgagtatcctctcagcaatcccacatgatcttccagctgggatggacattgcatcaatggtcctcaatgcatcacccactacactccagaacctagataggatccccacaaacattgagtttggtcaaccacaccaccccagcaacagcagcatggccaacagatgcacggctgatttgcttgacattggcaacagtgtcaccggtgctccccggtcaatcaacttcccgttcaacctgcaaggggcactgccagatgactggaggatgaccttgccttgggactctctcccttgcacaaccgaggtctcaacaaattacaagtcgaccaagtactatacttagtttgaattctgtactaatgtaggctttgctttatagtgcagcagacagtgtacctaattttcacttattggagcttctaccaccatctgctagcattgctgttatcatggagtattagaatttcgttctgttaacatcgaagctagcagagttattaggatgcatttgtgttagtaccttttgtgcaatgtagccatgtaggagcagttgcgatcttgatgtttcatgtgtaactctgtaagactgcaagtctaacttagcttcagttttgtccacagttctatgcactgaagttgtgcccaacgaagtagaccagtgaccagtccaccacccaccagttctctcctctaccatggtttcataatatgggagcagctgttatggatcaaactctcgtatggcactatgacagtaataataactcaatgaaacttgctttacttgccgcgtaaatgcgaggtttatcggcctctcggggacattttgccgaacgggtggtgcgcacgcccaggccatcgacactgtatcctccttcaaggttgaggtattcacgccggccgccgcattggcattgcctcacggagttgctggtaatctggtaccgaaaccacaatctcgtggtcgtgaagcagagcagttgtctggactctggagcctttgttgctgccgtgcctgccgcgcagaaaattgagtcttctagttctcggtatctgtttcgggcctgtgatgagggcgtagtagaaccaagaccaattctcagcgttggatctaggcttgttcaaacgttggattggattgctttggttcagatcaaggtcgggtcgttagtctttagacacggctcatgtctgactctgctcagtcggtttttttgttaggtcggaatttttttgggttttgagtcagtttttttgttggattaggtattgtgtcaaaaattcatgacccatacatgacacataaattattttaaataaaaaa

SEQ ID NO: 129088 - DNA, 76 bp, Zea Mays
tttttttccttctatacgagatctatctaactgtcgggaccaaatcaaaattatgcattacacccacatatgtgac

SEQ ID NO: 129089 - DNA, 2031 bp, Zea Mays
gaaaatggaaaagagtgcattatgagcacggcggctctatcagagcgtgatacattcacaagctgaagagggctcggtcatccggaccggaattcgtaaaggcattagtgcattagcatcgtcaccactcgcgccgtcgtactacctcgccgactccctcgcttcgcaggtccgtgcgctcttcctcatcctcattccatcctcatctagggtttactattcctaccagccacgttttcagaaacaatacgttgattgctattcgatagatcgcactaaagggaacacatggatctagcttgattttgtaccaaattcagagcaactgatcgtggggattcgattctccatagtttatttgcggggccgttccgatcagcgatggtgaagaggctcaggcgcaagggcgacgtctcctccgcgccgccgcctaaggccgccgcatctcggtcaaccaatcccgacaaatttaaaaagaagggggtcaaaaccgatccggagaaattgaaggcggcctgcactgaatccgcaaacattgctgaggcgtctgcttcagcgcagacacccaccccgaaaccagtcaagacgagtccggcggccgccgccgccgcagagattgcagatgatcgggtcgcccagagcaaaacggaggacggaaagtttagtaggaaggagacgatgaagggaagagaggagcagaagggagaaggggccagtgatggggtcacccagaccaagactgaggatatgaatgtgactaggaaggaaacgatgaaggggggagagaggaagggggacgggagtaggaaggagatgatgaaggggagggaagagcgtgtgaaaacggaagagaagacagggaaggaaaaggaggaggaaaagagtggctcaggattcatattcatgtgcagtgcaaggacgaagccagaatgctaccagaacggcgtgtttggccttcccagggggaagatggatgtggtggagaagatccagcgagggacgaagctgttcttgtatgattttgacctcaagctactgtatggggtgtacaaggcagatacaaggggaggattggatcttgtgcgtcacgcctttgatggcaaattccctgcacaggttaaatttagcgttttcaaggattgtcttcctattcctgagagtagtttcaagcatgccattaaggagaactacagctcaaagggcagactattggcactgttcaagcctatcagcctttctaaaccagctccacaacatattgaggatattcgaaaaccaagtgattatgaagaaagaagacagttgcaacatattgaagaaagggctgcacctattaatgtccacgcacatcctcttgaagatcggtacaagatgacacggtcattacatccgccactttttgatgagcctcgacgtggtttggtgctaaatccttatcatatgcaagagcctcaacatgttcctcttaattactatcaccaagtggctactaggtctccataccatcaacctcatatggatattatgcacgaaagaactgcagctgaggtaactgtaagagatcaccaagcactgccaggagagcttgctgcacggtctgaacgcgtggatgagctgtaccgttcttacaaactctctacacgcgcaatggacctcagtccgggagcatcctacctgacaacttatgagcacccgactagtgtttatggtgagggcattcagaggccagctttgacaagggttagtggcccaagtgtgcctgtgtccacccgttattcctttgctggcccaccagcatattgatcatccagatgcaagcactcaaatcggccccagccgctgtacaagttactgtaggcaatggcttcttgtacaccgttggaagccaggatagaacctgatggtagtagctttgcagtttaattattgcctttggtttcttttgcaagataaatctatgagatgtaatgtggaccttgtttgacccaagttgttttaactaaaatgcaaaacgatggatgtctttgtgtt

SEQ ID NO: 129090 - DNA, 1786 bp, Zea Mays
aaaggcattagtgcattagcatcgtcaccactcgcgccgtcgtactacctcgccgactccctcgcttcgcagtttatttgcggggccgttccgatcagcgatggtgaagaggctcaggcgcaagggcgacgtctcctccgcgccgccgcctaaggccgccgcatctcggtcaaccaatcccgacaaatttaaaaagaagggggtcaaaaccgatccggagaaattgaaggcggcctgcactgaatccgcaaacattgctgaggcgtctgcttcagcgcagacacccaccccgaaaccagtcaagacgagtccggcggccgccgccgccgcagagattgcagatgatcgggtcgcccagagcaaaacggaggacggaaagtttagtaggaaggagacgatgaagggaagagaggagcagaagggagaaggggccagtgatggggtcacccagaccaagactgaggatatgaatgtgactaggaaggaaacgatgaaggggggagagaggaagggggacgggagtaggaaggagatgatgaaggggagggaagagcgtgtgaaaacggaagagaagacagggaaggaaaaggaggaggaaaagagtggctcaggattcatattcatgtgcagtgcaaggacgaagccagaatgctaccagaacggcgtgtttggccttcccagggggaagatggatgtggtggagaagatccagcgagggacgaagctgttcttgtatgattttgacctcaagctactgtatggggtgtacaaggcagatacaaggggaggattggatcttgtgcgtcacgcctttgatggcaaattccctgcacaggttaaatttagcgttttcaaggattgtcttcctattcctgagagtagtttcaagcatgccattaaggagaactacagctcaaagggcaggttcacccaagagctcaacactaaacaagttcaaagactattggcactgttcaagcctatcagcctttctaaaccagctccacaacatattgaggatattcgaaaaccaagtgattatgaagaaagaagacagttgcaacatattgaagaaagggctgcacctattaatgtccacgcacatcctcttgaagatcggtacaagatgacacggtcattacatccgccactttttgatgagcctcgacgtggtttggtgctaaatccttatcatatgcaagagcctcaacatgttcctcttaattactatcaccaagtggctactaggtctccataccatcaacctcatatggatattatgcacgaaagaactgcagctgaggtaactgtaagagatcaccaagcactgccaggagagcttgctgcacggtctgaacgcgtggatgagctgtaccgttcttacaaactctctacacgcgcaatggacctcagtccgggagcatcctacctgacaacttatgagcacccgactagtgtttatggtgagggcattcagaggccagctttgacaagggttagtggcccaagtgtgcctgtgtccacccgttattcctttgctggcccaccagcatattgatcatccagatgcaagcactcaaatcggccccagccgctgtacaagttactgtaggcaatggcttcttgtacaccgttggaagccaggatagaacctgatggtagtagctttgcagtttaattattgcctttggtttcttttgcaagataaatctatgagatgtaatgtggaccttgtttgacccaagttgttttaactaaaatgcaaaacgatggatgtctttgtgtt

SEQ ID NO: 129091 - DNA, 1880 bp, Zea Mays
aaaggcattagtgcattagcatcgtcaccactcgcgccgtcgtactacctcgccgactccctcgcttcgcagatcgcactaaagggaacacatggatctagcttgattttgtaccaaattcagagcaactgatcgtggggattcgattctccatagtttatttgcggggccgttccgatcagcgatggtgaagaggctcaggcgcaagggcgacgtctcctccgcgccgccgcctaaggccgccgcatctcggtcaaccaatcccgacaaatttaaaaagaagggggtcaaaaccgatccggagaaattgaaggcggcctgcactgaatccgcaaacattgctgaggcgtctgcttcagcgcagacacccaccccgaaaccagtcaagacgagtccggcggccgccgccgccgcagagattgcagatgatcgggtcgcccagagcaaaacggaggacggaaagtttagtaggaaggagacgatgaagggaagagaggagcagaagggagaaggggccagtgatggggtcacccagaccaagactgaggatatgaatgtgactaggaaggaaacgatgaaggggggagagaggaagggggacgggagtaggaaggagatgatgaaggggagggaagagcgtgtgaaaacggaagagaagacagggaaggaaaaggaggaggaaaagagtggctcaggattcatattcatgtgcagtgcaaggacgaagccagaatgctaccagaacggcgtgtttggccttcccagggggaagatggatgtggtggagaagatccagcgagggacgaagctgttcttgtatgattttgacctcaagctactgtatggggtgtacaaggcagatacaaggggaggattggatcttgtgcgtcacgcctttgatggcaaattccctgcacaggttaaatttagcgttttcaaggattgtcttcctattcctgagagtagtttcaagcatgccattaaggagaactacagctcaaagggcaggttcacccaagagctcaacactaaacaagttcaaagactattggcactgttcaagcctatcagcctttctaaaccagctccacaacatattgaggatattcgaaaaccaagtgattatgaagaaagaagacagttgcaacatattgaagaaagggctgcacctattaatgtccacgcacatcctcttgaagatcggtacaagatgacacggtcattacatccgccactttttgatgagcctcgacgtggtttggtgctaaatccttatcatatgcaagagcctcaacatgttcctcttaattactatcaccaagtggctactaggtctccataccatcaacctcatatggatattatgcacgaaagaactgcagctgaggtaactgtaagagatcaccaagcactgccaggagagcttgctgcacggtctgaacgcgtggatgagctgtaccgttcttacaaactctctacacgcgcaatggacctcagtccgggagcatcctacctgacaacttatgagcacccgactagtgtttatggtgagggcattcagaggccagctttgacaagggttagtggcccaagtgtgcctgtgtccacccgttattcctttgctggcccaccagcatattgatcatccagatgcaagcactcaaatcggccccagccgctgtacaagttactgtaggcaatggcttcttgtacaccgttggaagccaggatagaacctgatggtagtagctttgcagtttaattattgcctttggtttcttttgcaagataaatctatgagatgtaatgtggaccttgtttgacccaagttgttttaactaaaatgcaaaacgatggatgtctttgtgttgatttgcagc

SEQ ID NO: 129092 - DNA, 1727 bp, Zea Mays
gattcctcaaaccaaagaccctctaaaggtttatttgatttgatgtctaacttaccacactttacctaactttttctatctaaaattagttctttaattaagtaattaaccctagctaaaatttagcacagttagttacgaatcaaaaggccattaaagtcttctcgtggaaaagatgtgagccatccgttgcgtctaatcaatacggccaggaggggaggttcggcctgggacgctacccggtgtgagccgtcctcaccagtcaccgcagaagccacagaggggcagccgcctgcgcggtggccagcatcgtccggccgggttcgtcgggaagcgacccaaccccacgcccgcttccaacctcgttctgaccgacggcgaccgccgtgccgcgccaccgctatacttacatctgctccatcatccctcgcccgccgcgaccaccaacctcggcagggaaatccaactccggtttctcctcctcgcagcgtctctcccgcagtcggggagatccgggttggcccgcccggtaatccatccctcgccctcgtgccgcctgtaatttcgcctcctaacccgaccgccgggggccacagcggcgccggaggcggtggagtggggacgatggggatcggggcggtgtcggacgagttgctgggcacgttcgtgccgatcgccgtgtactggctctactcagggctctacgtcgcgctggatggggtggggcggctcgacggataccggctgcacaccagggaggaggccgctacgaagaacgtcgtctccaaggccgccgtcgtcagaggcgttctcgtccagcaggtcttccaggtcgccgtctcgctcaccctctttgcggttattggtgatgagagtagtactggacagaagcaacctcctgttcttgtcatagtgttgcagtttataactgcaatggttgttatggacacatggcagtacttcatgcacagatacatgcacattaacaagtttctgtataaacacatccattctaagcaccatactcttgtagtcccttattcctttggagctctatacaaccatcctcttgagggccttattttggacaccattggtggtgcactctcattcctcgtctctggtatgactccacggacatccatattctttttctcctttgcaaccatcaaaactgtggatgatcattgtgggctgtggcttcctggtaatatcctccaggcgctgttcagcaataacagtgcttatcatgacattcaccatcagctctatggaaacaagtacaacttttcacaacccttctttgtgatgtgggacaagattctcggaacttacatgccctactctattgaacaacgaaaaggaggggggatcgaatcaaaaccagctaaactcgactgagctgaggataccaagactgattagtacatgcatgcatagtttctatttttttttttttgacttgtccaatactcatgccttgtggtactgctgactgcgcaaatgatgtacacaccctgtgtcataacttcatatagtgaggctgcttttgctctctacatttcttgttttgttttttagggtgttctatcttgtaacaagatacagtgagtaaagtattgtaatgtaccaaagaatactcaacaccacttggatttgtgttctgttgaattttctgttcttccatccgtcattttgttcggaagttgatattggcaatggccctc

SEQ ID NO: 129093 - DNA, 3706 bp, Zea Mays
acaagggcaaaatttcgcccggtttctctcgctgcccatcccacctgtacggtgtacgcctcgccggagcgcgcgcgctgcgcggggcatgccggagctccgcctaccgataaacgccccggccgcggccgggtgccgccgccattcccggaggctacggcgccgctgccgcctaatcttcctccctctcctctccctcgctctcctctccctcgcctacctctccttttcgtcccatgccaacctcccaatccacgcaatgcattatggcctgtctaatagggagaatatttccaagtggaatggccacgaatacagccctgatgttacaaatatctctatgactaaagttgagctggaagcccccaaaagtcgaaagaaactacacaagcgctatgcaccatgccaaattcagtttttgccatcagtcgatgatcttgtggagcctgctcactatggaaattttacacagttctctttgagctatatattgaaggaagaagtattgcttcataatgacttcttcgaaccattgtttggtggataccagagtcttcgagatagagaagagacataccatgctaaagaccaaaccctccactgtggttttgttagatggccagatgattaccctagtacaggatttgatctggatgaaaatgatagaaggtatatggatacctgtcatgttgctgtatcatcatgtatttttggaagctctgattacttgaggagaccaactaaaagcaggattggctcttatgctaagaagaatgtgtgcttcgtcatgttcatggatgagctaacactggcaaccctttcctccgaaggacatgtgcctgatggaaatggattcataggcttatggagaagtgttgtagttaagaacttaccatacaaagatatgcggagagctgggaaggtgccaaaatttctagctcatcgactcttcccatctgccacgtattctatatggttggatagcaaactgcgcctccatgctgatccaatgcttattattgaatatttcttatggagaaagaaagcagaatacgccatctcaatgcactatgatcgctcttgcgtatgggaggaagtagtccaaaacaaacgcttgaacaagtacaatcatactgctattgatgagcaatttcacttttaccagtccgatggtcttgtcaagtttaatgactctggccaactgcctgttcttccaagctatgtacctgaaggatcattcattgtgcgtgctcatacaccgatgtctaacctgttttcatgcctttggtttaatgaagtaaaccgttttacctcacgtgaccagttgagtttcacatacacttatttgaagctcaggagaacgaatccagggaaaccttttcacctaaatatgtttaaggactgcgaaagaagagcaatagttaaactgttccatcaccgaactaacgagactacagatccaccaccagctaaccttcgtttggacacgattcgtcatccatacaggactgaggctgccatttgagaaatcaacagcaatgcgacttcaatttattgtgctgaatgtaccatagtaccaatgtgcctaacatgcttgtttgtagagaaaagaaatgaacctttgcacagccgttggcagtagaattgtagaaatcccaatggtctcacttcctcataaaaaaatcatttcgatttcagctttgtaatataaaaatgttcattgaacacatgaaatgttagaatgacacccttttaagctcatcggcaaaacgtgtaccattttctggctttgtaagtacattattgttgtatctccgaattttttaatcgatgggtgtctcctggttcaacattaaacaatctcatgaccagtgcggattctgatgactacttctatcaacactgcaaatcttgctaacaagttggtactttatttatggccaatgttttcacataaacgaaggacatctggatatagattgcaacgaaatcttgaattcttgatgccaaagccatagaagcatacatgacattaagaaagatgaaatggatgcaaaggaaacaaagaaactaccgaagtctgaatgcaacacaggaaacagataatatggcttcttagttcttgcagttgcagacccatcaaacaaaaagagtaagtgttgaacatctatgaaccacttcaatacaatcaccacttcagttcgcggtcaaccaataaccaatgtttgaacatctatgaacccagcggccaatgcaactgataaaagagaactcgagcataaagaaaaccgttttacaagagcagaaggatgccaactgctaatgaattatctcatgacagttttctatgcaagataacgatataattttctatctactttgtctctttccaagaactctcgttcaatcagagattcaatgcgtttctttatgacaacaggatttggcaagaaacgggcttgcaattgcttggtgacctcagctacaatgctgttatgatccaacaccctccgtgatttcatgatcctgacaatggctgcttcgatctgaggtttcctgtcctcctcaacccgttggcgagtctcctgtttctctggttcagattccttctgtgccaccactgtcccaatcttcactttaacaagcttgcttgtgaacttatcattgaagtagaatgtgtcatcctcagatatgtccttgctcataggctccttacggagaacatttttccccttgacacaagcaagtgactgcagacatctctttaggtctgaggcaggtatctcagtatcccgttcaatgtctttgtaggtcaatccatcagcattgttaaacagcatgagaacacacatctgataagtggatacatttagttcatgcttctggccttttccaaatgtggcttttatatcagctgtacccatgtttgtttgccatgtcaatctcctgccattgtgagttccaagataatatgcccggaatttctcacatactgtaagtatttcagttggaaggttgcaaggaggactgggctgcgtaggccaagaaccagttgtcaaaatgtggacatcaagcgtagggccatccccaagttcctcagacttcttggcatagaagtcttgcatggtgtcctgggaggttttcatatcagtgaacatgccctctagcttggaagtgaactggtatccacattctgtcttgagtttaactatcatacttctctcagcatcatcagaaacagttttgctagacaggagccttttcgccaaatgctgcttatagtacttttcaaacacatccttctcctggaggtatcggaacagcatcatgactttgtccaatataacttccacatcttcttccgttgctcctttaagtcctttgcggagtttgtcatcaacatataatgatatgaattcaggtgatcggctgtttaagttgaggaaatactcgaaagacgaattcagagcattctggaaggttttgtcattgccgaaggcaacactgatgatcttatcatgtttgtccttctcatttaacaagcgttgaacaaattccactggatctttcaaactttctggatctatcactaactgcttccctgtttccctcaagtaagaagtcatgacatctctaatcgttgataacccatcaggaacccttcggaacaaggaatacatccgacccaaatctttgtattggtcat

SEQ ID NO: 129094 - DNA, 2322 bp, Zea Mays
tctcctcaaaccctacaaagtacagcaccatccacttccggccgccagcttcgtcccttctcccccctggccttctcctagctagggtcatctaaatactcatctgctcctgcttcctctctctctctccctccctgctgaaatcacagatgaaccatatcaaaaggccataagatagtgtgtgtgatctcccacacgcacacacaaacgcaagctcgctaccggccttccatccatcaaccatcttctctctcatcatatattcatatcatatgagcaaggattctttccaccctacaatcttctttccctgatagctagccagctctctctcttggactctctctacaaccacacctaaccttctcggtcggagctagagacccacaccagcaagagagaaagagaagaggcaggagacatcaagccgttccactctcttccaaacaactagaccactccatttaccccgcaaggaaacataccagccaggagagatacttgtatcactagctgtgtatatacaccatggcttaattgaccatggacgtcgccggcgacggcggaggcggccgccgccccaacttccctctgcagctcctggagaagaaagaggagcagccgtgctccatctccgctgcggtgggcgcgtcagcgggaggcaacgggaatggatcgggggccgtcggaggtgagatgcagcaggtgcggaaggcggcacccaagcggagctccaccaaggaccggcacaccaaggtggagggcagggggcgtcgcatccggatgccagcgctgtgcgcggcccgggtgttccagctgacgcgggagctcgggcacaagacggacggcgagaccatcgagtggctgctgcagcaggccgagccggcggtgatcgcggccaccggcaccggcaccatcccggccaacttcacctccctcaacatctccctccgctcctcgggctcctccttctccgccccggcccacctacgcgccgccttgcctgctagccccgccaccgcagcccggttcggccgtgctgacgcgtgggaccgggttgtcggccttgccttcccttcggagggcccggcctcgtcatcttcgtcgccgtcgcctttgttgcttaatttcaactccggcagcgtcggtcttgacgcgcaacagtcgccgtctgccgcggctgcagccgcagccgccgatatgacaaggaagaggcggtgggaacaagaaatgcagcagcagcagcagcagcaagcgcagcaatatcagcagcagatggcggggtacacgcagagccaaatgccgggcaccgtgtggatggtgccgagcagcaacaacacgcagggtggtggtacaccttccagcggcggcagtggcggatgcaccggcgagtctatctggacgttcccgcagatgggcagcgccaccgccgcggctgccgtgtaccgggggagcgtgccgagcgggctacatttcatgaacttccccgcaccggtggcgctgcttccagggcagcagcttgggctcggctccgtgggaggcggcggcggcggcagcggaggcggcagcggaggcgaggggcacatggggatcctcgccgccctcaatgcgtaccggacacaggtggtaacggatcccgcggccagtcagggcgggggaggtggaggcggcgggtctggccagcagcagcagcacggtggcgggcgcggcgaccggcacgagagcatgagcaccagcgactcgtagccgccgacgggggagtcgtcaccgaggataccatgcatcgctctggtgtggcttttgatctgttctttgtcttggtttcatttttttttcttgctttcctttttgtggtttccttcctctctcatccaagctagacgagacgatacacccctgcgagaggattacacttagctgcactactccatggtatgcggtaggatcagaatccttacgtgagctgtacgattgttcatgggaagaagagaggagggaaacacagcagcagcagagagagattgttcattttgttctttagttttagggtttgcattgatcaagtgcgagcagaagagatttttatcaagcatgatggcatcattcaactgccgtgactagggttcgaattttttttcatccttttttcagccactataactcttccattttgcagagttgaggagttcgttgcttgatagtatgatatacttaatatactccctacggtccaaaattaaaattcgttttagataattaacggattcacacaatatttgatgtatacaatatttgatatatgtattttatacatgtgtctag

SEQ ID NO: 129095 - DNA, 1398 bp, Zea Mays
ggaatctactactactctataagggtgtaaggagggcgtccaccatgcccccgcccgacgcccccttgcccccgtccatctcgccgcaaggcacgcggcgcgcctcgcgatgccccctcgcccccgtttgtctcgccgtgatgcgtgcggcgcgcctcgcgatgccctctcgcccatgcccctgctcgcctcttctccgccccatccccctgtgtctagcgcgctacccgcccctcccaacgtcgtcctctccgtcccatcctcccatcgtgcgacaaccgatccacgcctcgaggcccaggccgtgccacgccggtggggaagcgaaactcacttacaggacgcggatctccttccaaactcgaaggcgacgatccggcacaggggcaaccttccatggtaggcgagatccacggcccactcgcgatgcgcccccatgtcagccactcccgttcgtcacctcacgatccgatgaaggcgaagggcgcacctaaagcattgtggcaagccggtatctgccgcagcggcggtagaggtcttcgaggagcacaaaggtgagggcggaggaggcgtaggaaccgagggtaccaaagtcgattcaacagaatgagacagtggtttgcaaggatctgtgcacgaggttggtgttgcggtggagggagcaaacaacacaggtgtagctgcttgtggggtggggacaatgaggcagcaagactcaaggtccaggatgatgaacaacaacagcggcgtcgacgcaggaggccctggttcaggcatgggtctgggagtgccggatgtgccattggggtcaatagtaattcacgataatgcagggtgctgtcagcaagaacatggagagccttgccgtcttggccttccaatattttatgaatttggtgattggataaaggaacaatcttttccttttgcagattaagacaaaaggggtcacaatgacagcgctgttggctaaggcgacagcaacggctctgcttcagcatcctatggtgaacttgcagctgcagggatggaaagagcttcacatacaaaaatagtatcaacattgctatagcagtggccatagatggtgggttgattacatcggttcttcaagatgctggtaaggtcaaacactttaccgtgcacaatgaatgttgattttttatgatttatttaaatgagtggttacttgttggtttatgcgtcttgacatttattcattgtcaaggaaacagaaggagttagttgataaggcgctagcaaagcagttgcagccccatgagtacaactctgatatttttttgcctcatacacaaatatgaatatgtagcacattgttgtatatcttttctaatgctctgaataagatgtggtggtacagtgcagaataatatgttc

SEQ ID NO: 129096 - DNA, 1980 bp, Zea Mays
ggaatctactactactctataagggtgtaaggagggcgtccaccatgcccccgcccgacgcccccttgcccccgtccatctcgccgcaaggcacgcggcgcgcctcgcgatgccccctcgcccccgtttgtctcgccgtgatgcgtgcggcgcgcctcgcgatgccctctcgcccatgcccctgctcgcctcttctccgccccatccccctgtgtctagcgcgctacccgcccctcccaacgtcgtcctctccgtcccatcctcccatcgtgcgacaaccgatccacgcctcgaggcccaggccgtgccacgccggtggggaagcgaaactcacttacaggacgcggatctccttccaaactcgaaggcgacgatccggcacaggggcaaccttccatggtaggcgagatccacggcccactcgcgatgcgcccccatgtcagccactcccgttcgtcacctcacgatccgatgaaggcgaagggcgcacctaaagcattgtggcaagccggtatctgccgcagcggcggtagaggtcttcgaggagcacaaaggtgagggcggaggaggcgtaggaaccgagggtaccaaagtcgattcaacagaatgagacagtggtttgcaaggatctgtgcacgaggttggtgttgcggtggagggagcaaacaacacagctgcttgtggggtggggacaatgaggcagcaagactcaaggtccaggatgatgaacaacaacagcggcgtcgacgcaggaggccctggttcaggcatgggtctgggagtgccggatgtgccattggggtcaatagtaattcacgataatgcagggtgctgtcagcaagaacatggagagccttgccgtcttggccttccaatattttatgaatttggtgattggataaaggaacaatcttttccttttgcagattaagacaaaaggggtcacaatgacagcgctgttggctaaggcgacagcaacggctctgcttcagcatcctatggtgaacttgcagctgcagggatggaaagagcttcacatacaaaaatagtatcaacattgctatagcagtggccatagatggtgggttgattacatcggttcttcaagatgctgctgattgccggagagattgaaatcaaaggggttgagctgcaggagagttgtagtttgtcgttcttttccatgggtgtgattgagactgaaacggtgggtaccagagtgaaggagtcggaggcagttttagtagagaaagaggtcgaactgatcgatgagcctcagattcaagagagccctccagttcctgcattgttggatgatgaggtggattttgcttaatcgtcacttgctattagagaatccgacattcccgtgaaaaaggtgctgataatcgtgacaatcacttctgttcggccacagcaaccatattacttgaatcagctagcccatgttttgaaagttgtattggtacctcttctatggttagtggtggaatggcctgaacagtcctatgaaacagcaaaaactctgttacagtccactcaggtggaagaggttgtttgtagatgttttttgttttcatatctgaactgtaatagtaaggttacaataatttttcacatagctgatggaacttctgtttgtgtgaagccaacagatggtccctcctgctaattagaaaccaatttttttagactttttcagcctcctctactgctcatgttgctggcttgtaataggtgggctaggggttatctagagatgacaaggccctcaagttggctttccagcactggatcgaagcgatgagtacaaacgggcagtggggattggtgggttttactgcccattcttgctcttttcatggtacaattatcctgtttttttcctacagtgatgttttattttgtggcaccatctttcgaccataaacaaatacactcactttgatgaatgttgatatactttcagcattcaattgt

SEQ ID NO: 129097 - DNA, 2806 bp, Zea Mays
cgacgaaagacgcggaggttggtggtgaaggaagaaagaaaacgaaaggcggcctcccactcgcagtcgcagtcgcaggttctagaccaccaaacccagcggctcccgctcatctcagttcggcttcggccttcgcattcctctacagatttcgcagttttgctgggggtaactacggaatggggggcggatccggatctttcctcaaggtcttggtcaacaacatggatgtcctcgcggggtacgcattcctgatctgattccccgacttcagattcttagctcttagagctgctcgtctctgcgttccccgtgcgactcgtgagcggtgctgctattccactcgagatgcggaggttgttcataccagtagcatcagtaaacaatttgcgtacttagggcgagtgatcgtgaacctacccaaatacctgatgcggagctgagcatggtcgatgaaatggtgaaatgccatgtagcatccgacattaggacttcggcaatttggccctagtcttgaaggagcgtgttaaacttccaaaaaggaacgaagaaggataaggggaaaaaaatgatatgtccatccacgaccaagattatgtgaaaaaaaaattcgttagcaagtaagatttgaccaaatgatggaactcatgatgctgacattctgttagtgacgctgatgttctttcctttttagattagtggatctttgatgatggtttaccgacccttttttttaaacataaggatggaattttaagctactagctccttatgattttacaacttttgcagaattactagcatcttccgttgcatatcagtatcataatcaggatagcttccccatgtagcacatggcaatataaaagcacgtgatatcctgagaatatggataacttgtggttgctaaatgttatagcatttaccttgtggtttttgtacatcactgaatgttcagctgcaagttgaagaatttttaatcctctattttattgtctctgcaggcctttggtttcacttgcgtatcctctgtatgcctctgttagagcaattgaaacaaaatctgctgtggatgatcagcaatggctcacgtactgggtgctgtactcatttatcactctattcgagctcacctttgctccggtactcgaatggcttcctttctggtcttatgcaaagctgttctttaattgctggttagtattgccacagttcaatggagctgcacatgtttatgagcattttgtgaggccaatgattgtaaatcagcaagttgtaaacatctggtatattccaaagaaggatgaatcaagtaggcctgatgatgtaatttcagctgcacagaggtacattgagcaaaatggatcaaaagcgtttgagaatcttgttaacaaggtattatctgtttcctgttaaattttaccattctcttttgtgaaaatagtggacacttgatgactcgggctgggagagctatccaagtgcagtatgtgctcatggcaacagttatgtatcacgccgtggctttggatttacctaaatgggctatcaaagccattgacaaaattagacatggctttctttggaaaggacgaaaagatgtgctcggtggtcactgcttagttgcttggggcaaagtgacacgtacaaaggagcttggtggtcttggcatctctgatttacaaaaactgaattgggccctacgggtaagatggttgtggttggaaaaaacagacccctcgaagtcttgggctgatttgcctctccagagttccagcatgctgaaatctatcctctctacaactatgattacagaggtgggtgatggtcgtaacaccttattttggagggatagatggttgatgggacagaggattgaggacctagcccctcatattttcgccctcgtcccgactaggattgccaataggagaacggtggcagaaggactagtggagatggcttggatccgggacctgagaggcaccatcacttgagctgtcatctctgatcttttgacttttagtgaagttattgcagaattctcccttagtcatggagtgccagacaagcatatctggagatgcctcgtccggccaatactcttcaaagtcgacttatgatatgctattcctaggatccacttcttttggagcctttgagcgtgtttggaagtcttgggcaccttcaaagtgcagtttcttcctttggcttgccatgcacagtagatgttggaccgcagatcgtcttgctaaaagaggactaccccaccccattgcgtgtcccctttgcgaccaagaagaggaaacaatacaacatcttctcatctcttgcgtttttgcaagacagttctggtacctcttgctgcgcaggtccgggttgcctaatctttcaccggacaatgctctttgcagcttaaaagactggtggagcagggctgtggagaaggttccccgagatctccaatcaggcttcaattctctagtaattcttggcgcttggagcctttggcgtcatcgcaacgactgtgtgttcaatgggaggtcgccgagcctagcaagtgttctcaccctcgctggtgatgagcttaggatgtggtgtcttgccggagctaaaaggttgaacctgctttcagctgtagtgtttgtgtttgaccccgggtgataatcttgtgccttgttcagagtgtttgtgtgtggtggctgtgctgtgtcttgttgtgtcgtgtggattgagttgtgtgtgttgtgttgtaccttcttctatctattaatggaaagatacgcagatttcctgcgtgttcgat

SEQ ID NO: 129098 - DNA, 1978 bp, Zea Mays
gtcgcagtcgcaggttctagaccaccaaacccagcggctcccgctcatctcagttcggcttcggccttcgcattcctctacagatttcgcagttttgctgggggtaactacggaatggggggcggatccggatctttcctcaaggtcttggtcaacaacatggatgtcctcgcggggcctttggtttcacttgcgtatcctctgtatgcctctgttagagcaattgaaacaaaatctgctgtggatgatcagcaatggctcacgtactgggtgctgtactcatttatcactctattcgagctcacctttgctccggtactcgaatggcttcctttctggtcttatgcaaagctgttctttaattgctggttagtattgccacagttcaatggagctgcacatgtttatgagcattttgtgaggccaatgattgtaaatcagcaagttgtaaacatctggtatattccaaagaaggatgaatcaagtaggcctgatgatgtaatttcagctgcacagaggtacattgagcaaaatggatcaaaagcgtttgagaatcttgttaacaaggtattatctgtttcctgttaaattttaccattctcttttgtgaaaatagtggacacttgatgactcgggctgggagagctatccaagtgcagtatgtgctcatggcaacagttatgtatcacgccgtggctttggatttacctaaatgggctatcaaagccattgacaaaattagacatggctttctttggaaaggacgaaaagatgtgctcggtggtcactgcttagttgcttggggcaaagtgacacgtacaaaggagcttggtggtcttggcatctctgatttacaaaaactgaattgggccctacgggtaagatggttgtggttggaaaaaacagacccctcgaagtcttgggctgatttgcctctccagagttccagcatgctgaaatctatcctctctacaactatgattacagaggtgggtgatggtcgtaacaccttattttggagggatagatggttgatgggacagaggattgaggacctagcccctcatattttcgccctcgtcccgactaggattgccaataggagaacggtggcagaaggactagtggagatggcttggatccgggacctgagaggcaccatcacttgagctgtcatctctgatcttttgacttttagtgaagttattgcagaattctcccttagtcatggagtgccagacaagcatatctggagatgcctcgtccggccaatactcttcaaagtcgacttatgatatgctattcctaggatccacttcttttggagcctttgagcgtgtttggaagtcttgggcaccttcaaagtgcagtttcttcctttggcttgccatgcacagtagatgttggaccgcagatcgtcttgctaaaagaggactaccccaccccattgcgtgtcccctttgcgaccaagaagaggaaacaatacaacatcttctcatctcttgcgtttttgcaagacagttctggtacctcttgctgcgcaggtccgggttgcctaatctttcaccggacaatgctctttgcagcttaaaagactggtggagcagggctgtggagaaggttccccgagatctccaatcaggcttcaattctctagtaattcttggcgcttggagcctttggcgtcatcgcaacgactgtgtgttcaatgggaggtcgccgagcctagcaagtgttctcaccctcgctggtgatgagcttaggatgtggtgtcttgccggagctaaaaggttgaacctgctttcagctgtagtgtttgtgtttgaccccgggtgataatcttgtgccttgttcagagtgtttgtgtgtggtggctgtgctgtgtcttgttgtgtcgtgtggattgagttgtgtgtgttgtgttgtaccttcttctatctattaatggaaagatacgcagatttcctgcgtgttcgat

SEQ ID NO: 129099 - DNA, 83 bp, Zea Mays
ttgtgggagtggtgtttaggccattgtaattattatcatccttcttttaatgaaatgatacgcaactctcctgcgtgttcgag

SEQ ID NO: 129100 - DNA, 956 bp, Zea Mays
tcagctggctgttaaggtcaatgcatatgatggcgttcagattgtggactcattacattcgtcaaagtatcatatagctacacttgcagaatgtgatagttgctgctgtacagatcctccaacttctcaatttgttgataatgaaaacacaaaaaatctactgaaagagaagcataccaagcctattaattttcctggtccaataaaaatgcttggtgatgggcacacagtgacagtaattaatgttcaaagcaagttgagcccaccttacatgcacagcaaagatcctggggatgcggaaaggttatctactccaggagagaacaataaggagagtagtttctatcataattgtgaaaggcattgttatcagcctatattaccatggataaatggtgatggtagtactaatagcactctctatgaaggtttaagtcgccgagttattggttatgtcatgcactatccaggactatcggaggaagatgttatccgtaggatggatgtattgaatcctcagacttgcaggaccctgctagaaaagctaacgctcgatgggaaccttcatgttcgggtttttgaagaacctgtgccaatggctccgaccacactgcagggtatgttcaagcaacactctagtaaagagccatcaaaatgtgtaaagcgctacttcgcaaacccaatgagcacattacaactgtaactgcaagaagattttaactttgttctagatccagacttgtgagggcatcaagatttggaatgtttaaatgttaccgtccccagaactggtaaggccatctcgtggtaagaccatctccgccgtgtaaatagtcgtgcaaagtactattttgcacctgtttgcagagtaaaatttaaaatagagagtaagatagggagtggaatagagagtctgctggtctgctggagagctaaggcccttaactgaaccatca

SEQ ID NO: 129101 - DNA, 1952 bp, Zea Mays
gatgatcaatatatggagaagcttgaatacatatcattatgtgatagagattttgtttgcttatgtcatctgattgggatgataatttgtttttgtttatcttaaaattagtaactaatgtctaatacaacttctgattagattggcaaacatcttggactcaacaattcaaaaaaacttcataaatgagtatcatccatgctaaaaaaaattcaacctaacatgggaagcagaagttccagacaagacatcgtagtaccgaatttggacttcaaaaaacttctcactctacaaagctggtactgctctgcaaaattttgaggcactctcagaagactgtgatgattgttcggatttgtggtccctagtttcatctaaagatttggaatcacctagttcacagagcaaattactcttgcttgaagaagagaaccatgacaaaccaattggacatcatatccagaacaaccgtgatgcttctgctgcagtttcccagttagttgaagaagataaacttgcttcgaatcagaggaggcgtcggtgccgtccattatcttctgatgatcaacgccatagaaggattctacacatgttaaagaagaagaaatttgtactgaaggtggagttacataaatggttagaacggcttgaaaagaaggacgggaaaataatggataggaagacattgactcgcacgttgaataagcttcagcaagagggaagttgtaaatgtatcaaagtcagtgctccattggtgacaaattatgctcgcagtcgtctctttgatgtaatactgcattcttctgttagagacgtgtcaccagaacttgtggagcaatttaggaccagacaaaggaactttgacaccgaatctcgcgcaggtgcagcagctaaagtgaagcaaaatcaacatatgactgccatacctggtctgaggatttcacgcagagttaaagtttacaaaccattactattagaagctatgtatgcaaatggattcataggcgcaaagatgattcgagcaaagttatttcataaatttctgtgggcttatgtcaattctttgccaaattggtgcaatgcatttggttgtaccaaagcagggcagtatgataagagccttaatcaatcatgcctgttattttctatggaagcagctatgaaagaaatgccccttgaactctttctacaaattgttgggtcagcaaagaagattgataacatgataacgttgtgtaggcttggaaaaacactttcagaaatacctacagaggaatacaatcagatcttggatactcatgccaatggccgactctcacgtttagtaaatattttggacaagctcaagctagttcagcttgcaaaagaattcttagaagatgctggtgtatcgtcaaatgccatgtatacacattcgatggagctcaggccttacatcgaagaacccatgccaagaattcttccatcttcccaactgaacaatcatcggaaaattcggcatgattttgtactttcaaagaaagagtttgttgattcttattgggaaacactagagtgctgttatttaacagctggtttggctgacccgttaagtgccttccctggcagttctatcccggaggtttgtctcatctgctgtacatcattgatgcataggattatcgcatacgttgaataaatgtacttagcgcctgtttgtttgctccccaacttacataaggtagcttctgggcatgggcagtacggtgagaaacaccacccttgatgccgaaataagtttcccatatttgtgtttaccatactgcccttgggccataagctatcttatataagtatggatgaaaacaaacagacccttcgaatttgaattatcaaattcctcaactttgaatgctaatatagctgtgttaactatttatattgacaactgtgaaaatagtgacttggatttg

SEQ ID NO: 129102 - DNA, 2947 bp, Zea Mays
gatgatcaatatatggagaagcttgaatacatatcattatgtgatagagattttgtttgcttatgtcatctgattgggatgataatttgtttttgtttatcttaaaattagtaactaatgtctaatacaacttctgattagattggcaaacatcttggactcaacaattcaaaaaaacttcataaatgagtatcatccatgctaaaaaaaattcaacctaacatgggaagcagaagttccagacaagacatcgtagtaccgaatttggacttcaaaaaacttctcactctacaaagctggtactgctctgcaaaattttgaggcactctcagaagactgtgatgattgttcggatttgtggtccctagtttcatctaaagatttggaatcacctagttcacagagcaaattactcttgcttgaagaagagaaccatgacaaaccaattggacatcatatccagaacaaccgtgatgcttctgctgcagtttcccagttagttgaagaagataaacttgcttcgaatcagaggaggcgtcggtgccgtccattatcttctgatgatcaacgccatagaaggattctacacatgttaaagaagaagaaatttgtactgaaggtggagttacataaatggttagaacggcttgaaaagaaggacgggaaaataatggataggaagacattgactcgcacgttgaataagcttcagcaagagggaagttgtaaatgtatcaaagtcagtgctccattggtgacaaattatgctcgcagtcgtctctttgatgtaatactgcattcttctgttagagacgtgtcaccagaacttgtggagcaatttaggaccagacaaaggaactttgacaccgaatctcgcgcaggtgcagcagctaaagtgaagcaaaatcaacatatgactgccatacctggtctgaggatttcacgcagagttaaagtttacaaaccattactattagaagctatgtatgcaaatggattcataggcgcaaagatgattcgagcaaagttatttcataaatttctgtgggcttatgtcaattctttgccaaattggtgcaatgcatttggttgtaccaaagcagggcagtatgataagagccttaatcaatcatgcctgttattttctatggaagcagctatgaaagaaatgccccttgaactctttctacaaattgttgggtcagcaaagaagattgataacatgataacgttgtgtaggcttggaaaaacactttcagaaatacctacagaggaatacaatcagatcttggatactcatgccaatggccgactctcacgtttagtaaatattttggacaagctcaagctagttcagcttgcaaaagaattcttagaagatgctggtgtatcgtcaaatgccatgtatacacattcgatggagctcaggccttacatcgaagaacccatgccaagaattcttccatcttcccaactgaacaatcatcggaaaattcggcatgattttgtactttcaaagaaagagtttgttgattcttattgggaaacactagagtgctgttatttaacagctggtttggctgacccgttaagtgccttccctggcagttctatcccggaggtttctcatcgtcgttcatggtgttcacttagagtcatgactactgaacaacgactggagttgcaacagcgtattatggatgttggtgagaaggggaaaattccttttaaagactgtgttagaatagcaagagaactgaatctttctgtagagcaggtacttcgcctttcatatgaaaggcaatctcggctccatgaacagcccagctttacttctaaacaaaagcagcaaagagttggttctggattgactcctgtgagaagaaagagacgtgccgatgggaccagcctgaagcttctgaaacgtacagtacaagcaagtggatctgctgaacaaatattggagcaacctattgttgatgaagaagtaccaatgatcagtcggtatgctatcttaagaaagagctgcatgagaagtaaaagattcttttggacatgtgaatctgatagaaaacttctgatggcatacattagagtgcgtgcagtacttggggcaagatattatcgtgtaccttggaagtctctctctgatcttccagctccaccacatacatgtcttagaaggatggcactactattgaaaacaaacggaaagataagaggagctgtcatgtgtttatgtaaccttcttggggaacggtatgttagatatcttgaaaaggaaaggagtttgaaaaggagaagattgtttccccagatttcaaacagaagtcaagaaaacagtttggattcagattgtgagcaattcaattgggatgactttgaagttccagagataaagagtgcacttaatgaagtccttgaattaattcaaacagaaaaaatagatcaggccaagagaattgggcctgttaatcaaaaaaacattaacaatgataatgatgtcacaaaggacacaatatgttctcaggaactgccaaataatcaggctatactaggtgaaaccaaaacgagtgcagtttcagaaagtgggttctgtgatcctgaaaaatcatgcagacattcaaatgcagaaagtgaaaacatggaagtcttctgcaaacctcaagaaaaaatcattaaggatcaccgaaataagattattgaaagaggcatatggaaatcattggctgttgcaaatgccttggagcttctgaagttggttttcctcaacacatctttaggatcaaatgtacaagcttcactagcagcaacactgcagctttattcagagagcgagatttttactgctgtttcctttcttaaagaaaaaaaattcttggttagtgtatctgaacttatgtttcctttggaatatttgcttttcagtatgatgtgcccaacttaa

SEQ ID NO: 129103 - DNA, 646 bp, Zea Mays
aaataatggttgcctaggtaacatttgtcaaagttgacaaatatctgtgaatggcgattatagacataaggtatacatgctcatacatgtatgctccatattttagttttttatatgttgacctcagtagatacaaacatatttgctgtttgatgtttttgaaattatttagctcgtcttcaaaatgttgtctccaatcttattaaaaattctagtgatacatttaaaatgtgtactatggctcatttgtcttgatcaggcaatcctctctgtgttgtggctggaaaatggcttattctcagatattaagtttctactcctattttagttgattttttttcattagttaacttttttctaaaaaaaaggaaaccatgttctaatcgcatgctttactcttgttgtgttataggaagatgttatccgtaggatggatgtattgaatcctcagacttgcaggaccctgctagaaaagctaacgctcgatgggaaccttcatgttcgggtttttgaagaacctgtgccaatggctccgaccacactgtagggtatgttcaagcaacactctagtaaagagccatcaaaatgtgtaaagcgctactttgcaaacccaatgagcacattacaactgtaactgcaagaagat

SEQ ID NO: 129104 - DNA, 921 bp, Zea Mays
accttcctctttgtctcaaaaggaaaaagaagaccgcatcccccggaactcaggatccccgtggggctctccgtgcctgatgccgccattggcaaaaccctgaaagccctaaaccttccgagacaaccatggacgagctcgtgtcggtggcgctggaggaggtgtgcgcgcgcctcgcgccggggatccccgtcgtggacctatggccagcgctccgtggcacgctcgatgcgacggggctcccgctaggcccagcagtcaagcgcgccctgtgggctcgcatccttgcgctccgcgtcgtcaacctggtggagggggatggggacggggtgcccatctctgccggagacccggcggagaaggacttcgaggaggccgaacggcggggcatgcggctcgtggcaagcgcggggatcagggacaacttcctggggttatacgagcgcagattcgcgaagtcggagttgagtgccgtccagaaggcgacgttggagtgtgttgcggcaagcaggacttcaggggtaccacagagtgaactttgcaaaaaatttagaatgaaaggaaacaatttccattttattgcaaagagtcttgaatcacaacgactaatagttagacaatcaactattataaagatgaaagatcacggagctgagagggaagatgcctcgcagaataaacatattatcaataccaattcactatatctctcccgatatgccaaggacttgaatatgacttcacagcaaagaattgagattacaaagcctgaactacttgggagcaatgaagaggccaatgtagatgctttccgagtagatggagcttttgatgttaactccaagaatgatatatctattcatgattatcttccagcaatgaaagccatatgtgataaacttgaagaagcaagtggaaagg

SEQ ID NO: 129105 - DNA, 1534 bp, Zea Mays
ttttttttcattttagaataatcaggctatactaggtgaaaccaaaacgagtgcagtttcagaaagcgggttctgtgatcctgaaaaatcatgcagacattcaaatgcagaaagtgaaaacatggaagtcttctgcaaacctcaagaaaaaatcattaaggatcaccgaaataagattattgaaagaggcatatggaaatcattggctgttgcaaatgccttggagcttctgaagttggttttcctcaacacatctttaggatcaaatgtacaagcttcactagcagcaacactgcagctttattcagagagcgagatttttactgctgtttcctttcttaaagaaaaaaaattcttggttactgggagtggtgggaagccgtacaccctttcttcacaattcttaaccaatgcttgttgttcaccttttccatttggttcagggaaaaaggcttctatattttctaattggcttatagctcagcaaaagaatactacagacagtggagtttatttgtatccagatatacaatgtggagaaattgttcatctattctctctggttttgtcaggaaaccttctcatttcacctttcttgcctagtgaaggagttggtgaggctgatgagcctaacagctctggtcctttggtcgtagataccagcggtttggctgacaacagtcataagcgcaaggctgatacagtgaaactgaaaagcagcaaggctaagaaaccgaagcctttgccaaagatagaaagtgacttttgctaccgccgggagaaaggatttcctgctatccaaataggtctaaatcttcatagaattcaaacaagcaatttcttgcaagagtttcatggtaaagaatcctctatttttacttcaagctgggcaatgagcaaaaagaatgttgatttgcatgcagaaaggcacatcatgccattgttttcaaattgcttaagttcatataggcatttattgtctgaatctcagttggagaactcatacagtggatggccttgggatgccatgacaaattatgcggaagagttatcaccagtatctgagcaccaaaatgaattgttcacattgtctcctgaactgttcaggaatgcatttcttgttattcatcaagctggtgggcaaggagttaccttgagagaactttcgcaggcactgcatccgttagccatgcagctggtcttaataattgttgacactctcaaaagatttcagctggctgttaaggtcaatgcatatgatggcgttcagattgtggactcattacattcgtcaaagtatcatatagctacacttgcagaatgtgatagttgctgctgtacagatcctccaacttctcaatttgttgataatgaaaacacaaaaaatctactgaaagagaagcataccaagcctattaattttcctggtccaataaaaatgcttggtgatgggcacacagtgacagtaattaatgttcaaagcaagttgagcccaccttacatgcacagcaaagatcctggggatgcggaaagg

SEQ ID NO: 129106 - DNA, 411 bp, Zea Mays
atggcacccaggatctggaactccaggtgcagcgtggatgttcaggcgagggacacgaggcgacgtgagcagagggagcagaagaagcagcgtcggatgcgaagcagagctgcggcgtgctctccacgtcggctgctaccaccacaccgccgcagtacgagcataactcgggtgcctggtacgtcgccaccacgcccagggatggaggaggaagaggagatcagaggggaagaggagagtagaggggaaaggggactcaccgctcgaggggccttgtcccgctctgcacctggagttcgccgctcgccggccagcggggtgaaggagccggatctgaggatgagaagggctcgtgaggggctttgtcccagggaggacgcaattgtccgtccgattcagagggatgaatag

SEQ ID NO: 129107 - DNA, 965 bp, Zea Mays
atgacttcacagcaaagaattgagattacaaagcctgaactacttgggagcaatgaagaggccaatgtagatgcttttcgagtagatggagcttttgatgttaactccaagaatgatatatctattcatgattatcttccagcaatgaaagccatatgtgataaacttgaagaagcaagtggaaaggtcgactgctctcacattttccctattaaagctatgctggctcttgttgtgtcagatataaaagttgatctcgactacaggatggcatatgggcacagagcatggagaaatgtggtgatacgtgaattgattccattcctcatactgagcaaagtattgcatagattaatagatgcacgacttgtggagatatttgatgtcgaagatgatgataaggttgtccgttgtttgcgtctactgaaaaattttgatccaaatgagtttcagccaaaaagtatagcttcaaattttaaatttgttaaaaaaggtcaggcaactgatcaaattttggaacttccattagagaactgtatatatgatatgatcagtagccaagggacaaaaggtattacacttgttgaggtagagcagcttccgggtacagtaatggcatttttacttgaccggttgacccaataagccaatataattattaatcggtcaatgcgctaatcggcagcccaccgcgtagcctaacgttaaatggccaaaaaaaaccctgcaagattgtaataaccacaataaagaaacattgacacattcctcttacagtaaccatgtattcttcttgaataatgtagtgtcactcttgttcccgataatgtacaaaaattatgaactgtacaaatggtagaaagatatagtgcaacagttataaattgttcttgcttatcattcatctccaaataataattatattggtttcactagactgtagtctgggatgaccagtatataga

SEQ ID NO: 129108 - DNA, 1234 bp, Zea Mays
agataaacttgcttcgaatcagaggaggcgtcggtgccgtccattatcttctgatgatcaacgccatagaaggattctacacatgttaaagaagaagaaatttgtactgaaggtggagttacataaatggttagaacgacttgaaaagaaggacgggaaaataatggataggaagacattgactcgcacgttgaataagcttcagcaagagggaagctgtaaatgtatcaaagtcagtgctccattggtgacaaattatgctcgcagtcgtctctttgatgtaatactgcattcttctgttggagacgtgtcaccagaacttgtggagcaatttaggaccagacaaaggaactttgacaccgaatctcgcgcaggtgcagcagctaaagtgaagcaaaatcaacatatgactgccatacctggtctgaggatttcacgcagagttaaagtttacaaaccattactattagaagctatgtatgcaaatggattcataggcgcaaagatgattcgagcaaagttatttcataaatttctgtgggcttatgtcaattctttgccaaattggtgcaatgcatttggttgtaccaaagcagggcagtatgataagagccttaatcaatcatgcctgtcattttctatggaagcagctatgaaagaaatgccccttgaactctttctacaaattgttgggtcagcaaagaagattgataacatgataacgttgtgtaggcttggaaaaacactttcagaaatacctacagaggaatacaatcagatcttggatactcatgccaatggccgactctcacgtttagtaaatattttggacaagctcaagctggttcagcttgcaaaagaattcttagaagatgctggtgtatcgtcaaatgccatgtatacacattcgatggagctcaggccttacatcgaagaacccatgccaagaattcttccatcttcccaactgaacaatcatcggaaaattcggcatgattttgtactttcaaagaaagagtttgttgattcttattgggaaacactagagtgctgttatttaacagctggtttggctgacccgttaagtgccttccctggcagttctgtcccggaggtttgtctcatctgttgtacatcattgatgcataggattatcgcatacgttgaataaatgtacttagcgcctgtttgtttgctccccaacttacataaggtagcttctgggcatgggcag

SEQ ID NO: 129109 - DNA, 297 bp, Zea Mays
aagggttggagacccatatttatagccctagaggctgcactaccacaccttctcacacacactacacaacaggattgtcctctagatgctaaagagactacagaggacagtcaaaagcgactgttgtcctctagatgctaaagcgactacagaggacagtcaaaaagcgtctgctgtcctctagatgctaaagagactacagaggacagtcaagctgtcctctagatgctaaaggactacagaggacagtcaaaagcgattgctgtcctctagatgctcaagacttattccatcagt

SEQ ID NO: 129110 - DNA, 1454 bp, Zea Mays
gccacgccacgcacttggtccacacgtcgtattcggatgaagcatgagagagaagagcaagaaagacttcgtcacgtcaggtcgacggcgaaagacgcggaggttggtgaaggagtgaaggaagaaagagaacgaaaggcggcctctcactcgcagtcgcagtagcaggttctagaccaccaaacccagcggctcccgctcatctcagttcggcttcggccttcgcattcctctacagatttcgcagttttgctgggggtaactacggaatggggggcggatccggatctttcctcaaggtcttggtcaacaacatggatgtcctcgcggggcctttggtttcacttgcgtatcctctgtatgcctctgttagagcaattgaaacaaaatctgctgtggatgatcagcaatggctcacgtactgggtgctgtactcatttatcactctattcgagctcacctttgctccggtactcgaatggcttcctttctggtcttatgcaaagctgttcttcaattgctggttagtattgccacagttcaatggagctgcacatgtatatgagcattttgtgaggccaatgattgtaaatcagcaagttgtaaacatctggtatattccaaagaaggatgaatcaagtagacctgatgatgtaatttcagctgcacagaggtacattgagcaaaatggatcaaaagcgtttgagaatcttgttaacaagtttaagagttcgaacccaaggcgctcaattctggaggaggtagaggttgaaaggagggccaggattcaactagaatctgaagcgagggaagtgaaccctttcttcaatccagaatatcagtactaggcaaccattttcccttcacttgccaggaatgtgctaggatcggtttggaggaagatgtctggatattaggattgcgttttgcacctactgaatcgatgatattgtgtagatggacaaccataattgttgtagatatgttgtggcgatggaactcatgtaatggtcatgtcgcgaatgtttcatgctgctggaaattatgtattcacactggactctagttatgtgcctcactagtttcttgaaggtagttgttgaactaggtactagtaacgggtgcgcgctttgcgcgcatggtaaacaatatgcaatattgtttttaagttaattattaatgcttgttataattcatatattgccagacgaataaagcaagaataaagcgagagagttttttttaagatgatacagagcatgaaagacagtatagagcacaacagatttatataaaataaaatagagttaagtgagttgtggccgaaggtaatatgtttgttgcgatatttaaagctaccttgttatatttatatgaaatgtctttagaagagttgaacagttatatataattatagaggacattctacaaacttaaaggttgctaataatctg

SEQ ID NO: 129111 - DNA, 1625 bp, Zea Mays
gccacgccacgcacttggtccacacgtcgtattcggatgaagcatgagagagaagagcaagaaagacttcgtcacgtcaggtcgacggcgaaagacgcggaggttggtgaaggagtgaaggaagaaagagaacgaaaggcggcctctcactcgcagtcgcagtagcaggttctagaccaccaaacccagcggctcccgctcatctcagttcggcttcggccttcgcattcctctacagatttcgcagttttgctgggggtaactacggaatggggggcggatccggatctttcctcaaggtcttggtcaacaacatggatgtcctcgcggggcctttggtttcacttgcgtatcctctgtatgcctctgttagagcaattgaaacaaaatctgctgtggatgatcagcaatggctcacgtactgggtgctgtactcatttatcactctattcgagctcacctttgctccggtactcgaatggtaaaacaacaaactttcagcacaagtgggcatttcaccagctttagttccatgtgcagtttggaacttaccataatggtcatatgtggtatattttttagggctataaacaatagtaccttaatttctttgctagtgaccttaaatggtttagggcctgtttgaatgcactagagctaatggttagtttgctaaaaaattgctagtggaattagctggctaacgaatagctaactattagctaatttactaaacgtagctaatagctgaactattagctagattgtttggttgtctttagttatttttagcagctaactattgcactttgcaggcttcctttctggtcttatgcaaagctgttcttcaattgctggttagtattgccacagttcaatggagctgcacatgtatatgagcattttgtgaggccaatgattgtaaatcagcaagttgtaaacatctggtatattccaaagaaggatgaatcaagtagacctgatgatgtaatttcagctgcacagaggtacattgagcaaaatggatcaaaagcgtttgagaatcttgttaacaagtttaagagttcgaacccaaggcgctcaattctggaggaggtagaggttgaaaggagggccaggattcaactagaatctgaagcgagggaagtgaaccctttcttcaatccagaatatcagtactaggcaaccattttcccttcacttgccaggaatgtgctaggatcggtttggaggaagatgtctggatattaggattgcgttttgcacctactgaatcgatgatattgtgtagatggacaaccataattgttgtagatatgttgtggcgatggaactcatgtaatggtcatgtcgcgaatgtttcatgctgctggaaattatgtattcacactggactctagttatgtgcctcactagtttcttgaaggtagttgttgaactaggtatttcttcgtctcttgtctgatataggtgtaaaccatgtggcactgccatgggaggttgactgtccgaatgctacgcttttattaaagctgccagaagcactgaccagtgcactcgactcaagtttggatgaggctgtccgagcagtctgcctaccgtctaccgagcctcacgctcagtag

SEQ ID NO: 129112 - DNA, 1093 bp, Zea Mays
aagaaagacttcgtcacgtcaggtcgacggcgaaagacgcggaggttggtgaaggagtgaaggaagaaagagaacgaaaggcggcctctcactcgcagtcgcagtagcaggttctagaccaccaaacccagcggctcccgctcatctcagttcggcttcggccttcgcattcctctacagatttcgcagttttgctgggggtaactacggaatggggggcggatccggatctttcctcaaggtcttggtcaacaacatggatgtcctcgcggggcctttggtttcacttgcgtatcctctgtatgcctctgttagagcaattgaaacaaaatctgctgtggatgatcagcaatggctcacgtactgggtgctgtactcatttatcactctattcgagctcacctttgctccggtactcgaatggcttcctttctggtcttatgcaaagctgttcttcaattgctgctgcacagaggtacattgagcaaaatggatcaaaagcgtttgagaatcttgttaacaagtttaagagttcgaacccaaggcgctcaattctggaggaggtagaggttgaaaggagggccaggattcaactagaatctgaagcgagggaagtgaaccctttcttcaatccagaatatcagtactaggcaaccattttcccttcacttgccaggaatgtgctaggatcggtttggaggaagatgtctggatattaggattgcgttttgcacctactgaatcgatgatattgtgtagatggacaaccataattgttgtagatatgttgtggcgatggaactcatgtaatggtcatgtcgcgaatgtttcatgctgctggaaattatgtattcacactggactctagttatgtgcctcactagtttcttgaaggtagttgttgaactaggtatttcttcgtctcttgtctgatataggtgtaaaccatgtggcactgccatgggaggttgactgtccgaatgctacgcttttattaaagctgccagaagcactgaccagtgcactcgactcaagtttggatgaggctgtccgagcagtctgcctaccgtctaccgagcctcacgctcagtag

SEQ ID NO: 129113 - DNA, 342 bp, Zea Mays
caaatcaataccatacatacctggtatattactatttatcagtcaacatttagaaaattagggagctcatcattcaaaattgtaaacgattggtaaaatgtattactatttagtagtagtctggaccgctacacctaaaggttgtgctctgcaggaatggaaagtagtaggcagaatagctgcacctggtggttgtgctcccgcgtcgccactgcatcgcccacctttctttgtcgctgcgacctggagatgcaagtcaaactttggcaacctttgtcttggcacaaagcaggtctagcaaaacaatatacaagtcagtatcagttagcaagaacatgcatt

SEQ ID NO: 129114 - DNA, 735 bp, Zea Mays
atgccactccctacgcccgcaacgtccgcctccctacgcgcgggtaaccggcagcacctcgtctctctcgatgtgccaatggcgccgcctccatcctacccgatctccgcctccgtcaccgcgtttgtcaaggaggaggacgcccccaacccgtttggtggtctccccgatggcgccgtctctgtcctacccgacctcgagttcattgagatccagaaggagcaggcgcaaacttctccgtgcacaggaggtcaagcggaagacatccaccacaaatccccaaaccgtgcacccaccatcattaaaaaggtcgcagctgccatcctgctccaaccatcctacagtgacggaaatcctgcgcccaccctcatccaggacaaaggttctgatgaggttgtattcaaggccacggggagggctatcaataagactgtcatggttgtggaattgatcaagaggaggattgttggcctccatcagaataccaccactggatctactgatattactgatatgtgggagccattggaagaaggcctacttccgcttgagacaacaagacatgtctctatgatcactataactctttcaaagaaggagctggacaaatcatctatcgggtatgcatactgcactcttttgtcagctgcatttaatgactttctttgccagtttgtcttaaccagattctatggttttctatgccatgaactcacatctcgctgcgtcaagtaa

SEQ ID NO: 129115 - DNA, 1032 bp, Zea Mays
atgtcttcgtcgaccacgctcctcgccggctccatatccgaccgctacattccgccgctctacgacgacgactgctacaccatgccacagccgtttgtcgatactctcgccaaccccgacgatgacctcctccaggagctcgacgtgttggacgaggatgccgcgagcgccaacgcggctgacgacgattcaggcgttgtcctcgtctatgcgccgctcgactcgaacatcgacagcagcggatcaccgcgctacccgtgcctccccgagggcgcggtgttgttccatcgggacccgcacgagaaggtcctcatcggcgggacggagttgtccggcgaagtccgccgcctccgtttctccttgtcgtcaccagaccaggcgatgaaccccgcgctcgtccccaacaccgacgcagaggaggaggaggttctcaccatcacgcccaccaagtgttcgacaatatacctcaaccgcggcatttactccgtccccaacccggtcctccatcgtcagcacctactccgggactgcgacggcaaccacgtcggagtcgacgtcgacatccttcctacctccgagttcgacgagggtcccatcttcgacgaggagccctgcttccaccgcagcctcctggattcagatccagactctccctacgactgggtcgtccccgtcatcgccgtccacggcagcggcgacactgagctgtctcacagcgaagccgacaaggtccccgcgaccgccgcgctacccaacctgcgcgagaagatctgctgtcggttcgtcgacaggacgaagctgtcccgccacgtccacctcatccacttctccctaccgtcgccggaccaggtgctcggcatccccaccggcacgcatgtcttcgactgcaccagcgttgacgggaagccgtgtatgcgattgtacacgccgccgagcaaggaggacgaggttctcgccactacgcccaacagacattttgagatcgactcctggagaagggccttcgtggtaccatcttttgaagaaagttag

SEQ ID NO: 129116 - DNA, 591 bp, Zea Mays
cagttcatggattttttgtccaacttggtgtcaatgtggatacgagtgactgggagcttcaagctctgggaagactttcggttactgtggcaaagcaagccaagctcgaccgcttccccatcaccattagtgatccaatctcagctacgttcggtgaaccatttgagaaagccaacccaagccattcctccacagcaatcgtttgtcgagctggttcaggaattgatatggttgttggccttgtttcttctagtctaggtgctgttgctagtggccaaggcaatttcaaagtcttagtttgggatcctggtggttatgcatatcacagcttggggacaagctgtatttcaagcggtggggaatgtcagcatctcagacaggagcaatgagcagacaacgagaacaagccacggcacgtgagagtccatcgtccaaacgccaaggttactgagccaatatgggccaagtagtgggtcagctatctatgggtcgcttgatgttcgagtagtactatataaaagacaaacacttgtgtaataggggcatgaacaatttagctatcaaatatcagacaaactcgtcttcctccca

SEQ ID NO: 129117 - DNA, 1463 bp, Zea Mays
gaaaaattacgcaactactcggcagcgtctgctgcgtcctctcctgcccgatgcgcacccgtcactgcttttacgtccccgtggcccaggccacaggcggcagcggcacatttccgccaccagctaccctgccttctctctcctcttctttacacctcacctccggatcgctcagagagtcagagattcgagttgagctataggcgtagccgactggtcgccgcgtcccctctcggctccacccggcgagcgaacaatggaggcggggggcgtcggcctggcgctgcaggcgcgggcggcgggcttcggctccagccggcaccggggcggcctacaggcgcccaccgggagcctgagagtcgctgacccggcgggacctgcggtcgctgtgcgggctcgcgggtccaagcccgtcgcaccgctccgactccgtgcgaagaaatcgtccggaggtcatgaaaactcgcacaactccgttgacgaagctctcctgttgaagagaaaatcagaagaagttctgttctacttgaacgggaggtgtatttacctagtaggaatgatgggttctggaaaaagtactgtggggaagattatgtctgaagtcttgggttattcgttctttgatagtgacaagttagtggagcaagctgttggaatgccatcagttgcccaaatattcaaggtccatagtgaagccttctttcgggataatgagagtagtgtcttgagagatttgtcctccatgcgacgattagttgttgccaccggaggtggtgctgttatccgaccaattaactggagatatatgaagaggggcctatctgtttggttagatgtgcccttggatgctcttgctaggcgtattgctaaagtgggaactgcctctcgtcctcttctggaccaaccatctggtgatccgtacgcaatggccttttctaagctcagcatgcttgcacagcaaaggggtgatgcttatgcaaatgcagatagattgcatgtaaacaaggtcatgatgatgtctctaagctgacacctactgatattgcaattgagtcacttcataagatcgagagcttcgtcatcgagcacactgctgatagttcagctagcgacgcgcaagctgagtcgcagatccagaggatacagaccttgtagaaccttaatccctttgtttgccacatagagcatcgttgagttatttgtaaaggaatggaagaagggagctaataatccgaagtgtgccgttggctgaaacatcgcctgtcttcactcctggctctgcttctgttcgcttctcatcgtggtttgataccttggtggacatctatgctgacacctcatctcaccaaacatacttgcataccgtcgtcgcccgctcgaacgaagaaacaaagtgccgtttggttcatatatttgtaatgtaatgggtaactgataatgttaaatcatatttgttttagtcc

SEQ ID NO: 129118 - DNA, 610 bp, Zea Mays
gtcactgcttttacgtccccgtggcccaggccacaggcggcagcggcacatttccgccaccagctaccctgccttctctctcctcttctttacacctcacctccggatcgctcagagagtcagagattcgagttgagctataggcgtagccgactggtcgccgcgtcccctctcggctccacccggcgagcgaacaatggaggcggggggcgtcggcctggcgctgcaggcgcgggcggcgggcttcggctccagccggcaccggggcggcctacaggcgcccaccgggagcctgagagtcgctgacccggcgggacctgcggtcgctgtgcgggctcgcgggtccaagcccgtcgcaccgctccgactccgtgcgaagaaatcgtccggaggtacgagggccgactccgcttctcttttttacacattgctgcgaattgattcgacattttttggggtcttctcctcttatcattctgtttgctgcgaattccattcattctaatcgaatcgatgctatttggggcaaatttggattttctccataattgctgagttccatggaattgacgtgtgatttggcggtaggattttaaggggtagtttggct

SEQ ID NO: 129119 - DNA, 1499 bp, Zea Mays
gtcactgcttttacgtccccgtggcccaggccacaggcggcagcggcacatttccgccaccagctaccctgccttctctctcctcttctttacacctcacctccggatcgctcagagagtcagagattcgagttgagctataggcgtagccgactggtcgccgcgtcccctctcggctccacccggcgagcgaacaatggaggcggggggcgtcggcctggcgctgcaggcgcgggcggcgggcttcggctccagccggcaccggggcggcctacaggcgcccaccgggagcctgagagtcgctgacccggcgggacctgcggtcgctgtgcgggctcgcgggtccaagcccgtcgcaccgctccgactccgtgcgaagaaatcgtccggaggtcatgaaaactcgcacaactccgttgacgaagctctcctgttgaagagaaaatcagaagaagttctgttctacttgaacgggaggtgtatttacctagtaggaatgatgggttctggaaaaagtactgtggggaagattatgtctgaagtcttgggttattcgttctttgatagtgacaagttagtggagcaagctgttggaatgccatcagttgcccaaatattcaaggtccatagtgaagccttctttcgggataatgagagtagtgtcttgagagatttgtcctccatgcgacgattagttgttgccaccggaggtggtgctgttatccgaccaattaactggagatatatgaagaggggcctatctgtttggttagatgtgcccttggatgctcttgctaggcgtattgctaaagtgggaactgcctctcgtcctcttctggaccaaccatctggtgatccgtacgcaatggccttttctaagctcagcatgcttgcacagcaaaggggtgatgcttatgcaaatgcagatgtaagggtttctctggaagagattgcatgtaaacaaggtcatgatgatgtctctaagctgacacctactgatattgcaattgagtcacttcataagatcgagagcttcgtcatcgagcacactgctgatagttcagctagcgacgcgcaagctgagtcgcagatccagaggatacagaccttgtagaaccttaatccctttgtttgccacatagagcatcgttgagttatttgtaaaggaatggaagaagggagctaataatccgaagtgtgccgttggctgaaacatcgcctgtcttcactcctggctctgcttctgttcgcttctcatcgtggtttgataccttggtggacatctatgctgacacctcatctcaccaaacatacttgcataccgtcgtcgcccgctcgaacgaagaaacaaagtgccgtttggttcatatatttgtaatgtaatgggtaactgataatgttaaatcatatttgttttagtccaaccgtaatcagataccatactagatatcagtctatatgtaatgagtaactgataatgttaaatcatatttgtttta

SEQ ID NO: 129120 - DNA, 1529 bp, Zea Mays
tcagttacggagttaccgtcgccagcagtctccgcgccacacctgtcagcacaacctatccgatttccgggctcatcccgacgtacagcgtcacatcggcgtcgccgcgatgctactcctcccggggcgtccagtgctctcgccggcgctgcagtactcctcctcgccgtcaccatcccgtctccgccccctcccttgcaccagcaacgcccccacatctgcttccaccgccgcagacgctgccacgccctcgtccttctccgtcgaagactacctcgtgaacaggtgcaatctctacgccaacgtggccgcgcgcgtggcgccggagctctccgccatcaggtctccctcgaaacccgacgccgtgctcgccttcctcgccaacacgctcgagctctccccgccgctcattgccgtggcagtggcccgcgacccgacgatactcacctgcagcgtgccaaggacgctcgcgccgcgcgcggaagagctccgcgccctcggtttcaccgcgtttcagatgggccttatcgtcgcgcgttgcggcgcggccgcattccgctcacgcgcgctcgtccccagtgtccagttctggctcccgtatcttcgtggtcgcgtcgacaagctcgtcgccgcgctcaagggcaacccgggcctcctcaccgccgacctccggacggtcaagtccaccgtcgcgctgctccaagaggaaggcaccctcaccgatggcgacgtcggctggttcgccatctcatactgctccaagctgcttgtcgcgagcccggacgaggtcgactccgtcctagcccgcgccgacgagttcggcgtgccgcgcaagacgcgggcgttcaaggacgcgatcatcgcggcgttcagcgtcactccggagcggctcgcatggaaggtcgcgttcttcagggacgagctcgggtggacggaggcgcaggtgaagacggcagctgcgaagatgccgacgctgatgacggtctccgcggagcggatccggaggaactgggagttcctgaccacagaggtcgggatggacgcggagcgcgtggccagcttcccggcgctgctgaggtacgacctggaggggcggctggtgccgcggttccaggtgatgagggtgctgcaggcgcggcggctgtggcgcggcagggacttcaacaacatcgctgccatcacggaggaggatttcgtggccaagttcatcaggccatttctggtcaaagtcccaagcttggccaagatctacgaggccgctgtcatcgagaaggaagaacagtagcgggatagtgtatcatcagtgggatgctggacaaccggagagctgatgatccctgtagatagccaggcatatgcaactccgttgtagattttagttttgataaaaggattacatgcctttaatgcaaagattagattcaacatgaaactgttgaactgtgtaaagtgagaaacaacttttgaacacaggagtccggagcttctattgtgaaggcgtggtataattgccatttttttctatagaa

SEQ ID NO: 129121 - DNA, 1502 bp, Zea Mays
gcgagtatgcgactcaagtcaaaaatcaccacccgctcccactcccagccatgcctctcatcttcttctccgccgcagcccccctcgtcgccgtctccctgctgcccctccccacccactgctgcctccgcctcaccgccacccgcgcggccgccacgagcacaaccgccaccccgggtcccgctcccgcgagcaccttcgccgtcgaggactacctcatcgccagctgccacctcaccccaccgcaggcgctcaaggcgtccaagagcctggcgcacctcaagtccgcatccaacgcggacgcggtgctcgccttccttgcggacctcgggctctccccaaaggaggtggccgccgttgtggcgtccaatccgcgtgtcctctgcgctcgcatcgaccgttccctggctcctatctccacggagctccgcgcgctcggcctctccccgtcccagatcgcgcgcctcgcgcagatcgccggccgctacttcctctgccgcagcttcgtctccaaggtacggttctggctcccgctcttcggctcccccgagcggctcctccaggccagcgactggaactactggctcctcagctccgacctcgagaaggtggtggagcccaacgtggccttcctcaggaagtgcggcctcagcgcagtcgacatcgccaagctgctcgtggccgcgccgcggctcgtcaccatgcctccggagtatgtccaggacgcggtgcggcgcgccacgcagctcggcgtggcgccgggctcccagatgtttcgccacgcgctctccaccgcgggatgtatcgggcaggagaaggtcgactccaaggtcgccgtcctcaaggagacgctcgggtggtcgcaggaggaggtgagcctggccatcagtaaggcgccgcggatcctggttgcgtccgaggagaggctgcgccggaacgcggagttcctgctcaacgaggtcgggctgccgccgcagtacatcgcccgccgttcggtgcttctcatgtacagcctcgagaggcggatagtgccccggcacctcgtgctgatggttctcaaagagaaggggttggttgagcaggacaggtgcttcttcaacgtggtggcaccaacagaagagaaattcttggagaaattcgttgctccctacgaggaatccatccctggtcttgccgatgcttatgagtctgcttgtatggggaaagtgacccggggcctatgactggaatgtcgaggagaatttcgaaggtttgtgttccctccattgtgcatttgtgtaacctcattctactgatctcgcttcaacagaaaaattattccactgatgaactatcgaagacgaaggcagtttcatggacattagcttaggtccacactagtaagcgcataaattcatgttatagccatgaaaatgttcatttctaacttaaggatcgtttcatatgaaagtgcaagcaatataattctttttttcccatgagattttagttaatatatataa

SEQ ID NO: 129122 - DNA, 1375 bp, Zea Mays
ggccccagcgcagccgccatctatcgtgctgccatcggcacgcacacgcacaatcatcatccatttcttatccacctcatcccaccaccagccacatgtctccggccacgcgacgccctccagccccaccgccgtgcgatctggcggtctcccgatcccgtccgtccgctccccacccccaaagccctcctcttcctcgtccccccagacctcacctccctagtcccgtcccgattcccgaacaagagcgaggccgcactcccccacgagtccactctccgaccgcacgctccgcgacgcgatggccgcgctccgcctcgcctccttcaccctccgccccgccgccgccgccgccgcctcttccggcgcgactccatcggctccccggtccgcctctttctccagcgtggcgcgggggctcccctccctccgcctggccccgccccgccgccgccgcggggacctcgccaggccccgcgccgcggccgaggccgcggcggagagctacgcgtccgcgctgtcggaggtggccgtcgagaacggcaccctcgagcagacggtctccgacctcgagaagctggagaagatcttcgccgacgaggccgtcgccgagttcttcgacaaccccaccgtcccgcgcgaggagaaggccgagctcatcggcgagatcgccaagtcgtccgagctgcagccgcacgtcgtcaacttcctcaacgtcgtcgtcgacaacttccgcgcgtccatcgtgccgcagatcgtcgtcgagttcgagaacgtctacaactcgctcaccggcaccgaggtcgccaccgtcacctccgtcgtgcagctcgagtcgcaggacctcgcgcagatcgcgcagcacgtccagaagatgaccggcgccaagaacgtccgcctcaagacgcagctcgacccggcgctcatcgccggcttcaccgtgcagtacggccgcgacggctccaacttgatcgacatgagcgtccggaagcagatcgaggagatcgcgtccgagttcgagttgcccgccgtcccgctcgaagtctgaggccggcttgaggcgtccatcctcgccctcgaagctatagctgctactgtctcaaggaaccaagcgggaatgttggccctgtccccttcagtcactcagacctgcggatcaacggtggtggctccaaatctccgatacatatatgaacggaccctatttttgtgcgtttcggttggcgggaacctctgtagttctttctccttttttttcctgtggttgacagacacagacagacactgtaatatgttttaaaacactcatctatatagctgagtgtgcacctcttctctcaatcgtatatacaagctgagatagagtcatgggatg

SEQ ID NO: 129123 - DNA, 1256 bp, Zea Mays
tcaaaggtgccacgagaagtcatacgccacaagcaaaatagcaggggtagcaagaaaactagcgaaacatgagcacaaagccaaaaaagaagcaatacatgatccagaaaactcatgacatgagaatacccctccacctaaattacaaaagcgtccatcgcttgtatcagcagatcgggaaggcacaggcgtgtacgctaccaaatcaataagtctcactgcctcaccttgcggccaccgagcgaggatgaactccttgagcgaggagaccgtggtggagggatcgtacttggtgggcccgatgtccgtgccgtcgaagagccggaacctgacctcgatcggctccttcccgccggccatatcctccccgccagatcgccggcggcggcccaccacacctccccttcccaagatccaagccccggatcaaaggcccataggagcaaggaagcggccaaaaaaaaggaaatccacagaaacacgcgcaaggtgggaatttgacgacgaattcttgcttccgcgtggggtgaaagcgagggggcggcaactcggtgggggaggagaggaagacgagagccagggaggagagagagagagagacgggggtagtgggcttcctcctctcggtgcgtgtattgacggatacgcccaagcacaaatttttaattgtggttttggcatcgagccatggtgttgatggagcgtgaaagcgattggcgaggccgaggcggagcggggaattctatgccgaccggggttcgacgtcggcgacgggcgatggcggcttctatctcgggcactttgactgccctcggtggtctcgtcgacgtcttcttcactgttctgtactgctgttgtggaacatctctctctcccccctttgtctcttctttggttgtactgttacaggtccagcttgtttttcatttcaaaataaatagtcaacaaatacaaaccacaatccactgatggattgctctgggggaaagttttgtacatggatgtgccgagtgggttttaagactattttattctcgtatttgtagttatgtggaattaaagctatgtctaaggccagggtctgtttggttcgtgactaactatgtcacactttgcgtaaggttagtcgttcgaatttacgaactaaccttagacacaaaagttagataaaatatagcaagttagacagcgaatcaaacatatctactacctgcattctcaaatatttgtcgtttgctagtaatttttgaactaaa

SEQ ID NO: 129124 - DNA, 699 bp, Zea Mays
atggtgcacccgcatctgttctgcttgacggaattcgcaagctgcttctctgtgtttttgtcagcttgtggaggtcgcactaccacatgcattgtaattacacctcctgggacctctcctactggaacacgggactctgcaagtgtccgattattctccaatatccttccagcattgataagcttcaagtcattaacagtttttggagttatatccttatcttgcggccaccgagcgaggatgaactccttgagcgaggagaccgtggtggagggatcgtacttggtgggcccgatgtccgtgccgtcgaagagccggaacctgacctcgatcggctccttcccgccggccatatcctccccgccagatcgccggcggcggcccaccacacctccccttcccaagatccaagccccggatcaaaggcccataggagcaaggaagcggccaaaaaaaaggaaatccacagaaacacgcgcaaggtgggaatttgacgacgaattcttgcttccgcgtggggtgaaagcgagggggcggcaactcggtgggggaggagaggaagacgagagccagggaggagagagagagagagacggggtagtgggcttcctcctctcggtgcgtgtattgacggatacgcccaagcacaaatttttaattgtggttttggcatcgagccatggtgttgatggagcgtga

SEQ ID NO: 129125 - DNA, 849 bp, Zea Mays
ctcctcaatcaaatttggaaccagtacagggtctttacaagaaaacgaccgataccgtctccgcctttccttccttttgcgctagcttccacagcatcaccaccgccgccccagctcgcttccctccccgctacacggacacggccgctcagcgctcaccaccgcttccatgctcctcgcctcgtctcccgctcgcgagacgtagctccagatcctctcccccacccacggcagcaccgcattaccctcagatccacccccgcgagcctcatttcagatccacccatgcgcctcccggtccttttcgccctgcagctggtcgccttggcggcggcagcttcggcggccgaggccgcggcgacgttctcctcgaggatggtgcaccgtctgtccgacgaggcccggctggaagcgggcccgcgcatggggttgtggccgcagcgcggaagcgggggctactaccgcgcgctgctgaggagcgatctccagcggcagaagcggcggctcgcgggcaagaaccagctcctctcgctctcaaagggcggcagcaccttctcccccggcaacgacttaggctggttatactacgcttgggtggatgttgggacgcctactacctcctttttggttgcattggatactggaagtgacctgttctgggtaccctgtgactgtattcagtgtgcccctttgtctagctaccgtggaaatctggtatgcatcccctttgtttagtagcttgatgttaatatctgaagatgtcgtgttgtaaaacagctgtcagcttgagttgggacctaagagaatctgtttttttttcaaagatatatgtggcttgttcatgtaaaa

SEQ ID NO: 129126 - DNA, 1914 bp, Zea Mays
gtacagggtctttacaagaaaacgaccgataccgtctccgcctttccttccttttgcgctagcttccacagcatcaccaccgccgccccagctcgcttccctccccgctacacggacacggccgctcagcgctcaccaccgcttccatgctcctcgcctcgtctcccgctcgcgagacgtagctccagatcctctcccccacccacggcagcaccgcattaccctcagatccacccccgcgagcctcatttcagatccacccatgcgcctcccggtccttttcgccctgcagctggtcgccttggcggcggcagcttcggcggccgaggccgcggcgacgttctcctcgaggatggtgcaccgtctgtccgacgaggcccggctggaagcgggcccgcgcatggggttgtggccgcagcgcggaagcgggggctactaccgcgcgctgctgaggagcgatctccagcggcagaagcggcggctcgcgggcaagaaccagctcctctcgctctcaaagggcggcagcaccttctcccccggcaacgacttaggctggttatactacgcttgggtggatgttgggacgcctactacctcctttttggttgcattggatactggaagtgacctgttctgggtaccctgtgactgtattcagtgtgcccctttgtctagctaccgtggaaatctggatagagatcttggaatatacaagcctgccgaatcaacaacaagtcggcatcttccttgcagccacgagctatgtcaaccgggttcaggctgcacaaacccaaagcaaccttgcacatacaatattgactacttttcagaaaatactaccagctctggtttgctaattgaggattccctacacttgaactccagggagggccatgcaccagtaaatgcttcagttattattggctgtggtcgaaagcaaagtggtgactatctggatggcattgcaccggatggactccttggccttggaatggcagacatttcagttcccagtttccttgcaagagctggactagttcggaattccttctcgatgtgcttcaaggaagatagttctgggagaattttctttggagatcaaggagtgtcctctcaacaatccacaccgtttgttcctctgtatggcaaacttcaaacttatgctgttaatgtcgacaaatcttgtattggacataaatgtcttgagggttctagcttccaggctttagtcgatagtggaacatcatttacttctcttcctcctgatgtttacaaggctttcacaacggagtttgacaaacaaattaatgcttcaagggtgccttacgaagacagtacctggaaatattgttacagtgctagtcctcttgagatgcctgatgtgccaaccataatcctggcattcgctgcaaacaagagcttccaggctgttaatcctatcttgccatttaatgacgaacagggagcgcttgccaggttctgcttagctgtactgccatcaacggaacctattggaattattggccagaatttcctggttggataccacgttgtcttcgacagagagagcatgaagttgggctggtaccgctctgaatgtcgcgacgttgacaacagcacgaccgtgccgctgggcccatcgcagcacggcagttcagaggacccgttgccgtcgaacgagcagcagacttccccgcccgtgacgcctgcaacgacaggcacggctcctccctccagtgcaacgacgaaccgacagatgctctttgctagctcttacccgttgctgtttctgacaatgtccactgtgttcttcatctcatgagcaactgataatctgatatgctggtaatcgatagccctctgtatattgtatgtgctttatatgtggtgccttttgctctatttttttttgag

SEQ ID NO: 129127 - DNA, 1028 bp, Zea Mays
agagctggctagctagtaggctcctcccctccccctcacctgttcgtctgttccccattctacaatacagctcgcaagggatcgcgttcacccctcagccaccggctagcagctagaccttcaggaccttgctgcattcccccatgggaggcgccatgaggcagctgctacgctttctgggagcgagcaatggccgccccagggagaagaagacgaagaggacgacgctgcggcggcgcctgctggtgcccacggtggagctcagggtcaggatggactgcgagcgctgcgagcgcgaggtcaagaaagcgctctccggcatcagaggagtggaacatgtggaggtgaacaggccgcagcagaaggtcacggtgactggcgaggtggacccggtggcggtgctgcggagggcccagtccacgtggaagaaggcggagccatggcgggggccggggcacgaccaggacactgccggctactacgcgaccccggcggccgcggccctctacggcgtcgggccggcccagctgcaagcccacgacggcaggtgggccgacccggctgcctactactactgccgctacccgtacccgtacccggccccgggactgagcagcgcggaggcggccgtcgtcgtcggcgccgaacagatcagcagcctgttcagcgacgacaaccccaacgcctgctccgtcatgtgaatgtgacgctgacgcgtcgcccacgtgtgttttcgacacgctgagtccagctctcaggctcggtgggttttagcagacggtaacaggcggcagggagtagccgtagcgtgcgtggctgctactcgtacgtgtggttaaattagtgaagaatgcttaggtcgtcgactactcgactgcactgcgccagcagaacggagagcaaagaagcaaacctctgccactgatagattctgctgatctagtgtgtgcgcttagatccctaaaccgttctttgtgctgcggctgcgaccaggcagtggaacatgagatcagctctgaaggtcaata

SEQ ID NO: 129128 - DNA, 934 bp, Zea Mays
ctccctctctcccagtccccagtccccacccaccaccagtcttcctcgctctccaaatctcgcgacgagaaagcccatctaggaccacaggggcgcgccagccggcaggaacgacgggagaggagggcatggagccggctgagcggatcgagtcggccgggacggcgctggggaagcgtccgaggagcagggtgctgccgcgcacggccagcatggtgacggtgccgtcggcggcgaagcaggggcgccaggagcggggcgccggcgtgccgtcgtcctgctcactgccggctgcctgcgccgggatggtggccgtgccggggggttactactactgtggcacctcgttcgcggcggtggagacggcggccttcctgaaggcgtgcggcctctgcaaacgccacctcgggcccggccacgacaccttcatctacaggggcgaggtggcattctgcagccaggagtgccgggagaagcagatcgagtacgacgacctcgacgagcgcatggagcagacctgctccgtgacctccatgaaggaggccccgtccgtgtccggcgccagcggctccgaccagtccggcagcggcggggagaccgtggccgccgcctaggagccccccgggggagtggcgcaagggggcgggcggggtgtgtgttgttgcgccctggtggagcgggagcagcgacgccggccgatcggtcggcccggcccggtagattccgccatgctatagagcgcctgtgcatacagcttttagctctggagtctggattccggcagtgatgcatgcgtcagtgatttattattatagtttgttgatgcatgtgactctggaaacatagcccctcttgtctgtcgaaacaaacaaacaaagagagagagagagaaaaaaggcaggtacccgggttgcaacaagccaacaacaacaga

SEQ ID NO: 129129 - DNA, 1479 bp, Zea Mays
ctccctctctcccagtccccagtccccacccaccaccagtcttcctcgctctccaaatctcgcgacgagaaagcccatctaggaccacaggggcgcgccagccggcaggaacgacgggagaggagggcatggagccggctgagcggatcgagtcggccgggacggcgctggggaagcgtccgaggagcagggtgctgccgcgcacggccagcatggtgacggtgccgtcggcggcgaagcaggggcgccaggagcggggcgccggcgtgccgtcgtcctgctcactgccggctgcctgcgccgggatggtggccgtgccggggggttactactactgtggcacctcgttcgcggcggtggagacggcggccttcctgaaggcgtgcggcctctgcaaacgccacctcgggcccggccacgacaccttcatctacaggttccagtcggcgtggtttttttttttgtttttttttttttttgcttaggatcgcatcttttcccttcatattcatggcccctattttactttacattatgaggcacataatagtttttttttaatcagctgtcacagtactcgctgagtgtgtgtgaatctaattccctctagtattttttttttggtggaaggaatatttgatgcgaatcttcctttcggtgcctgtatttatttccaattattctattggttcggttcacgagtagtttgatgctgcatcgtgtgcacacacatttttacattatgaggcacataaacatactaggtgaccaatcaaacgagctgtcgcttgattatgatatgtaagcctcgtcacctggaaccgtatactatctcacaagttctttttaatcagctgtcacggtccctcatccacctcttggttgaaagagtttgtttttctctccctgaattcggatgatgtaatgtaacatgacatgacatgatagctggattctgtttgtctgcgccgtgccgtgcaggggcgaggtggcattctgcagccaggagtgccgggagaagcagatcgagtacgacgacctcgacgagcgcatggagcagacctgctccgtgacctccatgaaggaggccccgtccgtgtccggcgccagcggctccgaccagtccggcagcggcggggagaccgtggccgccgcctaggagccccccgggggagtggcgcaagggggcgggcggggtgtgtgttgttgcgccctggtggagcgggagcagcgacgccggccgatcggtcggcccggcccggtagattccgccatgctatagagcgcctgtgcatacagcttttagctctggagtctggattccggcagtgatgcatgcgtcagtgatttattattatagtttgttgatgcatgtgactctggaaacatagcccctcttgtctgtcgaaacaaacaaacaaagagagagagagagaaaaaaggcaggtacccgggttgcaacaagccaacaacaacaga

SEQ ID NO: 129130 - DNA, 791 bp, Zea Mays
agccacagtctggggataataatccacactccacaagcagccatggcgccacccatcacgtccctgtcgtctctgatggcgtccagcccaatcccgacgccgccgccgccgctcccgaagaccagcggcagagcgctctccgtcgcgccctgcggctccgcgtcgtcctcgtcgccgtccacttcctcgactcctcatccggtggcggcgtcggcgtcggcgggcaggagggggctgctggcgctgggcgccgggttcctggcctcggccgcgctgctgtccccggcgggcgacgccggcgccacgcgcatcgagtactacgcgacggtcggggacaagatgtgcgacctgagcctcgtcaagtccggcctcgcgtactgcgacgtcgaggtcggcaccggcgtccagcccccgcgcggcgagctcatcaatgtgcactacaccgcgagatttcccgacggtacgctgttcgacagcagctacaagcgcgggaggccactgacgatgcgcataggcgcaggcaagatcctccgagggcttgaacaggggatcagtggcggcggcggtgtgccgcccatgcttgttggtggaaagcgcaagctgatgatacctgcgtcactggcgtacgggcctgaaccggcaggctgcttctcaggtcgattttcagaactgcgctaaatgacttcgtacaccatagataagcaaactgctctcgctctagaattgtcaaggagactgcttctctagttttttcttttgtttttctttttttgacaggagactgcaacatc

SEQ ID NO: 129131 - DNA, 1535 bp, Zea Mays
agccacagtctggggataataatccacactccacaagcagccatggcgccacccatcacgtccctgtcgtctctgatggcgtccagcccaatcccgacgccgccgccgccgctcccgaagaccagcggcagagcgctctccgtcgcgccctgcggctccgcgtcgtcctcgtcgccgtccacttcctcgactcctcatccggtggcggcgtcggcgtcggcgggcaggagggggctgctggcgctgggcgccgggttcctggcctcggccgcgctgctgtccccggcgggcgacgccggcgccacgcgcatcgagtactacgcgacggtcggggacaagatgtgcgacctgagcctcgtcaagtccggcctcgcgtactgcgacgtcgaggtcggcaccggcgtccagcccccgcgcggcgagctcatcaatgtcagtaccgagaccaccgtctcttctttcctgcatgccttgcgccttcctctgacttaacctactctgtaatagtacagtggtccatttcccttctgcacgagtaactcagcaacatatgccgccatcctgttctgcgttctgtgtgctgcttgcttcggatcctaattatattcgtcctctcgatggtcatcaggtgcactacaccgcgagatttcccgacggtacgctgttcgacagcagctacaagcgcgggaggccactgacgatgcgcataggcgcaggcaaggtgtgcatgtataagcatccattgtcgctcactgaaaacgacgttcagttttcatgccagtaaaaaatgatggtctgtttctttcgcgttctccgcgtgcagatcctccgagggcttgaacaggggatcagtggcggcggcggtgtgccgcccatgcttgttggtacggacaggaacttgagcagtttttagctgtgcattaaatatagaggctttgctaatttggcttgctgttccatgactgatgactccgttgcaaacctgcctcaggtggaaagcgcaagctgatgatacctgcgtcactggcgtacgggcctgaaccggcaggctgcttctcaggtcgattttcagaactgcgctaaatgacttcgtacaccatagataagcaaactgctctcgctctagaattgtcaaggagactgcttctctagttttttcttttgtttttctttttttgacaggagactgcaacatccccggaaactccacacttctatatgaccttttcctcgtcgggatctacaagtgagccctcgatgacagggaatgttcagaacctaagagcagagacaaggtctgtctgatatgtgtgccgtgcacagcgttattctgaactcgcctggttttctgtgactcacgtccttctttccagagtaaccgatcgttttcgtgtgtcacacatggagggtttcaggaggaattcttggcggtgaaagcacctgcagaggcagagccacttgcagaagcttctgtactccagagagctacctggattgaataaaatgatgatatatataaaccatccttgttacgt

SEQ ID NO: 129132 - DNA, 959 bp, Zea Mays
agccacagtctggggataataatccacactccacaagcagccatggcgccacccatcacgtccctgtcgtctctgatggcgtccagcccaatcccgacgccgccgccgccgctcccgaagaccagcggcagagcgctctccgtcgcgccctgcggctccgcgtcgtcctcgtcgccgtccacttcctcgactcctcatccggtggcggcgtcggcgtcggcgggcaggagggggctgctggcgctgggcgccgggttcctggcctcggccgcgctgctgtccccggcgggcgacgccggcgccacgcgcatcgagtactacgcgacggtcggggacaagatgtgcgacctgagcctcgtcaagtccggcctcgcgtactgcgacgtcgaggtcggcaccggcgtccagcccccgcgcggcgagctcatcaatgtgcactacaccgcgagatttcccgacggtacgctgttcgacagcagctacaagcgcgggaggccactgacgatgcgcataggcgcaggcaagatcctccgagggcttgaacaggggatcagtggcggcggcggtgtgccgcccatgcttgttggtggaaagcgcaagctgatgatacctgcgtcactggcgtacgggcctgaaccggcaggctgcttctcaggagactgcaacatccccggaaactccacacttctatatgaccttttcctcgtcgggatctacaagtgagccctcgatgacagggaatgttcagaacctaagagcagagacaaggaggaattcttggcggtgaaagcacctgcagaggcagagccacttgcagaagcttctgtactccagagagctacctggattgaataaaatgatgatatatataaaccatccttgttacgtaataacgccattgtggaactttgtaaagaccaatcatattgttgactatatagcagtttgatacagccaaa

SEQ ID NO: 129133 - DNA, 984 bp, Zea Mays
agccacagtctggggataataatccacactccacaagcagccatggcgccacccatcacgtccctgtcgtctctgatggcgtccagcccaatcccgacgccgccgccgccgctcccgaagaccagcggcagagcgctctccgtcgcgccctgcggctccgcgtcgtcctcgtcgccgtccacttcctcgactcctcatccggtggcggcgtcggcgtcggcgggcaggagggggctgctggcgctgggcgccgggttcctggcctcggccgcgctgctgtccccggcgggcgacgccggcgccacgcgcatcgagtactacgcgacggtcggggacaagatgtgcgacctgagcctcgtcaagtccggcctcgcgtactgcgacgtcgaggtcggcaccggcgtccagcccccgcgcggcgagctcatcaatgtgcactacaccgcgagatttcccgacggtacgctgttcgacagcagctacaagcgcgggaggccactgacgatgcgcataggcgcaggcaagatcctccgagggcttgaacaggggatcagtggcggcggcggtgtgccgcccatgcttgttggtggaaagcgcaagctgatgatacctgcgtcactggcgtacgggcctgaaccggcaggctgcttctcaggagactgcaacatccccggaaactccacacttctatatgaccttttcctcgtcgggatctacaagtgagccctcgatgacagggaatgttcagaacctaagagcagagacaagggtttcaggaggaattcttggcggtgaaagcacctgcagaggcagagccacttgcagaagcttctgtactccagagagctacctggattgaataaaatgatgatatatataaaccatccttgttacgtaataacgccattgtggaactttgtaaagaccaatcatattgttgactatatagcagtttgatacagccaaagcgagcaagttatcgga

SEQ ID NO: 129134 - DNA, 1467 bp, Zea Mays
agccacagtctggggataataatccacactccacaagcagccatggcgccacccatcacgtccctgtcgtctctgatggcgtccagcccaatcccgacgccgccgccgccgctcccgaagaccagcggcagagcgctctccgtcgcgccctgcggctccgcgtcgtcctcgtcgccgtccacttcctcgactcctcatccggtggcggcgtcggcgtcggcgggcaggagggggctgctggcgctgggcgccgggttcctggcctcggccgcgctgctgtccccggcgggcgacgccggcgccacgcgcatcgagtactacgcgacggtcggggacaagatgtgcgacctgagcctcgtcaagtccggcctcgcgtactgcgacgtcgaggtcggcaccggcgtccagcccccgcgcggcgagctcatcaatgtgcactacaccgcgagatttcccgacggtacgctgttcgacagcagctacaagcgcgggaggccactgacgatgcgcataggcgcaggcaaggtgtgcatgtataagcatccattgtcgctcactgaaaacgacgttcagttttcatgccagtaaaaaatgatggtctgtttctttcgcgttctccgcgtgcagatcctccgagggcttgaacaggggatcagtggcggcggcggtgtgccgcccatgcttgttggtacggacaggaacttgagcagtttttagctgtgcattaaatatagaggctttgctaatttggcttgctgttccatgactgatgactccgttgcaaacctgcctcaggtggaaagcgcaagctgatgatacctgcgtcactggcgtacgggcctgaaccggcaggctgcttctcaggtcgattttcagaactgcgctaaatgacttcgtacaccatagataagcaaactgctctcgctctagaattgtcaaggagactgcttctctagttttttcttttgtttttctttttttgacaggagactgcaacatccccggaaactccacacttctatatgaccttttcctcgtcgggatctacaagtgagccctcgatgacagggaatgttcagaacctaagagcagagacaaggtctgtctgatatgtgtgccgtgcacagcgttattctgaactcgcctggttttctgtgactcacgtccttctttccagagtaaccgatcgttttcgtgtgtcacacatggagggtttcaggaggaattcttggcggtgaaagcacctgcagaggcagagccacttgcagaagcttctgtactccagagagctacctggattgaataaaatgatgatatatataaaccatccttgttacgtaataacgccattgtggaactttgtaaagaccaatcatattgttgactatatagcagtttgatacagccaaagcgagcaagttatcggaggtgtatgtcacatgcgccaccagctttgcttgcacagcc

SEQ ID NO: 129135 - DNA, 1086 bp, Zea Mays
agccacagtctggggataataatccacactccacaagcagccatggcgccacccatcacgtccctgtcgtctctgatggcgtccagcccaatcccgacgccgccgccgccgctcccgaagaccagcggcagagcgctctccgtcgcgccctgcggctccgcgtcgtcctcgtcgccgtccacttcctcgactcctcatccggtggcggcgtcggcgtcggcgggcaggagggggctgctggcgctgggcgccgggttcctggcctcggccgcgctgctgtccccggcgggcgacgccggcgccacgcgcatcgagtactacgcgacggtcggggacaagatgtgcgacctgagcctcgtcaagtccggcctcgcgtactgcgacgtcgaggtcggcaccggcgtccagcccccgcgcggcgagctcatcaatgtgcactacaccgcgagatttcccgacggtacgctgttcgacagcagctacaagcgcgggaggccactgacgatgcgcataggcgcaggcaagatcctccgagggcttgaacaggggatcagtggcggcggcggtgtgccgcccatgcttgttggtggaaagcgcaagctgatgatacctgcgtcactggcgtacgggcctgaaccggcaggctgcttctcaggagactgcaacatccccggaaactccacacttctatatgaccttttcctcgtcgggatctacaagtgagccctcgatgacagggaatgttcagaacctaagagcagagacaagagtaaccgatcgttttcgtgtgtcacacatggagggtttcaggaggaattcttggcggtgaaagcacctgcagaggcagagccacttgcagaagcttctgtactccagagagctacctggattgaataaaatgatgatatatataaaccatccttgttacgtaataacgccattgtggaactttgtaaagaccaatcatattgttgactatatagcagtttgatacagccaaagcgagcaagttatcggaggtgtatgtcacatgcgccaccagctttgcttgcacagccgatacggaatcgtgaatttgtttgtgtc

SEQ ID NO: 129136 - DNA, 2051 bp, Zea Mays
aagaaaacaaccgccccgcccccgcccctacgagcacgacggcctccggatgagggtcctgccgcgtcttttaccgtcagctggatgtcaaatcacaacgcgccctgtgacatccccaagccggcctccgtcgacgagttcctcgccaagaatggcaagaagaagaagtccttcatgtcgggcctcttccgcaagaaagggaggggcgcggacaagaagctgctctcgcggcgggacatcgtcttcgatttggaaggcagaagcggcgacaggatggacctcttggagacgtccgccgctgtccgcaagagcttctcagatcggcactgcacgacgcggatcgagaacctgacgctgagctgcctggattctcccaggagacccaatgtcgatacccgggagtaccgggtgtttgtaggcacatggaacgtgggagggaagcctcctgacagcagcgttaacctccaagagtttctgcagatcgaaggcttgcccgatatatatgtcttggggtttcaggagatcgtgcctctgaacgcgggcaacgtgctggtcgtggaggacaacgagccggcgggcaagtggatggacctcatctaccaggccctgaacaggccgccgccccaccaggacggccagtcctccggcgacgagctctcgccgccgccgtccacctcctcctcccactaccggagccggccgcaaggtgccgcccgcgaccccagcaacgccgccgccatccccaagacctccagcggcggcatgctctgcgcgcagaagccgccgccgccgctcaagatggtcagcaagtgctaccgcgtcgacaacgcgctggtgaagacgtgcacctgcatgtccgacccgtccaccatgcagctccgggcacgtgagatgcgcgagttcctctgccgcgtcgaggccgccgccgcctcgccgggccgcggcgccggcgccgacgacgacgcgctggcctccatcgaaggcggcgaccagaggggcggcggcggcatgaactactgcctcgtcgcgaggaagcagatggtcgggatcttcctgtcggtgtgggtgcgccgggagctggtgcagtacgtcggccacctccgggtcgactgcgtcggccggggcatcatgggccgcctcgggaacaagggatgcatcgccatgagcatgacgctgcaccacacgagcatctgcttcgtgtgctgccacctggcgtccggcgagaaggaaggcgacgaggtgcggaggaactccgacgtcgccgagatcctcaagaacgcgcagttcccgcgcatctgcaaggtgcccggccagcgcgtccccgagaagatcattgaccacgaccggatcatctggcttggggatttgaattaccgagtctcgttgagctacgaggaaactaagacgctcctggaggataatgagtgggacatcttattggagaaagatcagctcgcgatggagagacaagccgggagagtgttcaaagggtggaaggagggcaagatctacttcgcccctacatacaagtacaagcagaactccgactcgtatctatgggagaccgccaaatcgaagaagaaacgacgaacgcccgcatggtgtgaccggatactgtggcacggccaaggcatcgagcagctgcagtacatcaggggcgagttcaggctctccgaccacaggccggtctgcagcgtgttcgtgatcgaagccgatgtagatagcgggagcaagatcaggaagggctactcaacgctggacgctaggatccactgcgagtcccccgagatacccaagagacacagcttctatgatgacttctgaaattttggcccgtgatgctagttttgtctataacatagcagcttacaaagatcagacacgtttgtagcgaaaaggctcaggtttctcaagcctaacacctgtcttaatttgtaccaagcggtatactaactgaaagtcaatggtggttactgcacagaacacaagtgaacaatggtattatttagggcacccctacagtaatttcatgtcaaaaaacaatggtacta

SEQ ID NO: 129137 - DNA, 114 bp, Zea Mays
gaaacttaggagctcctccccttctcgcccgcatgtaaacccctatgtaatactccaaaattgtatacaaggaatatatagtgattttcttattctatgtgccttatttgcgtc

SEQ ID NO: 129138 - DNA, 2658 bp, Zea Mays
cacaacataatacagtggtcatgtataaaacatgtgtcttacgatattcattgtaccaatcagagcattcaataaattaaagtgaccaatcagctagtctcctgtctcgaacatacagctaagacactgtgtcttcgtcaagatacgtgtcttgagtttttttacattcaccccctagacacgctgtaagacacaacttaaaacaccctctgtacatgcccatgcaatgaaaaggcaaattactcacaagaagggctccagcgttggcgagtcaatccagcccagcacgcgagaccaggcgcacacgtggcagaccagaactggctgcgacttggcattccccgcgtgctacctcgcgtgggatgacgccatggacgagagcaacaggcctccttccttccaaactgcatttggtaattttcattcacgggaatattgctcagttgattaatcgaatcattttgtgctaatcccccacggagaagaaatcgcaaacagcggcgagcaagagatgcccgcttggcttcgcgtgcacggccccggtgccaagcctggcactatataaaggcctggccgagagacctttcttccccagagagacagacacgcctcacccccaccacaagaacaccaaagccacatcccatccatctccacggtgaggcttgagcgatccgagcaaaaaaaatcatccgcgacgcagcgacgcaggtttgttctctgatctctctggttcttcttttagcagcagggacgcacaacacaagaaaaggtccggttcaagaggctcttctgttgggtttttttagaatcctcaagagaagcgtgttcttgggttaggatttttttctcacctcataacacctctcctaggaggaacagagatccagagaaccttttttctcttctggatccttgccgccttttggcgttcgaaagggggttgttttgcaataccctctctctgttttttttttctttcttggcacaaacccacctcgtttctctacttttattgaggaacagagctggttttccaaaaaaaaaaattctgctttgattttccataaagaaaacctctcagcctctttcttctagctccatccaagctgtagtcctaatggccgcagccatcgacatgtacaagtactacaataccagcgcacaccagatcccctcctcatccccctcggatcaggagctcgcgaaagcactcgagccttttataacgagtgcttcctcctcttcatcctcctccccctaccatggctactcgtcctctccatccatgtcccaagattcttacatgcctacaccctcttacaccagctacgccacctcgcctcttcccactcccgccgccgcctcctcctcgcagcttccgccgctctactcgtcgccttatgcggcgccgtgcatggccggccagatgggcctgaaccagctcggcccggcccagatccagcagatccaggcccagttcatgttccagcagcagcagcagcagcagaggggcctgcacgcggcgttcctgggcccgcgggcgcagccgatgaagcagtcagggtcgccgtcgccgccgccgccgctggcgccggcgcagtcgaagctgtaccgcggcgtgcggcagcgccactggggcaagtgggtggcggagatccggctcccgaagaaccgcacgcggctgtggctcggcaccttcgacaccgcggaggacgcggcgctcgcctacgacaaggcggccttccgcctccgcggcgacacggcgcgcctcaacttcccggccctccggcgcggcggcgcgcacctcgccggcccgctgcacgcctccgtggacgccaagctgaccgccatctgccagtccctgtcggagtccaagtccaagagcggctcgtccggcgacgagtcggccgcgtccccgccggactcccccaagtgctcggcgtcgacgacggagggagagggggaggaggagtcgggctccgccggctcccctcctcctcctcctcctcccccgacgctggcgccgcccgtgccggagatggcgaagctggacttcacggaggcgccgtgggacgagacggaggccttccacctgcgcaagtacccgtcctgggagatcgactgggattccatcctgtcatgagcaataacagctccgtgtaattttctactgtttggtttttgcggctgcgttggcccgatggcattttagacgtcggccatggcggctgcaagtagcaagtgagtaactagctagctagtacatcgtcgtcgtccagtgttgtgaagcagagttaagtacatgcgtgctaatctcctggttgagctgccggttgttttttctcacggcacggccagtcgagaagagtcagtagtgtaatctcgtggttttatgatcatctgttgcagcttatgtatggaactttgtctatctagtactatttattggtcttgaacgtgtcgtgatgatgatctgcgtctttgttgttctcacgtcgcatgtatgtatggtgtgcgcacttgtgacttgtcatctaagctgttgagctgtggcttttggctcctggttttgttttgtactgtagctgcaaagcagagatgatgcggctggcagccgcctggtgaaactaagccaaagaatttgatgttgcctgc

SEQ ID NO: 129139 - DNA, 1225 bp, Zea Mays
gaagcgaagcacatgacgaaccagcaggacgtggtcgtgtccgagatgggcattgcggccggagccgcgctgccgggccccagcccggccctccttgcctgccggggcgcggccgccggcgcaatgtccctgcggtacctcgacctggcagcggcggccgcgcgctcggccagcggcacctgggccgacgccatgcgcgcctcctcgcccacccgctcccgcgccgccgacgagttcacggcctgggtgaggaagcacccgtcggcgctggggaagttcgagcagatcgccagcgcgtccaaggggaagaaggtcgtcatgttcctagactacgacggcacgctctcccccatcgtcgccgaccccgacgccgcctacatgagcgacgcgatgagagcggcggtgcgcgacgtagcgaagcacttcccgacgtcgatcgtgagcgggcgctgccgcgacaaggtgcgcaacttcgtcgccctctcggagctctactacgccggcagccatggcatggacatcaagggaccaagctccaatcccgagtcagttctgtgccaaccagcaagcgagttcctcccggtgatggacgaggtgtacaaggcgctggtggaaaagaccaagtccacacctggcgccaaggtggagcacaacaagttctgcctgtccgtgcacttcagatgtgtagatgaaaagagatggaatggtctggcggagcaggtgaaggcggtgaccaaggactatcccaagctgaagctcactcatgggaggaaggttctggagatccgcccgagcatcatgtgggacaagggcaaggcgttggagttcctgctcgaatcgctcggattcgccaaccgcagcgacgtcctcccggtgtacatcggcgacgaccgcaccgacgaggatgctttcaaggtgctgaggaagaggggccaaggcatcgggatcctcgtgtccaagtgccccaaggagacgaacgcctcctactccctgcaggaccccggcgaggtcatggacttcctgctccgtctcgtggattggaagcggaaatcatcggcggccccgatggttcggccgcgggtgtagctcggcagcccggaggtcgactactcgatcgatggaatcggtgtccaatcatgcgaacatacccgaccacgaccatttttcctctctctctctctctctctctagcttgtgtggtggcctcggaaaccgacctgtggtg

SEQ ID NO: 129140 - DNA, 1340 bp, Zea Mays
ccactccaatcggcgaggcgaggcattctccgcaaacccctccacaccccacgcactcacggtcacgcagaagccagaacccctcgtctcccggcgcctgttccccgcgcgcaccgcggctacacataccctctccccatcccatttcccagatcccaccaacgcagcgcagggatcgagtagcccaccacccccaccccgcgacgctaaccgacgcaatggcgacgctcaccgttccttcctccgtcccggccgtcgccgaggactgcgagcagctccacaaggctttcgaaggttggggcaccaacgagaagctgatcatctccatcctggcccaccgcaacgccgcgcagcgccgcgcgatccgccgcggctacgccgaggcgtacgggaaggagctgctccgcgctctcggcgacgagatccacggcaagttcgagagggcggtgatcctgtggacgctggaccccgcggagagggacgcggtgctggcgaacgaggaggcgaagaagagccaccccggcggccgcgcgctggtggagatcgcgtgcgcgcgcacgcccgcgcagctctttgcggtcaagcaggcgtaccatgaccggtttaagcgatcgctcgaggaggacgttgccgcgcatgtcaccggcgacttccgaaaggtgaaggcctcggatcttatgacgatctgacgtttgcttgcatatatcgataggtcgcaattcgcatatgctcttgtcgataggtgagcttgatctgttcttttccgacctgtaggccaatcaattcgttgcttattatgtcttgtcagttatcacctaacttactcttcgtgctcttgtgtctagcattactctgcattatgattctgaagtgggaagccatttctcacactgagaagtcaacggatctgatagacctgctgttcaccgtgtgtgtcggctgacagccccattaattaactagccacacggttcatttttcggtatcaaggggcaaggttctgttatgtgcgagatctgaatcagctactgatttcctccactgcgcgaattaacttttactgatacatcattgtgaatttagttaggttgaatggactagccaatgattggcaacaacaacatattaatcttgaactacgctggatgtactttttattgcatttgaacatatctactgatgcagaacctagattttgttactgcatcatgattgtagatattctacagtaataccttatctctttttgttttgaaactctccgtgcttttggtttcattcgctagtcttgtgcttactgtgtatcataaggaaaaatgttaccggtctggtagtactga

SEQ ID NO: 129141 - DNA, 1379 bp, Zea Mays
ccactccaatcggcgaggcgaggcattctccgcaaacccctccacaccccacgcactcacggtcacgcagaagccagaacccctcgtctcccggcgcctgttccccgcgcgcaccgcggctacacataccctctccccatcccatttcccagatcccaccaacgcagcgcagggatcgagtagcccaccacccccaccccgcgacgctaaccgacgcaatggcgacgctcaccgttccttcctccgtcccggccgtcgccgaggactgcgagcagctccacaaggctttcgaaggttggggcaccaacgagaagctgatcatctccatcctggcccaccgcaacgccgcgcagcgccgcgcgatccgccgcggctacgccgaggcgtacgggaaggagctgctccgcgctctcggcgacgagatccacggcaagttcgagagggcggtgatcctgtggacgctggaccccgcggagagggacgcggtgctggcgaacgaggaggcgaagaagagccaccccggcggccgcgcgctggtggagatcgcgtgcgcgcgcacgcccgcgcagctctttgcggtcaagcaggcgtaccatgaccggtttaagcgatcgctcgaggaggacgttgccgcgcatgtcaccggcgacttccgaaagcttttagtgcctcttgttagtgcgtaccgctatgatggcccagaggtgaacacatctttggctcattctgaagccaaaatacttcatgagaagatccataagaaggcttacagtgatgaggagatcattagaattctcaccacacggagcaaagctcagctacttgcaacattcaatagctacaaggatcagttcactcatgcaatcaacaaggatctgaaagctgaccccaaggatgagtttctttcaacactgcgggcgatcatccggtgcttcacctgccctgacagatacttcgagaaagtcattcgactggctcttggaggcatgggcactgatgaggatgacctcaccagggtcgtaactactcgcgccgaggtcgacctgaagctgataaaggaggcttatcagaagagaaacagtgtgccgctggagcgtgctgtggccaaagatacaactagagattatgaggatattatgcttgccctccttggggcggagtgaggaggcgtgcctcaactcgatctcatctgctcctacttgtttgatggggccaaaaaactgcatcgacgtggtatccacatggccgtggttttgaataataataaatttgtaacacgtagcctgcattagcagcgcgttttaaataaaggaacttcctgatatacttgttatcgtttgactgcgttttcacagaagctgttttgttcgttatggtta

SEQ ID NO: 129142 - DNA, 1773 bp, Zea Mays
atgacggagccgcgcgacccgccgaccggctgcgccctgttcggcatctacaacggcatgttccgccgccgccgctccgcgtccatgacctccctccacaggatcaacggggccgaggccgaggccgaggccgcggcgccgccgaaccagaagcccgccgcgcaccgcgactcctccctcgcgcgccgccccagcgccatgcccgtgccggcggcggcgcagaacggcaggagcaggccggccgccaaggcagcgcccgccgcggagccggcggcggagtacagcggcatggccgcggagctggacaggatgatcctcgaccaccagagggtcaagggcaccgcgcagctggtgcgcgccacctcgggcaacatgatgctgcaccgcaacctcggcaacctgaacgcgggcggcagggcggcgaacgagcggaaggcgccccacgggtacgcgtcctccggcatggggaacatcgtcagggagccccggccggcacctgcagcggggggccagctgtgccgggcgctgtcgcaccgcacggaccccgagaagctcaaggagatgggcaacgaggagtaccgccaggggcactacgcggaggcggtggcgctctacgaccaggccatcatcatggacgccagccgcccggcgtactggagcaacaaggcggccgcgctcgccgcgctcggacgcctcatcgaggccgtcgccgactgcaaggaggccgtccggatcgatccttcgtacgatcgcgcgcaccaccggcttgccggcttgtacctcaggtaccgcgtacatctcgccgattttcagatcagagagaggcacagtctacagatttctgccatccattgccttgcccctccgtcgtgtcactgctcgtccaattctgcttcaactcttcgtcaccagttgtgcggagaacctgacaaagccatctaccacatgaagcaatcctccaacgaatccgcgggcgcagacgtttcccgtgcgcaatcggtgaagagccgcatcgccaggagcaacgacgcgcgcaggctcaagaactggatcacggtgctccaggaagcgcaggccgccgtggccgacggcgccgactgtgctccgcaggtgatggcgttgcaagccgaggcgttgctgaggctgcaacggcacgacgaagccgactcgcttctcagcggcgccggcgcgccaaggttcggggtcgacgagtcgaccaagttcttcggcaccttcggccacgcctacttcctcatcgtgcgagctcaggtcgacatggctgctggaaggttcgaggacgcggtggcgacggcgcagacggcgtttcagctggacccaagcaaccgggaggtctcggtcgttcagaggagggccaaggcggcggccgcggcgcggctgcgtggcaacgacctcttcaaggccgccaagttcgcggaggcgtgcgccgcgtacggcgagggcctcgacagggagcccggcaacgccgtgctgctctgcaaccgcgcggcgtgccacgccaagctcgggcggcacgagaaggccgtcgaggactgcagcgccgcgctcgacgtgcgcccctcgtacagcaaggcgcggctcaggagggcggactgcaacgtcaagctggagaggtgggaagcgtccttgagagattaccaggtgctggtccaagaactgccggagaatgaggacgtgaagaaggctctctctgaggtcgaagccaagctcaagggccaaaggcatggggccgcagcagccagatctcagcactga

SEQ ID NO: 129143 - DNA, 1643 bp, Zea Mays
ccgaatgaatggcccccgggcgatcggcgttcggcgcccaagctgttcctatttatgcttcgctgtgccgtcgggctcgcaagcattctctttcaggttccaggctctgggtcgccggttgtgccgactccgcccccgcgactgctgcgagcatcgcgagttcgagacgagtttccttcaagcatagagatcagcgcgatggatgacttctctatgatcagtgaccacagcatgctactccaaggccacggcatgctcggtgccgaaggatgccttggtacccgaggttcttcaggcgttcttccgactggaggccgcaggaccgtcccagtcccagcgctccaactccaagatgaccgcaacaacaagggggaagacatgttcttctccgactggcctgagctggccagcttcgacgatctcgaggctagcctgagaaatttcgatcctacgtttgagattgggagcagttattttgatgacatgctatggccctcaaattgctcaccgggagctcagctagcacggaacggctactctgacgatattgatttctcaatcgatcaaaaagacagcaacagcactccgaaggtaaatacgacaaaaaccaagcaacagtccaggagaaacggagctagtggtggtagcagtggtacagcctcgaaccacgaagcacatgccagctcctcttccggtctttcggacgccgaactcttcctccacccgttcgatgatactacagcactagcgagccaaacgtgggaggaggacctacaggccattctttgttcgattccggaaacgcgagcagtcgtcccagcggcgtcaaccgccatgtgcgccgatggctcgtccacctgttgctcggggccagacatcgttgccgctcaccacgttcctcgctcggcgacggcgacgactaaagacgccgcctttagtgggtctccggacacgatcctggaggagatggctgagaacccgctggacatgtacttccctccactgccaacaacatccggacagtccggaacgatgatgatgagcgacaccacttgggcgccggaacatcggttccgagaagagttcgcgggcagctgcgctctggggtgcgcggagctacggttctgctcggaggacgtggcctccgcaggagtatttcataagcagcctggctcggcgacggcggtcgtcctggatgccgtgccagtgaaggatctttcgtttcagaagcttcagcatggcatgaaccagcttgatctggccaccagaggacgcatacgggattccctgtaccggttggccaacaggcttgaacaaacgcattgcgttgccagaacaagcggaagaatgggttcaaataggttcgaatcggacgggtggggcgaaacgcagacgacgagccccatggatcggttagtcgcgcagctccttctgcagaaaccctctcgccggaagactaccccgccgcaccgcgtgacgtagttttcctccaccggaggcggagaccctagtcgccgcttgcatcaatgcaaggactatacctcgttcctgaattctgtcctgcttctgctctgaaagcctgtaatacaagaaaaagaatcatatttagcatcggaatataacatggccacttatttagcacc

SEQ ID NO: 129144 - DNA, 1764 bp, Zea Mays
ccgaatgaatggcccccgggcgatcggcgttcggcgcccaagctgttcctatttatgcttcgctgtgccgtcgggctcgcaagcattctctttcaggttccaggctctgggtcgccggttgtgccgactccgcccccgcgactgctgcgagcatcgcgagttcgagacgagtttccttcaagcatagagatcagcgcgatggatgacttctctatgatcagtgaccacagcatgctactccaaggccacggcatgctcggtgccgaaggatgccttggtacccgaggttcttcaggcgttcttccgactggaggccgcaggaccgtcccagtcccagcgctccaactccaagatgaccgcaacaacaagggggaagacatgttcttctccgactggcctgagctggccagcttcgacgatctcgaggctagcctgaggtgatccacttggcacatgtgcggccctttaccatcagcaacgccaccggccgctttgtgaattgtgatgcctgaccaagtttttcttttttctctttccatttcatgaagaaatttcgatcctacgtttgagattgggagcagttattttgatgacatgctatggccctcaaattgctcaccgggagctcagctagcacggaacggctactctgacgatattgatttctcaatcgatcaaaaagacagcaacagcactccgaaggtaaatacgacaaaaaccaagcaacagtccaggagaaacggagctagtggtggtagcagtggtacagcctcgaaccacgaagcacatgccagctcctcttccggtctttcggacgccgaactcttcctccacccgttcgatgatactacagcactagcgagccaaacgtgggaggaggacctacaggccattctttgttcgattccggaaacgcgagcagtcgtcccagcggcgtcaaccgccatgtgcgccgatggctcgtccacctgttgctcggggccagacatcgttgccgctcaccacgttcctcgctcggcgacggcgacgactaaagacgccgcctttagtgggtctccggacacgatcctggaggagatggctgagaacccgctggacatgtacttccctccactgccaacaacatccggacagtccggaacgatgatgatgagcgacaccacttgggcgccggaacatcggttccgagaagagttcgcgggcagctgcgctctggggtgcgcggagctacggttctgctcggaggacgtggcctccgcaggagtatttcataagcagcctggctcggcgacggcggtcgtcctggatgccgtgccagtgaaggatctttcgtttcagaagcttcagcatggcatgaaccagcttgatctggccaccagaggacgcatacgggattccctgtaccggttggccaacaggcttgaacaaacgcattgcgttgccagaacaagcggaagaatgggttcaaataggttcgaatcggacgggtggggcgaaacgcagacgacgagccccatggatcggttagtcgcgcagctccttctgcagaaaccctctcgccggaagactaccccgccgcaccgcgtgacgtagttttcctccaccggaggcggagaccctagtcgccgcttgcatcaatgcaaggactatacctcgttcctgaattctgtcctgcttctgctctgaaagcctgtaatacaagaaaaagaatcatatttagcatcggaatataacatggccacttatttagcaccggaaaagcaa

SEQ ID NO: 129145 - DNA, 302 bp, Zea Mays
ttttatttttataatttctggtgaactttgaatggtggttcgtccagtttttccctcttttaatgtagatcctaatcttttgtagccatgatggtttattttttctagggtatgttttgttatagggtactaggtcaccagatgttgcaacttgcaactgataattgtattcttaaatgtcatccctttctgcccattgattatgtcttattgttttcattcaaagagagctgcaagtatcttaatcgatatgttgttctctcctccatgtgttcagttttgaatatggacgacaccaattc

SEQ ID NO: 129146 - DNA, 907 bp, Zea Mays
tgcagagaaaagttgaaaggatgaagttagaggatctcgttccactgagctagcgagacggcagcgctgcggaacaacaatggcgatgatgcctcctgcagcggcgtcatccctcgcctccactccccgcggcatcgccgctccgcctactcgcacggcatccctgtgcatccgcttaggtgtcgtgacggcgacgctgttcgctggactggcggcggcgtcgcagccagtggagcgtcacgccgcggtggtggtcgcgatggcgaagagggagcaggagctggaggggatccgggccatgacgacggaacagctggaggaggaggtggtagacctcaagggggagcttttcctgctccgccttaagcgctcggcgcgccaggagttcaagaacagcgagttcggccgcatgcgcaagaggattgctcgtatattgactgtgaaaagagagcgggaaactgaacaaggaataaacaagagattgtccagggagcttgataggaaatggaagcagggcattgtggtcagaccaccaccatctctaagggagaacaaagaggagtagagagctgcaaaagaagcaatctgcaaaagtcgtttcatgcaagagtgttgcaagaaggttcctttgtgattccaaactttatttcattgttacgtattccatgtttacattttactaagcattgctatccgaatctgaatttcagtcgttagtctcttctgtaaattttgatttatttaaatttacgcctctatctgtgttttcggtgcatttttcttagctgcttcacatattaaactgcactttagacgtgcatgctatccagtaattgagaatggacagtcatttgcacctaaaagtatatgttttcttgccatgctgaatcaaatcaaattgatgtcc

SEQ ID NO: 129147 - DNA, 611 bp, Zea Mays
cattgtctgctgacttggcccaaagtcactagacctaaggacctgggggtcttggcgtaagtgaccttcggatcatgagttgggcgctgcgggctaggtggccttggctgcaaaaatctgatcgaactaagccatggttggattttcagattcaaacttgtgacattgtgcaaagcttggtggctgcggctgttatcactcacttgggagatgggtctgatactctcttttggaaggatcgttggttaaatggcaaatgtattaagtatgtggcacctgctgtcttggatatggtgcccaagtgcattgtttctaggcgcctggtcaaagacgccttgcctgatctcaattggttggctgacctgaggggggctatttctgttacagcccttgctaatctcatggacctttgtgacttgctagaggggatggttctccagccggatgttcccgatgtgcatgcctggaggttcagtgaatcgggtgaatactcggctagctcaacttacatgactttgcttcttggctctgttaactttgagcctgctggacgcatttggaaatcctgggctccaggaaagtgtaagttctttctttggcttgtggagcac

SEQ ID NO: 129148 - DNA, 2386 bp, Zea Mays
cagttctgtctgagtcctgatcctgactcccgaggctctcctccaaaaccccctccttaaaccctagcttccgtacgcctccgcgctcccccatggcctcctcgtcgcaatcgggcggcgccggaggcggcgggacggttgcttccaatccccgcgtctggattgtcgcgagcatcgccgtcgcgggcgtcctcgtcctcgcggaggtcgcgcgccgccgccgccggtggctgcggggcatgtccggcacggcacccgacgctggatccttctgcgaccgctttgagcttcaccctccggcgcagccgcctcctcccgcggctcgccacattctctcgggtctgaccttcgccgctagtgacaacttcgagatcgagggctacgtagccgggtttgggaacccagactggaagaaaactcatgagacggcgaggcacactgctgtggctgtcacaatgctgcggaaacagggggccacctgcgttggaaggacaatcatggatgaactaggctttggtgtcactggagaaaatttgcaccatggaacaccagccaaccctgtttcttcttcactcgtccctggtggatcatgcagtggctctgctgtggcagttgctgcacaacttattgactttgcaattggcactgatacaattggtgatgtaagaatcccagcttctttctgtggtttactttgttttaggccttcctatggtgttatatctactcttgggaccatagcaaattcacaaagtctcgacacaatcggatggtttgcacgagatccatgtattcttcatcgtgttggtgaagttcttttaccagccgctgtaggtggacttaagcaaacaaggcaatttgtttttgccgatgactgctttcagctgctaaaggtctctaatcagaaaactgtgcatgccataaaaaatgctgtccaggcattacgtggatatcagccacctaaacacatcaatattggccaatatatttattccaatgtacctagcctgaaggagttttgcgaaccagctacaaagttagaagaaggaacatcagccctgaaagcaatctccacagtgatgttgttattacagagatatgagtttaaagcaaaccacgaggagtgggttaacactgttaaacctaagcttggccttgatatctctactcgtgtgctacaagccgtgaattttgcacgggaaaacatcaaatctttgtacgcaataagaaatgaattgcgggttgcactcaagaatcttctaaaggatactggaattttagttctaccaaccacagctggatatcctctgaagagaaactctaaagaaagactatcatctggatttgaggatagaatgtacaaatttgtaggcgttgctgcactttctggatgttgtgaggtcactattcccatggaaaatctggatcatcatgtatctctttcatttgtagcagcacatggatcagacaagtttctactccgtaatatcttggatacatattctctcatccaggaccaagtagttttggcatccaagttggaaactgcaccagtaaccaatgttgatgttgatgtcaatgcatcagagcttctaaaagaaaagggaaatagcgctttcaaaagaagacagtggatcaaggcaattgagttttactcagaggccatcagtttgagtgacacaaatgcaacatattactgcaacagagcagcagcttatctggaactgggccgttttaagcaggccgaagcagattgtgaccgggccttactgttggatagaaaggtaatagatttttgtagatgcaatattcctgtgctgctacgggtgacatgtctgaagcattgtctaccctaagagaggagttccaaaggtttattggatagtcctggatggttctgacatcattaccatcttgtgctgttatggcaacatcaaatccttactgtgaataccgtttgttgcttcagaatgttaaagcatatctacggcgtggttttgcaagggaagtaactttgaattacaaagaagcacttcaagatttcaggcatgctttggcattggagccacagaataaaacagctcttgcagcggaaaggaggctgcagaaactcctgaagtgatgtggggagcagcagcacatccgacttgtaaattattttgaagacttgcctggttgaaggcaattttgatcggcagcatgtgaaaggaagatgcgatctgctggataagagtcattaaactattttttgtttgccatcattcgaaaatttgtatctcacgacgattgtcagcaagttttgatatagcttcttgctatgaccgtctattaagggaaaatcttgtatatgcattgtatactacttcgatctgaaggccgagaacgc

SEQ ID NO: 129149 - DNA, 2295 bp, Zea Mays
cagttctgtctgagtcctgatcctgactcccgaggctctcctccaaaaccccctccttaaaccctagcttccgtacgcctccgcgctcccccatggcctcctcgtcgcaatcgggcggcgccggaggcggcgggacggttgcttccaatccccgcgtctggattgtcgcgagcatcgccgtcgcgggcgtcctcgtcctcgcggaggtcgcgcgccgccgccgccggtggctgcggggcatgtccggcacggcacccgacgctggatccttctgcgaccgctttgagcttcaccctccggcgcagccgcctcctcccgcggctcgccacattctctcgggtctgaccttcgccgctagtgacaacttcgagatcgagggctacgtagccgggtttgggaacccagactggaagaaaactcatgagacggcgaggcacactgctgtggctgtcacaatgctgcggaaacagggggccacctgcgttggaaggacaatcatggatgaactaggctttggtgtcactggagaaaatttgcaccatggaacaccagccaaccctgtttcttcttcactcgtccctggtggatcatgcagtggctctgctgtggcagttgctgcacaacttattgactttgcaattggcactgatacaattggtgatgtaagaatcccagcttctttctgtggtttactttgttttaggccttcctatggtgttatatctactcttgggaccatagcaaattcacaaagtctcgacacaatcggatggtttgcacgagatccatgtattcttcatcgtgttggtgaagttcttttaccagccgctgtaggtggacttaagcaaacaaggcaatttgtttttgccgatgactgctttcagctgctaaaggtctctaatcagaaaactgtgcatgccataaaaaatgctgtccaggcattacgtggatatcagccacctaaacacatcaatattggccaatatatttattccaatgtacctagcctgaaggagttttgcgaaccagctacaaagttagaagaaggaacatcagccctgaaagcaatctccacagtgatgttgttattacagagatatgagtttaaagcaaaccacgaggagtgggttaacactgttaaacctaagcttggccttgatatctctactcgtgtgctacaagccgtgaattttgcacgggaaaacatcaaatctttgtacgcaataagaaatgaattgcgggttgcactcaagaatcttctaaaggatactggaattttagttctaccaaccacagctggatatcctctgaagagaaactctaaagaaagactatcatctggatttgaggatagaatgtacaaatttgtaggcgttgctgcactttctggatgttgtgaggtcactattcccatggaaaatctggatcatcatgtatctctttcatttgtagcagcacatggatcagacaagtttctactccgtaatatcttggatacatattctctcatccaggaccaagtagttttggcatccaagttggaaactgcaccagtaaccaatgttgatgttgatgtcaatgcatcagagcttctaaaagaaaagggaaatagcgctttcaaaagaagacagtggatcaaggcaattgagttttactcagaggccatcagtttgagtgacacaaatgcaacatattactgcaacagagcagcagcttatctggaactgggccgttttaagcaggccgaagcagattgtgaccgggccttactgttggatagaaagaatgttaaagcatatctacggcgtggttttgcaagggaagtaactttgaattacaaagaagcacttcaagatttcaggcatgctttggcattggagccacagaataaaacagctcttgcagcggaaaggaggctgcagaaactcctgaagtgatgtggggagcagcagcacatccgacttgtaaattattttgaagacttgcctggttgaaggcaattttgatcggcagcatgtgaaaggaagatgcgatctgctggataagagtcattaaactattttttgtttgccatcattcgaaaatttgtatctcacgacgattgtcagcaagttttgatatagcttcttgctatgaccgtctattaagggaaaatcttgtatatgcattgtatactacttcgatctgaaggccgagaacgcgagaacccatgcgagcgcttggctctgctggagtgtatgattgtgtagtgcaggatctaatttgggaggcgttgagacgccccttattctccta

SEQ ID NO: 129150 - DNA, 2869 bp, Zea Mays
cccgtctcccgtccgcatagtgccggccctaggctacccttgaactccacccaattcgccgctccctctcgccgaactcgacgtaaccccaatggaggagggcagcaaggcgcaactgccgcccccacttcacactgaagccatggaccagctgcccccagtcctaatggaccaagacgagggtcgggaagctgcggaaaccatggaggaggaagaagccgccgccgcagacatctccgacgccgcggatcccatggacgatggggaggcggcaggagattccgcggcagccgcggaacccatggaggacgacgcgcccacgtcctccccgactccctccgcgccgtcggccaccgcggccgttgacgactccaccatcgctcggaagcgccgccgccgtaagaagcagttcccgggtatgatccccacggccggcgtccgcgtcctgcgcggctcctcctcctcatcctcccacaccgcggctcatctgtccggcgtcccccgccgccgggggcggccccccacctcctcctccctccgcctcgcccgggagctggattctgaggccctcatcgctctcgctgcggggttccccgcggactccctctccgaggatgagatcgtggccgccgtgctcccacgcattggcggcgccgagcagtctaactaccttgtcgttcgcaatcacattgtagcgctctggcgttccaatcccctctcccccgttgccgctaacgccgcgctcgcatctattcgcgccgagcacgctccccttgttgccgcggcgcattccttcttgtctgagcacgcatacattaatttcggtcttgcccccgccgtcctctcgcttcccccacagcctcctccctcttctcctcccccatccgtccttattgttggcgctggccttgccggtctagctgctgcacggcacctgattgcgcttggattcaaggtggccgtcattgaaggccggctccgccccgggggccgtgtgtttaccaagacaatgcgttcttctgctgtagagtatcccgacactgttgctgctgctgaccttggaggcagcgttctcaccggtatcaatggtaatccccttggtgtcattgctcggcagcttggattcccactccacaaggtgcgggataaatgcccactgtatcttccagatggccgcccagttgaccctgacatggatgctcgtgttgaggctgcctttaaccagcttctggacaaggtttgccagttgagacaggtgattgcagatggtgtaccacatggtgttgatttgtcattgggcatggcacttgaagcattccgggcagcgcatggtgttgcagctgagcatgaagaaaggatgcttctggactggcatttggcaaacctggagtatgctaatgctgccccacttgctgatctctccatggccttctgggaccaggatgatccatatgaaatgggcggagaccactgctttattcctggtggaaattctcagtttgtccgtgcatttagtgatggaatcccggtattttacgggcagaatgtgaaaaggatacgatatgggcgtgatggtgtgatggtgcacactgataaacaggcattttgtggtgatatggtcctgtgtacggttcctcttggggtgctaaagaagggtgacataaagtttgtgcctgagctgccagctcagaaaaaagaggccatccagagattgggttttggtctgcttaacaaggttgtgatgttgttcccttatgatttctgggatggcaggattgatacatttggtcacttgacagaagattctaggcagcgtggtgagttcttcctgttctacagttattcttctgtctcaggagggccattgctcattgctcttgttgcgggggaatctgcagtcaagtttgagcaggcttcacctatggaaaatgttgagaaggtactggaaacacttaggaaaatcttttcacccaagggtattgaagttccaaatccgttgcaagcaatatgtactcgatggggcacagacaggtttacttatggatcatactcatatgtggctattggggcttctggtgatgactacgacattttggccgaaagtgtgcatgatagagttttctttgctggagaggcaacaaataggcggtacccagctacaatgcatggagccctgcttagtgggtatagggaggctgctaacatcttaagggcagctagaaggagagcaaaaaatgtgtactcacctgagaaaatggatattaatgttgatgtaaaagtgggtgttaatggtgaactaaaagacactgttagagatagctgcattgatttggatgatctattccgttctcctgatgctgcttttggcgggttctcagctctccatgacccatctacctctgaaccagactcagtttctttgctgcgtgttggaattggtgctagaaagttaggtgctggttcacttttcctctatggattaataatgagaaagcatgtagctgtgttggctgcaattgagggtgatgaacaacggttgagtataatgtatcgagattttgggacaaaactggtgggattggatagtttgggtgatgctggggaaagccttatctcccggataaaggctgctaggaagtaataccaagtctggaatgttttactcagtctctcagctgtaatggttttcagcctgagtgctgagttttatgctcagcatagttactgacctctgtaatccattcatttgattaattgcttcatatctctcgactctcatcaatgcgcaagtcctcccatgttaatctaaactgctgataaaacagcggagtaatgaaaaatcatatcaccacatcaaacaatttgggat

SEQ ID NO: 129151 - DNA, 94 bp, Zea Mays
cttgtgtcacctgtgattcagcagaatgttaccttgatggatggccggcgccagagtttcagggttatgattctgatctgaacttcacccaaga

SEQ ID NO: 129152 - DNA, 1831 bp, Zea Mays
ggcgggcttattgtagcccattggaaacgagactagaaagggtcatgcagcagcagctgtcatcccacaccctctccctctccctcttccagcgcacagcctcggcccctccatctctctttgctcgcccctgccgtatcctccctctcccataaggtacagggacctcaaggggtatggaagtggagaagtatactagggagcccaaggggagggaggagcaaccgcagcaggtcaggtctgcctatgacccaacaaagctcggtacaaaccactaggaaggaggaggtcgccagaaaccactagctaggaaggagtgagggaggactcaggagtctagctagtttgttcgtccctccctcccgcgtcagaagtcagaactagcctagcctaagccgaaagccgaaaggactcggtgcttgcgtgcggcggatggcgacttcgtcgtcgttctctggccccggcgggtccccggcccacgcgtctccgggaggcggaggcggcggcggcggcggcggtggcgtggggtcgtaccaccaccaccggtcgcggttcggcgacacgacgctgaccaaggtgttcgttggcgggctggcgtgggagacgccgtccgaggggctgcgccagcacttcgacgtctacggagagatactcgaggcggtcgtcatcaccgatcgcgagaccggccgctccaagggctacggtttcgtgattttccgggacccggacgcggcggcgcgggcggtgcagaacccgaacccggtgatcgccggccggcgcgccaactgcaacattgcggcgttcggcccgccgcgggccgcgcagccgagaggtgagcggagaggaggaggaggaggaggccgagggccgcacgtgcccgatcagccgccccaggggtcgccgtcgccctacagggtgccatcgcagatgaccccgcctcatcaggccgccacgttgttctacaacccccagttcgggtactggtacccacctgattatccataccaacaggcattgtacaattctcaagtgctacaacattactaccctcagatgtatggtccagcctctccttcaggaccagcctaccaatacatgggctatatgcctggtggcccaagtccaaggactggattctcgccgatgcagcaaccaatgcgacaacccttctttcagcagccaacgacacagatggatggttctttcccatcagtcccttcgcttccacctaatttcagactccagctgccccctcgtgcagtctcaagggaatctgatgatgcatctgcaggctcccagtcagcccagccagtttcttcaactcctgctacagccacaaacaacgaggaagattcgaggcctgtagtgtctgattcagatccaaacacaccaaattgacttagtgagaatcctggcaacacgatgtgacttcaatctggtgcaggctattggtagtctgtaacagagtcttcatgatactctcacatcttgactgaaaaagttcccaaagatttgttctttcattatttctgattctttttttttttgaattcttgcattgcatttcttcaccgaatccattgtacggacgactgaatttcaagttcaaacttcaggaattcgctagcatataagttccgtggcatgttagcgttcaaagtactgcagtgctgttagttcgtatctcaaatatgcagtacagtttttcattgaggaaccacccagttttattgcaaccagaacaaatttttcccttcagtcgagagaaggctccaatttctactgctgttttattactcacagaagaacaaaacgatttgcagttcggtct

SEQ ID NO: 129153 - DNA, 1426 bp, Zea Mays
agcagcagctgtcatcccacaccctctccctctccctcttccagcgcacagcctcggcccctccatctctctttgctcgcccctgccgtatcctccctctcccataaggtacagggacctcaaggggtatggaagtggagaagtatactagggagcccaaggggagggaggagcaaccgcagcaggtcaggtctgcctatgacccaacaaagctcggtacaaaccactaggaaggaggaggtcgccagaaaccactagctaggaaggagtgagggaggactcaggagtctagctagtttgttcgtccctccctcccgcgtcagaagtcagaactagcctagcctaagccgaaagccgaaaggactcggtgcttgcgtgcggcggatggcgacttcgtcgtcgttctctggccccggcgggtccccggcccacgcgtctccgggaggcggaggcggcggcggcggcggcggtggcgtggggtcgtaccaccaccaccggtcgcggttcggcgacacgacgctgaccaaggtgttcgttggcgggctggcgtgggagacgccgtccgaggggctgcgccagcacttcgacgtctacggagagatactcgaggcggtcgtcatcaccgatcgcgagaccggccgctccaagggctacggtttcgtgattttccgggacccggacgcggcggcgcgggcggtgcagaacccgaacccggtgatcgccggccggcgcgccaactgcaacattgcggcgttcggcccgccgcgggccgcgcagccgagaggctggatttgcagtgcctgccccctaattcgctgcacgctatctggtctactcatccccaccacctcgcaaaagtcgaggatagcaatgaaatctggctggcgatttctttacttagcatctcggtgaagtgccggtataaccatctcccatacaatgatacaactatacaagatgcatgcgtggagtggggctgctgctgcccatttcccccctttaatttgcttgctgaggaagatcaagttgcattgaccgggagcacgccattggtggtggtatgctgcatcgctccagcgacagcgaggtgtaaaggggtggagattacatcgctggagaatcgatcgggaatccagacgcctttcttttctagtgaaaaccgatgcatggctttacaaaatgttgggcggcatatactacccaatactgctactctccctgtagtcttttttagactttgacccgtcgactgtcaaccgctggaggaatagatgcttgattccgcggcatgcatggaaagctttgtgctgatgcagcttttccttctctagctcgtcccccatatccgatcgattcgtttcagagtagtagagtttcttacattcgttcgttgtttcaatattgactcccaagtcccaatatgtat

SEQ ID NO: 129154 - DNA, 4368 bp, Zea Mays
agcagcagctgtcatcccacaccctctccctctccctcttccagcgcacagcctcggcccctccatctctctttgctcgcccctgccgtatcctccctctcccataaggtacagggacctcaaggggtatggaagtggagaagtatactagggagcccaaggggagggaggagcaaccgcagcaggtcaggtctgcctatgacccaacaaagctcggtacaaaccactaggaaggaggaggtcgccagaaaccactagctaggaaggagtgagggaggactcaggagtctagctagtttgttcgtccctccctcccgcgtcagaagtcagaactagcctagcctaagccgaaagccgaaaggactcggtgcttgcgtgcggcggatggcgacttcgtcgtcgttctctggccccggcgggtccccggcccacgcgtctccgggaggcggaggcggcggcggcggcggcggtggcgtggggtcgtaccaccaccaccggtcgcggttcggcgacacgacgctgaccaaggtgttcgttggcgggctggcgtgggagacgccgtccgaggggctgcgccagcacttcgacgtctacggagagatactcgaggcggtcgtcatcaccgatcgcgagaccggccgctccaagggctacggtttcgtgattttccgggacccggacgcggcggcgcgggcggtgcagaacccgaacccggtgatcgccggccggcgcgccaactgcaacattgcggcgttcggcccgccgcgggccgcgcagccgagagggagaggaggaggaggaggaggccgagggccgcacgtgcccgatcagccgccccaggggtcgccgtcgccctacagggtgccatcgcagatgaccccgcctcatcaggccgccacgttgttctacaacccccagttcgggtactggtacccacctgattatccataccaacaggcattgtacaattctcaagtgctacaacattactaccctcagatgtatggtccagcctctccttcaggaccagcctaccaatacatgggctatatgcctggtggcccaagtccaaggactggattctcgccgatgcagcaaccaatgcgacaacccttctttcagcagccaacgacacagatggatggttctttcccatcagtcccttcgcttccacctaatttcagactccagctgccccctcgtgcagtctcaagggaatctgatgatgcatctggctcccagtcagcccagccagtttcttcaactcctgctacagccacaaacaacgaggaagattcgaggcctgtagtgtctgattcagatccaaacacaccaaattgacttagtgagaatcctggcaacacgatgtgacttcaatctggtgcaggctattggtagtctgtaacagagtcttcatgatactctcacatcttgactgaaaaagttcccaaagatttgttctttcattatttctgattctttttttttttgaattcttgcattgcatttcttcaccgaatccattgtacggacgactgaatttcaagttcaaacttcaggaattcgctagcatataagttccgtggcatgttagcgttcaaagtactgcagtgctgttagttcgtatctcaaatatgcagtacagtttttcattgaggaaccacccagttttattgcaaccagaacaaatttttcccttcagtcgagagaaggctccaatttctactgctgttttattactcacagaagaacaaaacgatttgcagttcggtctgtagcatggcaggcgaaaatacgaactacatactgacaagtgacaagcaagcttgaattctgaaatggacatgttcatgtcacaccataatttctaatgtgaaactgaccgtcacgaaacaaagaaattcagtacttatacttacataatactactctgttctcgaatatttgaatatttgtcaccagttagtttattttaaaactaaaacgcgataaataaaaaagaatagagggagtacaaattttctagtgacattacactttggtttccatatgctcgttagtgttcaaactattagcttgcggctgtaggaacatttgcttggagcacgaactcgaccaaacgctcgaggtcccgccgccttctgctgccgccacggcattctccttccgcactgttgctttcgccttcatgccttggcctttctcaccgtccatggcttcttttatgagccgtgccaccttgtcaatctccagtacaatgtcctagttggtgatcaaccgtagtggcacagaacaatggcatgagtggctgatcaaccgtagtggcacagaaaggtgtggagcgtgggctctggaaggacccaagccgacatacgttcagggccgtgagcccggatgggatgagcggcagctgcaaaattgacgggccgaaaaacaggtgggctcgtgccgcagattcccggcactaagattgtagaagcccatgtaaatcggcccaataacttaatgtttgtttggtagaactagtaatgtagcagtagtagtaactcggacgccaaactttgcacaacaattccttccagtttgtgcaaggaccgattttcacggtctcgacaaacgtgtccccacagaacaaacaatcaaacattcattccctcacaagaaaaacggacagatctcatctccaatcatagcaacccgcttccatgaaaatcattacgtgccaatgaaagtttttgaatataagtataggaggtgtggaccagtaagtactgttttttttttctcgcattctcgtcctcattcataataataaagttggaaacctgcatcgtcgtcgtccccaccagagctgagcccgacaagagcaacacgcccattcagctgcctccaaagcgcccctcccagtcccatacggacgggtgggcgcgggggagacacctcactaaacaaaacacatggggaggcatcagagccgtacaaaggcggccatggccacaataactccgcagcagcggcagtgtcagcttaaaaatcgcatcatcaccaggctctcccggtggcggtggtgccacacgtcacgcaaggttccaacgcagacgcatccagcccgccggtgggtcggcggcactgcgatccagcggtagattcgggctaccagagccgtccgtcaggcgagtcacatgcctgccttcgatctgttaattaagacgtactaccagaccactgggcaagacttggagtggtactagctaggatttactgctcacaaccactctttagtagtctttagtttttacacaccgacacgcgagtaaaatttgtttgagcagggagccaaaaaaatggctacgggcctacggctacgcgagttgcaatggctgcaacggcaagctcgaactagtagagacagtagcgctaataaataagcttgtgatgaagcaagccgccatgggttccgaagaacacacgacagacgcgagacggagaacctggctggctggctggtctccagtagtgagtctctcccgccgaccggagtccggagcggagtgcatgcgcgcaccggggttggcacggcgccgaagcaaaagcagcagcgcgtcaggggtcgtacaggcggccgtcgcagcggcatttccaccccagcggcttgtagttggagtagcgcgagaagccggccgccaccgccaccgtgtcgtcgtcgacgtcggtggcgcgggcgccgcggccgagcccgggcacggtggtcacctggacgggcatgcaggggttgcaggcgctgcaccggttgcggcagctcggcggcgtcgaccccagccgcgacttgtcctccgccaggttctgctgctgcgcctcacggagacgagacacccgacgcgctgtcagtctcagtctgtctcaggactcaggaggagggggggacgagtcgtacgtacggtacgtacctgagaaggggaaaacgtcgcggtgcggacgctgctcgcagcgccgagaaggaagcagagggacacggccgcgatgagcgctcggcgaggtgagctcacggccatgagaccatctcttcttacagccaggaatgaagaagggtggatggatggatggatgtttggggcggatcgatcgagggcaatgggaagcttgctggttgctagaccgagaggttactgaagaaacagaaataagctagctagctagcttctgtctcgtgtataggttcttcttccagaatctaaaacctagtctaaaagctatggctatggaggagatgagcagtgacggtggcgcaggagcacaagcgaagcaagcagggccgcagttgcctggcctatgacgaggaaggttgcaaaggggatcggagcagaggaa

SEQ ID NO: 129155 - DNA, 1206 bp, Zea Mays
acatatctattttttatgtcgtgttatgatccagttatcaacacttagcacagtacactccttaatcctcatactatactatatacacagtgttgctacacaatcccgacaggattgtttactacaccaaagtcgaacacgtagaggtagcagggtcgaacagagccggaagcaggtacttcctcccattcgcgccattggcattgtagctcgcccccgtcgcggggtccaccgccaggttacctgcgaaaccggggtaggcgccgctgccgtagacccctgtgcaggcagtggcggcctccagcggcgcgtccttgtcgccctggtagaacccgtcgcggaacgggttggtcaccgcgccggcgaccatgctggcgatgttgatcaccatgccgtccgcgccgacgtcgccgctcggcggcacgagcgccggcgtctggggaccgtacagaggccggtggaacggccacgcgcactgcccggggcactgcgtggcggagttgccgacccagacgtacgcggtcccgggggcccgggcgtcggagccgtgcaggccgcagcggctcgtgcagaacccgtccacgcccacgtcctgcgcggtgagcaccagcgcgatcccgcccttcctcggcccggcccgcgccgccagctgcgggagctgggccagcgtcaggcgcttccccagcgagcacccttcgtcggtggcctggccgacgagcgccacccgcgcgccgccgccgccgccgccgctgcccctgccccgcgccttggagaggtacagctggtcgatggtgctccaccactgcgacacggacggggacggtgccagcggcgaggcggcggcggtggtgagggacccgaggaagtcggtgaccacggccttctgcgctggcgtgaagcggccgtaccagattatggacaccgggatgcggccctgcagcacggcgccgttgtggtacgtcaggatcgcgctggccggcggcttgtacagctccagcaggctcctgccgcccgcggagagacgtgccgagctcaggatcagcacggacaccagcgcaagtgcgacgtggctcgtgctctgccagccgcgaaagcaactatgaggtgatgccatttctgactctctcgggggagggattggcgacttgttatgctagtagcctggtaggtgatgatagagtgaaagtgcaggagtggtttatgagt

SEQ ID NO: 129156 - DNA, 945 bp, Zea Mays
atggcttgttacaacactgcatctttagcggcgactctgctggcgttcgcgctgacgtttcaggcctgcctcgccgggaggaggctcaccgcgctggtgcaggagccggccataaccatgaggtaccacaagggcgcgctcctgtcgggccccatcgccgtcaacttcatctggtacggcgacttctcggcgccgcagcgggcggcgatcaccgacttcgtctcgtcgctgacggcggcggccccggccgcggcgcagccggagccgtccgtggccacgtggttcaagacggcgcgcaagtactacgccagctccaaggtgccgttcccggcgctgcgcctcggctcccacgccgtcgaccggaactgctccctcggcaggcgcctgacggagagggacctgctcaggctcgccgccaggggagccccgagccgcgccatcaacctggtgctcacggccgccgacgtggccgtggacgggttctgcgagtcccggtgcggcacgcacggcgcgtccccgcggtcccgctccggccggttcgcgtacgcgtgggtcggcaacccggcgtcgcagtgccccgggcagtgcgcgtggccgttccaccagcccgtgtacggcccgcaggcggcgccgctcaccccgcccaacggcgacgttggggtcgacggcatggtcatctcgctggcgtccatgctcgtcggcacggtcaccaacccgttcggcaacgggttctactaccaggagggctcggccgacgcgccgctggaggccgccacggcgtgcgccggcgtgtacggcaagggcgcgtaccccggctacgcgggctcgctgctggtagaccaggccagcggggccagcttcaatgccaacggggcccacgggaggaagtacctggtcccggcgctcgtcgacctggacacgtcgtcgtgcgccaccttggtttag

SEQ ID NO: 129157 - DNA, 889 bp, Zea Mays
ggacacacgcacacacggaagaagccactagctctccgcagtccgctctcgcctctcggccttctccttgtgccgccgaacaccctcacaagagtcggcctctcgatttctcagtccagcctcagcagtccccttccctccctccatcaggtgttgcctcccgcagatccaaatcggaattcggtccttcgtccccaaaccaccaatccgggaagtgaagtgatgggggagtgcgaggacggcaaggagtacaggtgctgggaggagctgctgccggacgcgctgggcctcatcttccgcaacctgccgctgcaggaggtgctcaccgtcctgccgcgggtgtgcaagtcctgggggcgggtggtggccggcccctactgctggcaggagatcgacatcgaggagtggagccagcagcagggcaagccggagcagatcgcccgcatggtcgagctactcgtgggccgcagcgccggctcgtgccgccggatcagcgtctccggcctgccctgcgatccgcgcttctccttcatcggagacaagtaattctgaaacctgagcgatgcttcttgctgtttttgatcgattcctgtggcaagtgaatttttttctgcaattttttttttttgcgtggagtgttagattagaattatacgctcattctaagcctcgccgtcaggtttaagccgtgatgggggtgtttgcttgcagatctgctgagaacgtgagtgtctgttcagaatttctgacgtgcaaatccaggtccatttgtttgtctatgctggcttggagaccattctgatttttctgattagcagggctagaagtgggcctagttaaactttgatgagatttggtctggatctttggagcaaataaaaacctgcta

SEQ ID NO: 129158 - DNA, 1423 bp, Zea Mays
ggacacacgcacacacggaagaagccactagctctccgcagtccgctctcgcctctcggccttctccttgtgccgccgaacaccctcacaagagtcggcctctcgatttctcagtccagcctcagcagtccccttccctccctccatcaggtgttgcctcccgcagatccaaatcggaattcggtccttcgtccccaaaccaccaatccgggaagtgaagtgatgggggagtgcgaggacggcaaggagtacaggtgctgggaggagctgctgccggacgcgctgggcctcatcttccgcaacctgccgctgcaggaggtgctcaccgtcctgccgcgggtgtgcaagtcctgggggcgggtggtggccggcccctactgctggcaggagatcgacatcgaggagtggagccagcagcagggcaagccggagcagatcgcccgcatggtcgagctactcgtgggccgcagcgccggctcgtgccgccggatcagcgtctccggcctgccctgcgatccgcgcttctccttcatcggagacaacgcacgagctctccggaccttggagatccccaggagcgagatcagcgactccatggtggaatccgtggcgccgcggctgccgaacgtcactttcctcgacatcagcagctgcacgaagatgggggcccgcggcctggaggcgttcggcaagcactgcaagtccctggcggggctgcggcgggtgatgcacccgatcgacctggcggacagggcgtgccagcacgacgaggcgcacgccatcgcgtgcagcatgcccaggctgcggcacctggagatggggtacatgctggtggcgacggaggcggtggcggagatcctggggcggtgccgcgagctcaggttcctggacctgcgcggctgctgggcggtggacgacaagctcctgccgcgcgaccgccacccggggctgcgcgtcctgggaccccgcgtcgacgactgctacgagaacagctactgggaggagtgctccgacgactactcggacgactcctccatctactcgtgggagctcatggacgacgtcgacgacgactacgactacgccgccggcagcgacgacgacgacgacgaggccgtctgggacgacgacggccagggcctggagaacctggaggtcaggttctacggcggtggcttcggcgagaccttcgccggcttcgactggccgccgtcgccgtgacatgacacctgctgcctgcgcttgcgttgcttgcgtgggtgggtgagcctttgtgtgttgtccccaagctttggaagcttgctgtgctgctgtagtactgtgcctgcgacatcactcgatcttcctctacctcgcagatatgccatatgtgaagcgaactgctagtggtgcaatctaaaatgtagacgctggtgtttacatg

SEQ ID NO: 129159 - DNA, 1525 bp, Zea Mays
ggacacacgcacacacggaagaagccactagctctccgcagtccgctctcgcctctcggccttctccttgtgccgccgaacaccctcacaagagtcggcctctcgatttctcagtccagcctcagcagtccccttccctccctccatcaggtgttgcctcccgcagatccaaatcggaattcggtccttcgtccccaaaccaccaatccggttgcattctttgggtttgctcacagcgcacacaaagccattttactgctgggaatggtggctggcactattagcgtctccggctcttgagtgatctccaagggaagtgaagtgatgggggagtgcgaggacggcaaggagtacaggtgctgggaggagctgctgccggacgcgctgggcctcatcttccgcaacctgccgctgcaggaggtgctcaccgtcctgccgcgggtgtgcaagtcctgggggcgggtggtggccggcccctactgctggcaggagatcgacatcgaggagtggagccagcagcagggcaagccggagcagatcgcccgcatggtcgagctactcgtgggccgcagcgccggctcgtgccgccggatcagcgtctccggcctgccctgcgatccgcgcttctccttcatcggagacaacgcacgagctctccggaccttggagatccccaggagcgagatcagcgactccatggtggaatccgtggcgccgcggctgccgaacgtcactttcctcgacatcagcagctgcacgaagatgggggcccgcggcctggaggcgttcggcaagcactgcaagtccctggcggggctgcggcgggtgatgcacccgatcgacctggcggacagggcgtgccagcacgacgaggcgcacgccatcgcgtgcagcatgcccaggctgcggcacctggagatggggtacatgctggtggcgacggaggcggtggcggagatcctggggcggtgccgcgagctcaggttcctggacctgcgcggctgctgggcggtggacgacaagctcctgccgcgcgaccgccacccggggctgcgcgtcctgggaccccgcgtcgacgactgctacgagaacagctactgggaggagtgctccgacgactactcggacgactcctccatctactcgtgggagctcatggacgacgtcgacgacgactacgactacgccgccggcagcgacgacgacgacgacgaggccgtctgggacgacgacggccagggcctggagaacctggaggtcaggttctacggcggtggcttcggcgagaccttcgccggcttcgactggccgccgtcgccgtgacatgacacctgctgcctgcgcttgcgttgcttgcgtgggtgggtgagcctttgtgtgttgtccccaagctttggaagcttgctgtgctgctgtagtactgtgcctgcgacatcactcgatcttcctctacctcgcagatatgccatatgtgaagcgaactgctagtggtgcaatctaaaatgtagacgctggtgtttacatg

SEQ ID NO: 129160 - DNA, 1559 bp, Zea Mays
ctcgcgcaaattattatgccgggaaagattatattcttcccctttagctttgagcccgaaaggccgaagctttcgcgttcttccccacagatatctggagccgtagcttctgtttggtatggccgtgggttgaaataaatagtagtgtgcgggacgcccaccaattggcacgctgcgctttccatccctgcagctgcaagatgccttctttttagatctgtgctgccgtgccttcctcttcatggttgcattctttgggtttgctcacagcgcacacaaagccattttactgctgggaatggtggctggcactattagcgtctccggctcttgagtgatctccaagggaagtgaagtgatgggggagtgcgaggacggcaaggagtacaggtgctgggaggagctgctgccggacgcgctgggcctcatcttccgcaacctgccgctgcaggaggtgctcaccgtcctgccgcgggtgtgcaagtcctgggggcgggtggtggccggcccctactgctggcaggagatcgacatcgaggagtggagccagcagcagggcaagccggagcagatcgcccgcatggtcgagctactcgtgggccgcagcgccggctcgtgccgccggatcagcgtctccggcctgccctgcgatccgcgcttctccttcatcggagacaacgcacgagctctccggaccttggagatccccaggagcgagatcagcgactccatggtggaatccgtggcgccgcggctgccgaacgtcactttcctcgacatcagcagctgcacgaagatgggggcccgcggcctggaggcgttcggcaagcactgcaagtccctggcggggctgcggcgggtgatgcacccgatcgacctggcggacagggcgtgccagcacgacgaggcgcacgccatcgcgtgcagcatgcccaggctgcggcacctggagatggggtacatgctggtggcgacggaggcggtggcggagatcctggggcggtgccgcgagctcaggttcctggacctgcgcggctgctgggcggtggacgacaagctcctgccgcgcgaccgccacccggggctgcgcgtcctgggaccccgcgtcgacgactgctacgagaacagctactgggaggagtgctccgacgactactcggacgactcctccatctactcgtgggagctcatggacgacgtcgacgacgactacgactacgccgccggcagcgacgacgacgacgacgaggccgtctgggacgacgacggccagggcctggagaacctggaggtcaggttctacggcggtggcttcggcgagaccttcgccggcttcgactggccgccgtcgccgtgacatgacacctgctgcctgcgcttgcgttgcttgcgtgggtgggtgagcctttgtgtgttgtccccaagctttggaagcttgctgtgctgctgtagtactgtgcctgcgacatcactcgatcttcctctacctcgcagatatgccatatgtgaagcgaactgctagtggtgcaatctaaaatgtagacgctggtgtttacatg

SEQ ID NO: 129161 - DNA, 1688 bp, Zea Mays
ctcgcgcaaattattatgccgggaaagattatattcttcccctttagctttgagcccgaaaggccgaagctttcgcgttcttccccacagatatctggagccgtagcttctgtttggtatggccgtgggttgaaataaatagtagtgtgcgggacgcccaccaattggcacgctgcgctttccatccctgcagctgcaagatgccttctttttagatctgtgctgccgtgccttcctcttcatggtaccctgtggttggagtcggtattagcgtttaatgaagctactttttcctcccttgccttttggatgatgcttagtactactacgtcttatcagctatcaatcctcctctcgcgtgcttcttggataggttgcattctttgggtttgctcacagcgcacacaaagccattttactgctgggaatggtggctggcactattagcgtctccggctcttgagtgatctccaagggaagtgaagtgatgggggagtgcgaggacggcaaggagtacaggtgctgggaggagctgctgccggacgcgctgggcctcatcttccgcaacctgccgctgcaggaggtgctcaccgtcctgccgcgggtgtgcaagtcctgggggcgggtggtggccggcccctactgctggcaggagatcgacatcgaggagtggagccagcagcagggcaagccggagcagatcgcccgcatggtcgagctactcgtgggccgcagcgccggctcgtgccgccggatcagcgtctccggcctgccctgcgatccgcgcttctccttcatcggagacaacgcacgagctctccggaccttggagatccccaggagcgagatcagcgactccatggtggaatccgtggcgccgcggctgccgaacgtcactttcctcgacatcagcagctgcacgaagatgggggcccgcggcctggaggcgttcggcaagcactgcaagtccctggcggggctgcggcgggtgatgcacccgatcgacctggcggacagggcgtgccagcacgacgaggcgcacgccatcgcgtgcagcatgcccaggctgcggcacctggagatggggtacatgctggtggcgacggaggcggtggcggagatcctggggcggtgccgcgagctcaggttcctggacctgcgcggctgctgggcggtggacgacaagctcctgccgcgcgaccgccacccggggctgcgcgtcctgggaccccgcgtcgacgactgctacgagaacagctactgggaggagtgctccgacgactactcggacgactcctccatctactcgtgggagctcatggacgacgtcgacgacgactacgactacgccgccggcagcgacgacgacgacgacgaggccgtctgggacgacgacggccagggcctggagaacctggaggtcaggttctacggcggtggcttcggcgagaccttcgccggcttcgactggccgccgtcgccgtgacatgacacctgctgcctgcgcttgcgttgcttgcgtgggtgggtgagcctttgtgtgttgtccccaagctttggaagcttgctgtgctgctgtagtactgtgcctgcgacatcactcgatcttcctctacctcgcagatatgccatatgtgaagcgaactgctagtggtgcaatctaaaatgtagacgctggtgtttacatg

SEQ ID NO: 129162 - DNA, 1848 bp, Zea Mays
atggctgtaaagcttgataatgcccatcaagagtattcaaatgcaattgttgttgctcaagctacatcaaatcaaatgtcaaaacgtgacattttgaggccttacatggatattattgataacatgttgtctcaaatgctgcgggaggatccagcctttaaaccttctggtggtagattaggtgaaaatgatatggactatgataccgatgataaatcgatggccacacttcgtcgccaactcaggagggctcatgaggagtactataggtgcaaaagtgagtatatgacttgtgtcatggaagccctcaaactagaggacacaataaaaaattatgaacgccgtgatgctaatggatgtgctgcatttgtcaaacaagttatgccaagtgatctgactcgaggatacattgttacattcccagagttcatttggtgctgtatactgagaaagcagcttcaaaaagcatttgctgttatccttggctgcatgtcagctgctatactgctggctgaagctactttacttccaagtggtgttgatctatctctcttttctattcttataaaagctgtaggaaaacaagaggttttagttcagagaatggggaacattgatgatgcagttcctttctttggcagaggcttcaacaagatctatccactgattatggttgtttatacactattggttgctagtaatttctttgttcgtgtgattgactttttgggaagatggaaaaggttcaagttccaacgtgaagaagagaatatagatggtttagatccatctggaatgattattctacaaaaagagagatcttggatcgaacaagggtgcaaagtgggcgagcaggttattccattggcaaggaatttcaatggtgtgaacgctgatattgaatcacaaaatgtgccattggttgaaaacactgtggagatgaaagtaggggcaacttcttccagaaatgacgggagagctggccagttgaagtatgcaaacaacagggagactatcgccagcaaatacacttctattagagaacagaaccggcagtcagggaaggtagtgagaaaggaaatttcaccgaactctatatctttgctcgaagaaagaaattcagagcaggggtccaatgctggtgtaccaccaactggtgtgtctgcaacatgggcctcgatgaagattggttttcaaaatttcaaagcaaatatgggttctaagaagtttcttcctttgcgccaagatccaggatttgttccaaatttgaatgtctcttcaccagaatctcttgatgacatattccaaaggttgaaacggcggcctgcaaatgtgcctgtggattaccttgacgatgacgatgatgacaacataggagatacagatcttcatttccaagatcaatgaaataggttgtgatattcttttaggtttagaatatgcatacacagaaaaactaaaagaattggtagcaatagatgttcaaaggaagatacaggatgtatagatctgatgatggtttggtgtgcttcctggaagctcatgacgcctgtccatctggaaaactgcaaaatgtaagtacgatatgatgacagcctttacagaaaggtttggaattctcccgccgaaaagggttgggactaatctactacgtaccactatattcaggtaaccttgttggtttctctcaccttttttttggaactgtattggagatgctgatatgtgatggaagccaaaaattgtaaatgtgtacctacaataccatatgaaaattaacgtgcttgagttgtaaccagtaaaaacatactattgaatctatacttgatcgggaggatacaacccaaa

SEQ ID NO: 129163 - DNA, 2067 bp, Zea Mays
atggctgtaaagcttgataatgcccatcaagagtattcaaatgcaattgttgttgctcaagctacatcaaatcaaatgtcaaaacgtgacattttgaggccttacatggatattattgataacatgttgtctcaaatgctgcgggaggatccagcctttaaaccttctggtggtagattaggtgaaaatgatatggactatgataccgatgataaatcgatggccacacttcgtcgccaactcaggagggctcatgaggagtactataggtgcaaaagtgagtatatgacttgtgtcatggaagccctcaaactagaggacacaataaaaaattatgaacgccgtgatgctaatggatggaaatatgtatcaagttttagtgaaagtcgctcgggcacacttggatcaattttggacactatcgagttcatttggtgctgtatactgagaaagcagcttcaaaaagcatttgctgttatccttggctgcatgtcagctgctatactgctggctgaagctactttacttccaagtggtgttgatctatctctcttttctattcttataaaagctgtaggaaaacaagaggttttagttcaggttgctgcttttgtccccttgatgtatatgtgcatttgcacatattattcattattcaagattggcatgttgatgttctattctctgactccaagacaaaccagctctgtcagcttgcttatgatctgttcaatggttgcaagatatgcacctcctatttcttataactttctgaatctcatccgccttggtggcaatgctaaaactacatttgagaagagaatggggaacattgatgatgcagttcctttctttggcagaggcttcaacaagatctatccactgattatggttgtttatacactattggttgctagtaatttctttgttcgtgtgattgactttttgggaagatggaaaaggttcaagttccaacgtgaagaagagaatatagatggtttagatccatctggaatgattattctacaaaaagagagatcttggatcgaacaagggtgcaaagtgggcgagcaggttattccattggcaaggaatttcaatggtgtgaacgctgatattgaatcacaaaatgtgccattggttgaaaacactgtggagatgaaagtaggggcaacttcttccagaaatgacgggagagctggccagttgaagtatgcaaacaacagggagactatcgccagcaaatacacttctattagagaacagaaccggcagtcagggaaggtagtgagaaaggaaatttcaccgaactctatatctttgctcgaagaaagaaattcagagcaggggtccaatgctggtgtaccaccaactggtgtgtctgcaacatgggcctcgatgaagattggttttcaaaatttcaaagcaaatatgggttctaagaagtttcttcctttgcgccaagatccaggatttgttccaaatttgaatgtctcttcaccagaatctcttgatgacatattccaaaggttgaaacggcggcctgcaaatgtgcctgtggattaccttgacgatgacgatgatgacaacataggagatacagatcttcatttccaagatcaatgaaataggttgtgatattcttttaggtttagaatatgcatacacagaaaaactaaaagaattggtagcaatagatgttcaaaggaagatacaggatgtatagatctgatgatggtttggtgtgcttcctggaagctcatgacgcctgtccatctggaaaactgcaaaatgtaagtacgatatgatgacagcctttacagaaaggtttggaattctcccgccgaaaagggttgggactaatctactacgtaccactatattcaggtaaccttgttggtttctctcaccttttttttggaactgtattggagatgctgatatgtgatggaagccaaaaattgtaaatgtgtacctacaataccatatgaaaattaacgtgcttgagttgtaaccagtaaaaacatactattgaatctatacttgatcgggaggatacaacccaaa

SEQ ID NO: 129164 - DNA, 474 bp, Zea Mays
tatacaaagaaaagaaatcggttgttgcataagaggttgaattgtattttcttcatttactacaaccgaaagatgaaagctaggttccaaaaactacgccagaagaaggggaaaaactttgatccattggttcatgaggacttcaactcggataaggaatgggttgattctttgcatgtagtccttgaaggtgggcgtgagtgtgaccttacatgggaccttgtggataatgccattggagcatcagaagcacttcgtggccgaaacttaccaagaagagcccataatgtgtattcaaggagaaattctgttgctgcacaaaataagccagaggctgaagaggaagatgaagatgaagtaaatgttccacatgaggatgcagaaatcacagattgtgaagatgaacctaatggtggcaatgatggtggagaaggggaggcacccaatatcccatgagagtttgataatgatttt

SEQ ID NO: 129165 - DNA, 894 bp, Zea Mays
gccatccctactccaccccaacctaagcagtaggcagtaggcatcaagcgtcttgcgtggctgcgtccaagtccaagcgccatccggccaccagcgcaggtaccgagccaccgaggtaggagccggccaccgggcagatcccaggctgccagccaccggcgtccagcactccggctgctagctaccggccacccgcagcgcaggccacaccaacgggcagcaaccgcatggtgccatagctgtcgacgaacaccagcaaccagacggccagatcccaggttatgttactactattatttctatatgatatatttgtctaaagtataaagtctaaacgctatatgaaatgtgattttatatagctatatatgagtgtcaaacagagagttatatactcatatattgtttgcttctgtaacagtaattcgatttattatatcttcgtcgaggatagtgacacgtcacgtcagtgtccggccatcgcttgagaggcacgaatgtcttcgctgcgccgtcacgatccagactcgcatccccttctgacgcgcacccattgcgggcagacgtttgggctttgtgtggatggatcatggacgtacataccacatttgttttttaactaaatcttcacttctttgaatcgcagagtccaacccaaggatggttcaggctacggaagggcaatgcactgcttcttagactattgaagaatttataggatgatgtgcaggagcaggcagctactatgcaattttctatttattgtactcttgccacgaactgctcgtaattctctttcagtttgttgcagagcgtgggcagtaaatgcaaagaaaaaaacacagttgcagaaattgctagcaatagactatacaagatagagccaaattgagc

SEQ ID NO: 129166 - DNA, 1832 bp, Zea Mays
gccatccctactccaccccaacctaagcagtaggcagtaggcatcaagcgtcttgcgtggctgcgtccaagtccaagcgccatccggccaccagcgcaggtaccgagccaccgaggtaggagccggccaccgggcagatcccaggctgccagccaccggcgtccagcactccggctgctagctaccggccacccgcagcgcaggccacaccaacgggcagcaaccgcatggtgccatagctgtcgacgaacaccagcaaccagacggccagatcccagtaattcgatttattatatcttcgtcgaggatagtgacacgtcacgtcagtgtccggccatcgcttgagagagtccaacccaaggatggttcaggctacggaagggcaatgcactgcttcttagactattgaagaatttataggatgatgtgcaggagcagagcgtgggcagtaaatgcaaagaaaaaaacacagttgcagaaattgctagcaatagactatacaagatagagccaaattgagcaaaaaaaaagaccattcccatttggatcaccattccctaaccacagcaaaatgaagttggaaaattgagtagttgagtgccgtgtatgcacatgagcagggctaatactttataagaaatgtgctggttcttgatactcctccaaccagttgtagaagaattctggtttggctgaagtagttttacatccgaaagatggactttgtacagatatattctctgtcaacaatatgtatatccaggcggagatgaacttggagggaagcagatttacagtttggtgatattatatattatcaattgcagtttattaatgttgcgcttcttctctattatcaaactattcacacaagacttcatgtgtgcgtgtgtgaaagattttattagtgtaaggtctttagggacagttcacattgaagttctggtgcctacataaattgtaaaccatacatgttgacatgggtacacatctcatggctatatacaactttgacatgaggtttatcttaagattgtgtgttccaataaaagctattactatttcttgcatgtgcatgtctttaggatatccatttttctttatagatttatttatttacatcgcttactgcttactagcctattttttctagcaatttctgcaagtcggcccatcgcgttgaactaaaccatctctaatttcctacaacttcaactccaacaacagaggtaccacaatggacttcttaagaagaataggaaccgtgtacataagcttttttgctctaacaaaataagagtggttgttgcaacaatggcattcagaatgggtcttgataagagtgacgttgaacgggtggttgattgtatcttgccagaaagcgtagaagaatacatacatgtatattccatgcagattccccccaccctcccattttcttctcttttctagacatcttactatgctctttctaggaaactggccgtgctgattcaacaacattctataaaagtcgaagtcttttgcacaaatgaatcttatcttcttgtcctttttttcttgtaatttacatttccaacctgctctaagtttcctacataatgacttcaataaaccctttttacagtgaagttcacgaatatgctatgagaaaattctttgccagatattttcttgtgaaaattcagttggatgcatttgctccttggttaaagagtcgacttcagacaagttagatataaaagaggaggtttgcctctgccttaatgcacctaatttatttttccacatattcatgttgcatgttgcgcagttgtattgccatattgtac

SEQ ID NO: 129167 - DNA, 2044 bp, Zea Mays
tttgataccagcgagcgcagacatcgccggggacgccatcatcctcggctgcctccaagaccggcccaccgttctgcctgcactcccactcccaaaccccatgatgaacctccctttccggctccgccatctccgacgccttctcgctgccccgcccttaccaaccctcgccgccacacactcccatagcccaccctccttccgaccgctgcaccccacccgaatccagccgctgcggttccatctacccaaccccccagtgcggcggctctcctccgagcacgcaatcctccccacccacctccaggacgagcgcttcgccacgctctcggataggatctatgatgccgtgattaagacggggacggaatccaacgagggcaccgaggccgcgctcgacgcgttgggcgctgagctgactacccctctcgtcgccgacgtgctgcaccgcctccgctacgaggagaagctggcgttccggttcttcgcctgggcgtcccaacaggacggatacagccacgaaccgacgacttacaacgacatcatcgacattctctccggcacgcggtacaagagccgccagttcggtgtcctctgcaacgtgctcgatcacatgaagcgccatggctcgaggtcggtgccggttgagggccttctggagatcctgcgcgcctacacggagaagcatctcacgcacatgagaaagctggccaagaagcggcgggttcggatgcgtacgccgccagagactgacgcgctcaacgttctgctggacgcgttctgcaagtgtgggatggtcaaggaagcagaggcagtgtttggccgcgtgaagaggaagttgctgggtaatgcagagacgtacagtaccctgttcttcgggtggtgccgggcgagggaccccaagaaggccatgaaggtgctcgaggaaatgattcagatgaagcacaccccagagagtttcacctacgttgcagccatcgaatcattttgcagcgctggattggtgtcagaggcaagggaactgtttgagttcatgaggactgaggggttgacggtgtcatcgcccacagccaaaacatattcgattatgattgttgcattagcaaaggctgaccggatggaggagtgttttgaactgctttcagacatgagaacttgtggttgtatgcctgacgtgacgacttataaagatttgattgaagggatgtgcttggtgggtagactggatgctgcttatcgtgtgttggacgagatggggagggctggatttcctcctgacattgtcacgtataattgctttcttaatgtgctttgtagtcttcgaaatgctgatgatgcacttgaactctgtgagaggatgatagaggcacactgtgagcccagtgttcatacctataatatgctgatgatgatgttcttcgagatgggagaggcacatagagcattagatatatggcttgagatggacaaaagaggatgtcaacgtgctatcgatacctacgagataatgatctatggtctctttgattgtggagaaacagaatatgcaactgctcttctagatgaggttataaaccgtgacatgaaactttcatacaagaagtttgatgctataatgctgaggttatcagctgtaggcaaccttggtgcgatacatcggttgtcagagcatatgaggaaattttacaatgttgcgatgtcgagacgatttgcaatcactcagaagaagaagagcataggcctgagaaggaaatgagtgccgtggctattgctgctgttgtttcttgttagttgttactgaggatattcaggagcttattcaaaggtagttaatgtatgccagcacgtattgttggaacagattacagtggaagaagcactgcattttttttaatgtaaaaaataggagtgttgcataaccccattcatttgttgaattgaaccggtgctgtgaatatcattgcatttgcattgtagaagaaacatgtacaaggtaacccctcaaccgcacccattcattgttgcaacgtgcacgaaacaccaa

SEQ ID NO: 129168 - DNA, 2830 bp, Zea Mays
cccagcagtccgcctctccctcgctctcagatctaatcattatttaatccattttttcccagtctcacatgagcacgcctcactcgtcctccacctcctccgtcccccaccgcgcctccgctccccagatcccccaatccctaaccctagcgccacccacggcgtgctccgcctcgccttcctcctccttctcctcctcctccgcgtccggcatgcgggacgcgggggaggacgacgactccgactccccgccgtcgcagatgtcggaggacgaccccggcgccggcgccggcgacaggtgggagccggatctgaggggcgggggcggcaggcgggcgccgccggaccaggtgctggggaacgtgctcgagaccgtgctccagttcctcaccgccgcgcgcgaccgcaacgccgcctcgctcgtctgccgctcctggtaccaggccgaggcgcagacgcgccgcgagctcttcatcggcaactgctacgccgtctcgccgcgccgcgccgtcgagcgcttcggcggcctgcgcgccgtcgtgctcaagggcaagccccgcttcgccgacttcagcctcgtgccctacggctggggcgcctacgtctccccctgggtggccgcgctcggccccgcctacccttgcctcgagcgcatctgcctcaagcggatgaccgtctccgacgacgacctcgcgctcgtcgccacctccttcccctgcttcagggacctctccctcgtgtgctgcgacggcttcagcacgctcgggctcgccgtcgtcgccgagcgctgccggcatcttcgtgtgctggatctgattgaagactacgtcgaggatgatgaggacgagctggtggattggatctccaagttcccagagtgcaacacctctctggagtcgcttgtcttcgactgtgtcagcgtcccgttcaactttgaggccctggaggcacttgtcgcacgctcaccggctctgcgccagttgcgtgtgaaccaccatgtgtcagtagagcagctgcgccgtctcatggcaagagcaccccagctcacgcactttggaaccggtgcattccgatctgagggcgcccctggtgggggtttggctgtgactgagcttgctacatcttttgctgcatccaggtctctcatttgtctatcaggtttccgggaggtcgatccagaatacctcccagcgatctaccctgtctgtgccaagctcacgtcactaaacttcagctttgcaagcctaaccgctgcggaactcaagccagttattcgcaactgcaccaatcttcgcactttttgggtccttgatactgttggcgatgaaggcctacgtgctgtggctgatgcatgctctgatctccgtgagctgagagtttttcctttggatgcctctgaggattctgagggttcggtctcagatgtcggtcttgaggcaatctcaaaaggctgccggaagctagaatcaatcctctacttttgccagcggatgacaaatgcagcagtaattgatatgtcgaagaactgtcccgagcttgtagtgttccgcctctgcattatgggccgccaccgccctgaccgggtcaccggggagcccatggacgaaggttttggcgcaattgtgatgaactgcaagaaactcaccaggctttcggtctctggcctgcttaccgataaagcctttgcgcacattggaaaacatgggaagctaataaagaccctctccgtcgccttcgccgggaacagtgacatgtccctccagtatgtattcgaggggtgcaccaagttgcagaagcttgaggtcagagacagccctttcagtgacagggggctgctctccggactggactacttctacaacatgaggttcctatggatgaactcatgcaggctgacgatgaggggctgtagagatgtagctcggcagatgcaaaatctggtggtcgaagtaattaaggaccactccgaagatgaaggggagggggagaccgttgacaagctgtacttgtatcggtcgctggcaggaccgagggatgatgctccgccatttgttaccctcttgtagcactggtatttgaaggacagccccgcaccgtactgacggacatgtttgttaggtcattccttaccatcaagttgccatggccagcgagggaaagcgtagcgtcccgtgggtgatattcacaagttgctgcaggagcgctcgtgtaaaatcaagtaaagaacctgccgattattccttggaacttgatctggcatgggggcggcatccagagttggggcagttgaggagcacatccagacctagtatagcagtgatgggtagtaactgattgcacaggaactgactgcacactgactccagtcagcaggctccggatggttctttggcagtggcacccaagtctccagttatttactttgccatcttccgttccattttttcagctcagaccaaggaatggcggcggcgctggtgcgtgctgcctatgcccggaagcttcaatggctcaaccggccattaattatgagttgtagtggatccaaaactcaattccgctatttttctccccctcccattgtttttagcactccagagttatttttgtagacctgtagtgtagaccaccaccactacccctttcctccgtcccacgccctctgctattttatatcaagaagctactggaggagacctgggaattcgatcggcatttgcttggttcgtgcccccacccaccccctggcggctgctcgtcaacgtcactgttccattgcttgccagttgccatgatcgtcgtgctcctagatattatgagctcgacctcg

SEQ ID NO: 129169 - DNA, 2438 bp, Zea Mays
gcagaacagtctcgttaattaatttggttacgctcaggtttggggtacttccagttgcacgcagtctgctcttccttattttggggagtaggagcactaatatagcagcatttaagagtagtactggtatctcacgctcacggttggtgctttctgttttgtaggcatcttcgtgtgctggatctgattgaagactacgtcgaggatgatgaggacgagctggtggattggatctccaagttcccagagtgcaacacctctctggagtcgcttgtcttcgactgtgtcagcgtcccgttcaactttgaggccctggaggcacttgtcgcacgctcaccggctctgcgccagttgcgtgtgaaccaccatgtgtcagtagagcagctgcgccgtctcatggcaagagcaccccagctcacgcactttggaaccggtgcattccgatctgagggcgcccctggtgggggtttggctgtgactgagcttgctacatcttttgctgcatccaggtctctcatttgtctatcaggtttccgggaggtcgatccagaatacctcccagcgatctaccctgtctgtgccaagctcacgtcactaaacttcagctttgcaagcctaaccgctgcggaactcaagccagttattcgcaactgcaccaatcttcgcactttttgggtccttgatactgttggcgatgaaggcctacgtgctgtggctgatgcatgctctgatctccgtgagctgagagtttttcctttggatgcctctgaggattctgagggttcggtctcagatgtcggtcttgaggcaatctcaaaaggctgccggaagctagaatcaatcctctacttttgccagcggatgacaaatgcagcagtaattgatatgtcgaagaactgtcccgagcttgtagtgttccgcctctgcattatgggccgccaccgccctgaccgggtcaccggggagcccatggacgaaggttttggcgcaattgtgatgaactgcaagaaactcaccaggctttcggtctctggcctgcttaccgataaagcctttgcgcacattggaaaacatgggaagctaataaagaccctctccgtcgccttcgccgggaacagtgacatgtccctccagtatgtattcgaggggtgcaccaagttgcagaagcttgaggtcagagacagccctttcagtgacagggggctgctctccggactggactacttctacaacatgaggttcctatggatgaactcatgcaggctgacgatgaggggctgtagagatgtagctcggcagatgcaaaatctggtggtcgaagtaattaaggaccactccgaagatgaaggggagggggagaccgttgacaagctgtacttgtatcggtcgctggcaggaccgagggatgatgctccgccatttgttaccctcttgtagcactggtatttgaaggacagccccgcaccgtactgacggacatgtttgttaggtcattccttaccatcaagttgccatggccagcgagggaaagcgtagcgtcccgtgggtgatattcacaagttgctgcaggagcgctcgtgtaaaatcaagtaaagaacctgccgattattccttggaacttgatctggcatgggggcggcatccagagttggggcagttgaggagcacatccagacctagtatagcagtgatgggtagtaactgattgcacaggaactgactgcacactgactccagtcagcaggctccggatggttctttggcagtggcacccaagtctccagttatttactttgccatcttccgttccattttttcagctcagaccaaggaatggcggcggcgctggtgcgtgctgcctatgcccggaagcttcaatggctcaaccggccattaattatgagttgtagtggatccaaaactcaattccgctatttttctccccctcccattgtttttagcactccagagttatttttgtagacctgtagtgtagaccaccaccactacccctttcctccgtcccacgccctctgctattttatatcaagaagctactggaggagacctgggaattcgatcggcatttgcttggttcgtgcccccacccaccccctggcggctgctcgtcaacgtcactgttccattgcttgccagttgccatgatcgtcgtgctcctagatattatgagctcgacctcgacagctctgtcgctataataaacgcccgtagcctagcctgcgtgttgaaattgccatcatgacgataggccctaccaatgatttgctctgatgctgatagtgggccgtccttcgtttcatgtcgagcgagcgagcgagcctcgtgacatcaactgccctgccctgatggccgtctgtttctattctgctgctgacgctttcagggtcctggaggggtcgtcatggctgatgctgagg

SEQ ID NO: 129170 - DNA, 200 bp, Zea Mays
tgtgctcttttttgggttttatattttggtgcatggtttatgccagtggttatttactgaacatatgttcatgcggcgcttcataaaattccatatttgcagaggatgcagtgcatttctgtctggcctagtcaggtctggtgttcagcggttgccacacctaggtgatcagatggattgcatatccaaaaaaaagcttc

SEQ ID NO: 129171 - DNA, 210 bp, Zea Mays
cgttgcattgataaggaaagcagcaacaggatatgtcttcagtctgaatggaggagcagaatatatagtgccaagaaataggccaaggcagtatagaaaggtaatgagaagtccaaaattttatagaacaattgaaaaacctgtagctccaaacaatatcaccaacaaccatgctgactgaactgaaggatcacaagcagcaatgggtac

SEQ ID NO: 129172 - DNA, 864 bp, Zea Mays
atggagctctgcgtctctacacccccatcctccgtccgcgccaccgccgcgcccatatccttcgccccgccccgacgtggcgcgtctgcctccaccgccgttccgccccaccgccgcatcccaactcgagtctggcgctgcgccagcgcggccgtgcctggcccggtgccctccgaagagccggcatccgcctcctacgccgtcgtcgtcacggacaagcccgatacgcctgccgacgacaaggccgaggaggttagcgccgcgcctagtggctccgcggaggcgcctatggcagagctggtgccgtcagaggcgtcatcatccccagatgatggcggcctggatgagattctaagcaagttgaacattgaagtgactccgactttaatcctcactggatttggtgcttttattgctttatggatcctatcttctgttgttgctgcagttgattcagtccccctgctcccaaaattgctggaattaataggaactgcttacacaatttggttcatcgcacggtatctccttttcaaggaaagcagagatgaactgtttgcaaagttcgaagatctcaaacagaggattatttgatctatcgtcgaccttttgccacgtgtttaggctttacagccagcttattattaggttttctccctttcgtttgaaatatttctgaatgggtaaagaaggtcatgtatctaaattgtctcctcatggggtctgttaattgttatcagaccccaagttcggctagtgcgcttcttcaggtcaatatggattttttttttactcaatcctatgtgtatactgtcgagtaaagctttaaaaaggtgaatacggttagtatcttacttcttccca

SEQ ID NO: 129173 - DNA, 159 bp, Zea Mays
atggggaacggttgcttttaccttgaggtagatatcaatggcgcgatagaggccgtcgtcgatcgcccgggcgtagtctgggacgagcgcggcgatggtttggaacttggagggcttgaggttggcgtccgtcccgacctccgcgagggatgttcctaa

SEQ ID NO: 129174 - DNA, 109 bp, Zea Mays
aactatttacatatactgagagattactacgtcaacaatagatttattctatttacaataaccttctcttgcataacgcagaaaatatggtaaacaattcctatttaat

SEQ ID NO: 129175 - DNA, 4275 bp, Zea Mays
ccactccccgtacactccatcgcgctcgacgctcccgtcgctgtcggccaccgcgctgcgctgcgctgctcgcagagttcgtcccgacgctcgtccgaagaaattcaaatccggggcgctcgcgtcactcccagcgacaaatccgcgcgtagattcggctcccaattggaacccgcatgcgctggccatgttcacggaggggctagatcgcgacgccctcaagtgggtgcgagagggccagggagcggcggcgctgcatagccacgaccggatggacgcgctgcgtgccgtgcgcggagcggccggccgcggcgggcttggcatgccgacgccggagaagtttcggagcggccacatgccgcgcggcgcgacggtgccgctgtcacgctcctcgctgcgcagcgacgacggcaccgccgcctcgggatccgacatggacgagtcgtcggacaacgatgagatcgaggtctgcagcggcaggtactcggtcgactcgtcaccccgccgcgacgacgtgacccgacgaacggccgttcccctctaccgctacgccaccatgcctgggcagcagagctactactccactgatgatggctactcggacttgagctcttcgcgtgacacggcactgccaagagctaaggcacagccgttgggacggccgcaggcacgggtcgttgagtatgctgatgaggagtactccgtatctccaggcacctccgaattttctagccaggtggaagggcagagcaatggtgtgacctccaagggtgggtatgtatcagagtactcccatactggtccagcccgaagagaagcaaacaatttgggtcctaagaatcgtgcagcagctccagcgaggatgcgataccaacatgacagccattctgctcatgtccccgctcgagaggatgtgaaatcaacacgtaaattgaatgggtcatctggtgatattcctagtgcgccgccaataaatgattatgaccaggaccatcagccagtaactcatgatgatactcggtcttgtgataattcaaatttcaccaatggcttatctgccaaaaaagatcaccgggaagtcaatggaggagtaaacttagctgacaaaaatgacaggagcactttgaatgcaggaccaacaagcaagccatctagttcgattcctattcgagtcccaacctttcatgccagtctgcaggggccctggtattctgtacttgcttatgatgcttgcgtccgcctttgccttcatgcatgggctagaggctgtatggaagctcccgtttttctcgaaaatgaatgcacactcttgagaaatacattcagcttgcaaaatgtcttgttacaatcggaagaggagcttatgtcgaagcgtgcgtcagagctagttagtgaaggggctgcatcaaagcccaagaaaacaataggcaagatgaaggttcaagttcgcaaagttcggatgtctgtagatatgccttctggttgcaacttatcatcactgccaatggtgaaattggattctgtccggtaccgtttgtccaatgtacaatccacactttcatcaggatgggagtctgtacggagagttcgagttctaccacagcttcctgctaacagttcgttctcaaagcacagcttagcatacatgcaagcaagtgctcagtatatcaagcaggtgtctggcctattaaaggtcggtgtaactactctgcggagcagttcagcctatgaagcaccacaagaaacatactcctgccagttgaggcttaaaagttcacctgaagatgatgtggtacctatgcagccaggatctggtgaaacacatgtcttctttcctgatagcctcggagatgatttgatcatcgatgtgtctgattcaaagggaaagtcttgtggtcgtgttgttgcccaagttgctacaatggctgaggatcatgctgacaagctacgctggtggtcaatcttccgagaaccggagcatgaacttgtgggtcgtatacagctatatatccactatacaactgctgctgatgagaacaatatgaagtatggttctgttgcagaaactgtagcatatgatattgttttggaagttgcaatgaaagcacaacgcattcaacaaaggaaccttgttgtgcatggctcctggaagtggttattgacagaatttgcattgtattatggggtttcagatgcctacacgaggttgaggtacctgtcttatatcatggatgttgcaactcctaccgctgattggctcaatctggttcacgggcttttgttacctatactgatgaaaagcgatggtactgctactttgagccaccaagagaaccgaatactgggggaagttgaagagcaaattgagcaaactctagctatggtttgtgagaattacaagtcgctagatgactctataccgttgggtttggcggaagattttaggcctccaactggattggctgctgctgctctggaaccagctattaagttgtacagtcttctacacgacgtcctatctccggaagctcaactaagattgtgtggttacttccaggcagctgccaggaagcgtacgaggcgttacatgattgaaactgatgagtatgtatcaggaaattcagaaggcttcagggtagacttggtaaccgttaccacggcttaccagaagatgaaatcattatgcaacaatctacgaagtgaaatttttactgatattgaaatccataatcagcacatacttcccagttttgttgatctgccaaatttagctgcctccatctatagtgtagagctgtcaaatcgtctacgcgcttttcttgttgcttgccctcctgctggtccagcatcacctgttgctgatttggtggttgccacagctgattttcagaaggatctggctagctggaatatctgcaatataaaagcaggtgttgatgcaaaagagctgttccatttgtacattgtattgtggattgaagacaaacgcaggatgttactggaaaactgcagactggacaaggtcaaatggtcaggagttaggacccagcatatgacaacaccttttgtggatgagatgtatgatttgctgaagaagacattgacagagtatgaagttatcatttgtcgatggccagaatacatatttgttctcgagaatgctattgcagatgttgagaaagcggttatcgagtctctggaaaaacagtatgcagatgttttggctccactgaaggattgtattgcaccaaaaaaatttggcctcaaagttgtccagaaactcacaaagcgcaattcaacggtgccctacactgtacctgaagatcttggcattctcttgaatacattgaaaagattacttgaggttttgcgacctcggattgagagtcacttgaaatcatggagttcttgtatacctaatggaggaaattctgcggccattggagaaaaacttagtgaagttacagtgacattgagagctaaattccgaaattacatgcaagcagttgttgagaagctttcggagaatacccgtatgcaaaataccacaaagctcaaaaagatcattcaggattcaaaagagttggttattgaatctgatatccgcagcaggatgcaggccttgaaggatcagctaattgaggcaataaatcatgtgcacaaagtatctgaagtacatgtttttttagccatatgccgaggtttttgggaccggatgggacaggatgtgctgagtttcctggagaatcgcaaagaaaacaaagcctggtataaaggtgcacgagtcgcaatctcagtattggatgatacttttgcatcccagctgcaacagctgctaggtaatacagtcccaccgaaggacctagagccacccagatctatcgtggaagttcgttctattctctgcaaagatgcaccccgccagaagaattctagtttctattattgatgatcaggcttaactgtacatagtagtcatgcgctgcgcgtgcagcttttctcttggagagaaaagctccaaagtgcccaaatagccggatctttataaagaaactagaggaggctcaatggtatctgagaagcttgccttgtgttacaccatatctttttgctagttaaattggctatgttcccattgcctgtggatgtggactacattcggaaagtggattgtgcttcagagtgtagtccaattgacattgtaggttagcttcattggtaacacttacctgtggttaagcagttgctctatttgttcttagggatttttttgaa

SEQ ID NO: 129176 - DNA, 222 bp, Zea Mays
atgtactcaagggatagtgcgagcctggcctacggtgttggcttaattgcctacggtgaagattgcaagcagaagttgaaggctccagatttagagttgcatcttcggaaaggcaggagaacaagtgaagacttacgctctgagagcgctactgactattttgctatccataatcgttgttgttggtctgcacctattgtggaaagaactgcaaaagcttga

SEQ ID NO: 129177 - DNA, 1640 bp, Zea Mays
gccctcgtctactgcctgcgcctggctgggccccgccgcggccgttccgtgtgacgaggggagcataaacaatgactgggccggccggccccgtagccattcccccaacttccgcttccgctctcacagtttttatgctttgtttattcgcggggatcatgtgggtaatcgcgtgggtcgtgcgcccgtgcctggctgggtttatttacgccgacctgccaataggagcaaatcccctggccctctccttggcttttcctctcgctctcctcctctctcgcatcccaccgcatcacaaccacgacttcctcccgccgccggttggcttcgctgctcgtccacctccgcccggcccgtgggacgagtggggactggagagggtcgcctctgggcttcgcctctcggcggccgagtgtctgcgtcgtccacggagctgagagcctgagactgagactgagagcgaccggcggcggggatggcgagggagaggcgggagataaagaggatagagagcgcggcagcgaggcaggtcacgttctccaagcgccgccgcggcctcttcaagaaggcccaggagctctccgtgctgtgcgatgccgacgtcgcgctcatagtcttctcctccacggggaagctctcccagttcgccagctccagtatgaatgagataattgacaagtacaacacgcattctaaaaacctggggaaaacagaacagccttcgctggacttgaacttagagcatagcaaatatgcaaatttgaatgagcaacttgcggaagcaagccttcgactcaggcagatgagaggtgaagagcttgagggattgaatgttgaagaactccagcaattggagaagaacctggaatctggtctgcatagggtgcttcaaacaaaggatcaacaattcttggaacagatcaatgacctcgaacgtaagagtacgcagctggcagaggagaacatgcaactgaggaatcaagtatcccagatacccccagctggcaagcaagcagttgctgatactgaaaatgttattgctgaagaagggcaatcctctgaatcagtgatgactgcgttgcactctgggagttcacaggataatgatgatggttcggatgtatctctaaagttagggctgccttgcgttgcatggaagtaaacaggaaatgaggctccttgtcgattctgggtgtggatgtgggtggagctgcggcctcagcggataggcacttgtgtatggttttatggacgaccggcccccgactacgtactgcaataatcttgcattggaagcgagatcggttaacctgatttgtcatccttgtggcttcatgatgcgatgttccgcttgtaccgtttgctagcatgttaactgaatttttagaatcgcatatactttttgttcttatatatcactgtcgtactgctcgtaagatgtatctactttattctatccaatgttgtaacctatcacctgccaacttccctactgttttggcgcgccgcaagctgtgctcaagcatgcttcatgttatattcggaagttgtggtctgctctctgcatacatcctgaatgggcaccgttcaattttcagcaccgcatctttctctgaactttattctgagaaaaaataaca

SEQ ID NO: 129178 - DNA, 1004 bp, Zea Mays
gcggacggagagcccaggaactgaaagcctaatcgcaatcccactcgcagcaacgacctacgccgcccctaactccaatccagaaccccagagtccagaggcagaccggcaagctggacacctgcggcatggagcgggtggcgctgctccgcacctcaggccgccgcctcctacaccgctgccgcaggggcaggcccgtcgtcgtgcccgctgccgcggcctcatccttggcacgccgggcgtcctcgttctcactcccggcgcgcggctactcggctctgccccgcggcggcgcgcgattcctggtcgctgcggcgccgctgcactgctccggccggtactggccggccgctgcgccccagctcgcgcggaggctgtccgcctccgctgtatctacctcgccctctcccgtgccctatgatacagatgacgtacatgagtatgccacaaagctcggatttgaaaaggtctctgaacagactatagatgagtgcaaatcaattgctgttctttacaagcacaagaagacgggtgctgaagtaatgtctgtgtcaaatgatgatgagaataaagtttttggcattgttttccgtacccctccgaaaaattcaactggcataccccacatccttgaacatagtgttctctgcggatcaagaaaatatcctttaaaagaaccgtttgtggagctcctaaagggtagtttgcatacattcctgaatgcgttcacatatcccgatcggacatgttatccggttgcatcaacaaacactaaggatttctacaacttggtagatgtatatcttgatgccgtctttttccctaaatgtgttgacgacttccaaacatttcaacaagaaggttggcactatgagcttgacaaccctgaagaagagataacatacaaaggtgtcgtcttcaatgagatgaaaggagtttactctcaacctgataacataatgggacgtgtatcccaacagctgaaatcaggtccagacctatag

SEQ ID NO: 129179 - DNA, 2042 bp, Zea Mays
gatatgtgatatggacccattggaacgtctgaagtgtgaacaagcactacaacaattgaaagcacgattgcagaggagggatctatatctgtgttctcacggtacattgaaaaatttattttgaagtattaccattagtcccagttgaaattgcaacatgatccagttaaagaatcacgtgatgaagcagctgaaaaagatatcctaaaacaactcaaatctaccatgactcaggaggatcttgcagagttggcacgttctacgtgggagctaaaggaaaaacaagaaacaccagatcctccagaagctctcaaggctgtccctagtctgtcattgcaagatatcccaaaaaagcctattcatgtaccggttgaggttggagagataaacggtgtcaaggttttgcaacatgatctcttcaccaatgatgtcatctactctgaggttgtatttgatatgggttcgatgaaaaaagaacatttgcaattgttgccattgttctgccaatccttactggagatgggcacaaaagatatggactttgtgcaacttaatcaattaattggtagaaaaactggaggcatatcagtatacccattcacatcatcagttaggggaaaagaagatcctctcactcgcataatcgttcggggaaaggcaatggcgccacgagtagaagatttgtttaatctgatgtacatcattcttcaagatgttcaattcacagaacagcagagattcaagcagtttgtttctcagagtaaagcaagaatggagaatcgattgaggggcagtggccatggcatagcggcagctagaatggatgctaagttaaatgcagctggatggatttcggaacaaatgggtggtgttagttatcttgagtatctgcgggacctggaaactaagattgatcaagattgggacagcatatcatcttcactcgaggaaatgagaaaatcactcttttccaagaatggttgcttgatcaaccttactagtgacgggaaaaatcttgaaaaatcaaggcaacatattgccaaatttcttgattcactcccaagtagcccatccattggaagtgatccatggctttctcgtctaccttctgtgaatgaagccattgttgtcccaactcaggttaattatgttggaaaagctggaaacctttaccaaagtggataccagctcaatggaagcgcctatgtcatctcaaagcacataagcaatacatggttatgggatcgtgttcgagttagcggtggtgcatatggaggattttgtgattttgacacccattcaggagtgttctcatatttatcatatcgtgatccaaacttactgaaaacactagaggtctatgatgagacagcaagattcctcagagagctagaattggatgatgatgcactcacaaaagctattattggaaccataggcgatgttgacgcctaccagctaccagatgctaaaggttacagcagcctaatgagatatttgctgggcatcacggatgaggaacgccaacaaagacgtgaagagatactagcaacaagcccgaaggatttcaaggagttcgctgatgctgttgaaaccatcaaggacaatggggtcgtggttgccgttgcctcgatagatgatgttgaagctgcgaataaggaaaacccgctattccctgaagtaaagaagtgtctgtgaggtccaccaccacttgataaggattctagtcgggaggtgtttttttaccagtgaatgcggagtgtgacaatatacgtaacatattgcaagagcaccatctctccgaccacggttatagctagccgaatcttggcttctcttccatgcgattttaaatttggcagtcaataattagttcagatgtagacatagatgcatgctggtagatggctagcgtcttcccatgttggctcaaacgtcggatgtacacaatgattcataaaaaatagaaacggatggtgagatttctacaatatgttcagggtttccatatcgaatacaccctgtgcgaggatagcaaactg

SEQ ID NO: 129180 - DNA, 1718 bp, Zea Mays
actattttgtatgtagactacaaattgacggtaaatgataaacacatgtaggttggagagataaacggtgtcaaggttttgcaacatgatctcttcaccaatgatgtcatctactctgaggttgtatttgatatgggttcgatgaaaaaagaacatttgcaattgttgccattgttctgccaatccttactggagatgggcacaaaagatatggactttgtgcaacttaatcaattaattggtagaaaaactggaggcatatcagtatacccattcacatcatcagttaggggaaaagaagatcctctcactcgcataatcgttcggggaaaggcaatggcgccacgagtagaagatttgtttaatctgatgtacatcattcttcaagatgttcaattcacagaacagcagagattcaagcagtttgtttctcagagtaaagcaagaatggagaatcgattgaggggcagtggccatggcatagcggcagctagaatggatgctaagttaaatgcagctggatggatttcggaacaaatgggtggtgttagttatcttgagtatctgcgggacctggaaactaagattgatcaagattgggacagcatatcatcttcactcgaggaaatgagaaaatcactcttttccaagaatggttgcttgatcaaccttactagtgacgggaaaaatcttgaaaaatcaaggcaacatattgccaaatttcttgattcactcccaagtagcccatccattggaagtgatccatggctttctcgtctaccttctgtgaatgaagccattgttgtcccaactcaggttaattatgttggaaaagctggaaacctttaccaaagtggataccagctcaatggaagcgcctatgtcatctcaaagcacataagcaatacatggttatgggatcgtgttcgagttagcggtggtgcatatggaggattttgtgattttgacacccattcaggagtgttctcatatttatcatatcgtgatccaaacttactgaaaacactagaggtctatgatgagacagcaagattcctcagagagctagaattggatgatgatgcactcacaaaagctattattggaaccataggcgatgttgacgcctaccagctaccagatgctaaaggttacagcagcctaatgagatatttgctgggcatcacggatgaggaacgccaacaaagacgtgaagagatactagcaacaagcccgaaggatttcaaggagttcgctgatgctgttgaaaccatcaaggacaatggggtcgtggttgccgttgcctcgatagatgatgttgaagctgcgaataaggaaaacccgctattccctgaagtaaagaagtgtctgtgaggtccaccaccacttgataaggattctagtcgggaggtgtttttttaccagtgaatgcggagtgtgacaatatacgtaacatattgcaagagcaccatctctccgaccacggttatagctagccgaatcttggcttctcttccatgcgattttaaatttggcagtcaataattagttcagatgtagacatagatgcatgctggtagatggctagcgtcttcccatgttggctcaaacgtcggatgtacacaatgattcataaaaaatagaaacggatggtgagatttctacaatatgttcagggtttccatatcgaatacaccctgtgcgaggatagcaaactg

SEQ ID NO: 129181 - DNA, 1302 bp, Zea Mays
tgttatggattttgctttcagtgcttttagaacccatttgtaagaagtgcagttatctttcgcagaagtagccataattcttatcaacatgctgccgtgtgagatattcatttatttatatgttgctgttggcagttatcttgagtatctgcgggacctggaaactaagattgatcaagattgggacagcatatcatcttcactcgaggaaatgagaaaatcactcttttccaagaatggttgcttgatcaaccttactagtgacgggaaaaatcttgaaaaatcaaggcaacatattgccaaatttcttgattcactcccaagtagcccatccattggaagtgatccatggctttctcgtctaccttctgtgaatgaagccattgttgtcccaactcaggttaattatgttggaaaagctggaaacctttaccaaagtggataccagctcaatggaagcgcctatgtcatctcaaagcacataagcaatacatggttatgggatcgtgttcgagttagcggtggtgcatatggaggattttgtgattttgacacccattcaggagtgttctcatatttatcatatcgtgatccaaacttactgaaaacactagaggtctatgatgagacagcaagattcctcagagagctagaattggatgatgatgcactcacaaaagctattattggaaccataggcgatgttgacgcctaccagctaccagatgctaaaggttacagcagcctaatgagatatttgctgggcatcacggatgaggaacgccaacaaagacgtgaagagatactagcaacaagcccgaaggatttcaaggagttcgctgatgctgttgaaaccatcaaggacaatggggtcgtggttgccgttgcctcgatagatgatgttgaagctgcgaataaggaaaacccgctattccctgaagtaaagaagtgtctgtgaggtccaccaccacttgataaggattctagtcgggaggtgtttttttaccagtgaatgcggagtgtgacaatatacgtaacatattgcaagagcaccatctctccgaccacggttatagctagccgaatcttggcttctcttccatgcgattttaaatttggcagtcaataattagttcagatgtagacatagatgcatgctggtagatggctagcgtcttcccatgttggctcaaacgtcggatgtacacaatgattcataaaaaatagaaacggatggtgagatttctacaatatgttcagggtttccatatcgaatacaccctgtgcgaggatagcaaactg

SEQ ID NO: 129182 - DNA, 2074 bp, Zea Mays
ctgagacgaggactcctttcccttctgtcatctgagactcggaagcctcggccgccgccgttaccacctccttgcgccatggcggagaagtcgccggcagccgacgtggaagccggtctccttgcccacctcaactcagcgggagaggtccccgactcacgctctttcgcttcctccctcggcgtctcccacctcgaacttgagggcgtcatcaagagcctctcagctttccgcatcgtcgacagcacagacatcatcaaggagacatgggtgctcaccgaggaggccaagggctacgccgccaagggctcccccgaggcacagctcgtcgccgcaatttcaccggagggtgcctctaaggacgcactcaaggcaatattgggagatgctttcgatgttggcatgaaggcagccgcgaggaacaagtggataggtttcgagaaggggaataaggacttagtccttaggaaggttgagagcgtaaaggatgagctgcaagagcagcttagaagactagagaatggggaggttgtttctgataaagtgatcgatgatttgaagagaaggaaacttattacgaaagagaaatcaatttggtactctctaaagaaggggtctgagtttgttgtaaagagaaaaacgttggctactgatgtgacaacagaacaccttaggagtggtgactggaaggaccttgaattcaaagactataattatggagctcaaggtcaacctatagccaaaggttatgttcagcctttgatggaggttcgtgaggcaatcgagaacatctttattatgatgggattcactgagatgccaaccaacaatttcgtcgaaagcagcttctggaatttcgatgcactgtttcagcctcaacagcatcctgctcgggattcacatgatacatttttcctgaaagctccagcaactacaaaacagttgcctgacgactatcttgagaaagtaaagcaagttcatcagtctggcggttatggctccaaaggatatggttatgattggaaacgggatgaagcggagaagaatcttctccgtactcatacaactgctgtttccacgagaatgttatacaagcttgctcaggagaaaccttttactccaaagaggtattactccattgatcgtgttttccgcaatgaagctgttgaccggactcatcttgctgaattccaccagatagagggacttatctgtgattatggtttgacacttggtgatctgattggtgtattggaggatttcttctcaagtctaggcatgtccaagctgcgtttcaagcctgcctacaatccatatactgaacccagcatggaaattttcagttaccatgatggtttgaagaaatgggtggaagttggtaattcaggcatgttcaggccagagatgttgcttcccatgggactgccagaaggtgttaatgttattgcatggggtctttcacttgaaaggccaacgatgatcctttatggtatcgacaacataagggacctgtttggaccaaaggttgatttcaacctcatcaagagcaacccactatgccgattgggactgtagtgactagtgaggtacagggactctgaagcttgatcacaatgtgccaaagaatttgttttccttttttgttgtgctcccttgaagtttgaacaccgattcatgtatctctggttatggctcaagaaaaccgctcatgatcagccatgttcaggtcctgaaatccctactaattctaaagctctggctaagctatggaatcagggggtcagcaatgacttttctactttattttggtgtgacaagtttttgggttgctgaatcaaaggatttgggggcaccaatggtgcttgctgctgtcccaatgaggcaaacaaagcgcagaacagtggcagaagcgatgcaaaatcaaagcttggacgaccatggacatacacggagggaggcctctcaatgatggttcgaatatttccagctctagaatgttgtacaagaggtcatcctgtgaaccgcccaagagacgtctaaatgacatctagtaatggtctatcgaaatggagat

SEQ ID NO: 129183 - DNA, 1607 bp, Zea Mays
ctggggctttattgttaaacttgactggaggtttttgcttttgcggggtactgatgtgtagatttggtgtgcttaggcaatattgggagatgctttcgatgttggcatgaaggcagccgcgaggaacaagtggataggtttcgagaaggggaataaggacttagtccttaggaaggttgagagcgtaaaggatgagctgcaagagcagcttagaagactagagaatggggaggttgtttctgataaagtgatcgatgatttgaagagaaggaaacttattacgaaagagaaatcaatttggtactctctaaagaaggggtctgagtttgttgtaaagagaaaaacgttggctactgatgtgacaacagaacaccttaggagtggtgactggaaggaccttgaattcaaagactataattatggagctcaaggtcaacctatagccaaaggttatgttcagcctttgatggaggttcgtgaggcaatcgagaacatctttattatgatgggattcactgagatgccaaccaacaatttcgtcgaaagcagcttctggaatttcgatgcactgtttcagcctcaacagcatcctgctcgggattcacatgatacatttttcctgaaagctccagcaactacaaaacagttgcctgacgactatcttgagaaagtaaagcaagttcatcagtctggcggttatggctccaaaggatatggttatgattggaaacgggatgaagcggagaagaatcttctccgtactcatacaactgctgtttccacgagaatgttatacaagcttgctcaggagaaaccttttactccaaagaggtattactccattgatcgtgttttccgcaatgaagctgttgaccggactcatcttgctgaattccaccagatagagggacttatctgtgattatggtttgacacttggtgatctgattggtgtattggaggatttcttctcaagtctaggcatgtccaagctgcgtttcaagcctgcctacaatccatatactgaacccagcatggaaattttcagttaccatgatggtttgaagaaatgggtggaagttggtaattcaggcatgttcaggccagagatgttgcttcccatgggactgccagaaggtgttaatgttattgcatggggtctttcacttgaaaggccaacgatgatcctttatggtatcgacaacataagggacctgtttggaccaaaggttgatttcaacctcatcaagagcaacccactatgccgattgggactgtagtgactagtgaggtcctgaaatccctactaattctaaagctctggctaagctatggaatcagggggtcagcaatgacttttctactttattttggtgtgacaagtttttgggttgctgaatcaaaggatttgggggcaccaatggtgcttgctgctgtcccaatgaggcaaacaaagcgcagaacagtggcagaagcgatgcaaaatcaaagcttggacgaccatggacatacacggagggaggcctctcaatgatggttcgaatatttccagctctagaatgttgtacaagaggtcatcctgtgaaccgcccaagagacgtctaaatg

SEQ ID NO: 129184 - DNA, 1277 bp, Zea Mays
gtgtgtctgtgtgattgtgatagaatccaaagacgcaagcggctgaaggcagcagcgccgcgcaggcgttgtggccttgtgggagaggaaaaagagaaagaggaaccggcctagacaagcaagcgagagggcagggccgcggcgttgcgtcagatggggaagtacatgcgcaagtgcaggggggccgcaggcgcggaggtcgccgccgtcgaggttacgcaggtcgtcggcgtccgcacgaggtccaggtccgcggcggcgaccggcggtgtcgcgaaggtcgtcgccccgaggaggaagagggcgccggcgggggagcctgctgcctccgtgggcgctggtggggacggcggaagctgctacatccacctgcgtagccgcatgctgttcatggcaccgcctcagccgcagccgccgtcggttccgaccccggcggaggctgctgatggcgctgcaggacagcagggcgcggcgctcgcggccgggctctcgcgttgctccagcacggcgtcgtcggtgcacgtggggggtcagcgcgggagccacacctgccgctccgacgacgctgcagaggctggcggggatcacgtcctggtggatgtctcggcggcgagcaactccgggagcggcccagaccgcgagaggcgagagacgacgccatcgagccgggcgcacggcgagctcagcgatctggagtcggatctggcggggcacaagactggcccgtcgctaccggcggcaacgccggctgcggagctgatcgtgccgccagcacacgagatccaggagttcttcgccgccgccgaggcggcccaggccaagcgctttgcttccaagtacaacttcgacttcgtccgtggcgtgcccctcgacgccggcggccggttcgagtgggcgccggtggtcagcatctgaagcgagcgtgcgtccggtgcaaggtgaagctagaaagagaaaagatgccccccccaacaaacataacggagaagagaaaaaccaaacaattaagcagctttatatagcctaagctaaccaccaccattcatctcgtccaaatgccttgcttttctctggagctagcaggagcgtagttattatttagtactactttacttattcagaggttatcttgaccccgatagatcaatccgcttactgtgtaatttgtctcatgcatcttagatggagtttaatcgtcttaatttattactgtacagcagcttgctggcttgcaaagaaagatctggtttgtctctaatccgagtcacgtttagcta

SEQ ID NO: 129185 - DNA, 144 bp, Zea Mays
accaacaacaacaacaacaacaacaacaacaataataataataataataataataataataataataataataataataataataataataataataataataataataataataataataataataatggataggacactaac

SEQ ID NO: 129186 - DNA, 700 bp, Zea Mays
gacctgattggacgctgccatgtcgtcggcgacgcccttcttgccgctaccaaccttcttggcgggagcgccgttgccgccgccgccgccgacgccgacgcagagcgccttccgcaggccgagcatctccttccaccggccggaccccttgcttccggcggcggaggccctctcgtcgtcgtcgctggcgccgccgccgccgccgccgccgccacagagctcgtcgcgcagcgtggtggttggccgcgcggcggcgaagcagccgccgttgtccctgaggggaaggatcctgcccttggagaagagctggtcggccgccatcatggggtggctgcccacggagaactcgaagttgacgtcctcctcctggcaccgcaggctcatcgctcggttctgcaccggcggcggctccacggcgaagtcgctggagaaggagacgcgcgggcccagcgcggccggcggctgcggcccgccgccgaacccgggcgcgccgtcagggttgtacatgttgatgcacgccatcgcgcggtgctgtgctgctctggatgtgggccgtgggcgcgtgcttcactgacctccttgcgcgcttccgctcctgcctccctctcgtgtgctgtcgccctcgtcttccgccgtgagctgaacagaggcaaggcgagctgtgcttcgcgtgcagcagcgcacgatgttgtggtggtgg

SEQ ID NO: 129187 - DNA, 1180 bp, Zea Mays
tttttatattcttctacaaatctttgcatcctcctctactgcctgcagcacgagcttcatatgggagcatttaaagttggtaacataaccaatgagaatttctttgaaatcatcaatggtctacggccagcaaacactgcaggttgcagttcatcaaccgatgcacctaacatcccacatggagtgatggtcggttcctgttggcggctatcagatattcagatagtgtatgtgacacctgttttgcttccggtagaagctacggcagacccacttgataaacttgagaggaaaagggtcatagtttattcaacaaagttacctggtccgatttctctattccatagatgcagaatgatgggtgcatacgagactgatgatcctaaaaaaggggacagcctgtgtatgtattctgaaggcagggacgaaccacatggtgaggagatgttagagcagatcactgatagtagcctttaccaacacatgggatccacatgtcagaatggaggatgtgtgagagagaaaaaagatgacagttgctgtggtcccctttatttgaggggagatgggaggttttttggtgacaaaaaagaaaaaaagagcaatctgggaactgctggagcgtctccaccaatatataacagttttatgagcatgaaggatgatattgccgaggtgctcttggaattcaaggaatatgccacagaggttaatgttgattctgtgcggaaagctgttcgtgcggtttggagatgtgcaattaaattggagagagctgctaaaaggtgcatcagcgttttgctcgagctgattaagataaaagttaattatgttgttcaggaagctataattgttatcaaagacatcttcagacgctaccctaacacgtatgagtctatcattgctacgctttgtgaaagtcgctttgtgaaagtctggacactttagatgaaccagaggctaaggcatccatgatttggataattggagaatatgctgaaagaattgacaatggctaaggattgtattatggtcacacatttttgtttttttagattggatattccagcagtagttaatggataagttaaagatgtcatctggcgtcagtttcctgtcttttgtccatagagttcagtttacaaacacagtagtgattttacctacaattgatgcattc

SEQ ID NO: 129188 - DNA, 2043 bp, Zea Mays
gagctgagctcatggtgatggggaggccaagcaacagccacgggggcgggggcgacgaggagcggctgcccctccgcggcgtgctggagacgtccccgtcccatcacgccgcggtgcaggccaaggacaaggaggcgaggcgcgggggcagcaggctctggcgcgcgtccgtgcgcgcggggctgctgctctgcctgctgaccgtcccggccgtcctgctgctgctgtggtggcaggccgactcctcgccgcagtgggtcttcgacttcgagccacccgaggaagacgacgaccaagatatacaagacgacatgtcagacgatctatctccgtcgccgcaaatagagtacgatcgtcttctgggcggccttctcgtcgagggttttgacgacaaatcatgcagaagcaggtaccgtttcgcacgctaccacagttcaccgagcataccttctccgtacctcatagagaggctaaggaaacaagaagctctgcagaagaagtgcggcccaggcaccagagcatacagggaagcttcgaagcagctgaaatccggtcagagcatgagcatcaacgccacagacgactgcaactacctgttccttatcatccacgccggcttagggaaccggatgctcgagatcacttcggcgttcctctacgcgctgctcacgaaccggatcttgctcctggaccgttacaaggagatcgcggatcttttctgcgagccctttcctggaacgtcgtggctggttccttcggacttccctctgaacgacgacgagttcggccagagcagcgctgagagctacggcaacatgctgcagaacaaggctttcggtggtggtacggaccgatctttggttggcaacagactccctccctatgtgtacctccacctggacggcaactatggtttccacgacaaactcttcttctgcgaggacgaccagcagttcctgcgaggtgttccgtggctggtcatgaggacggacatgtacttcgtgccgtccctgttcctcgttccagctttccaggacgagctcggcaggctgtttcctgagaaagacaccgtcttccatcacttggcgcgctatcttttccatccgacaaatggcgtctggtattcggttacaagatgcttcaggtcctacctggccaaagcggaaaaaagggtgggaattcagatcaggatatatgaaaccaaaggtatcttgcagagaaacggcccgttcccacacattctgaaccagatcctctcgtgtgctcaaaacgagaagctgcttccagaaatcagtatggcagagggagcagccgatgggactcggaataaccgaacagcagccgggagtgggactcggaacaaccggacgatcgctgttctaacgacttctctgagcgcttggtacagcgagcagatccaggagaagtacgacgagcagtcggctgttgatggcgtgtctgtcagagtgttccagccgagccacgaggagtaccagaggtcgaggaacaaggggcacaacatgaaggcgcttgctgagatctacctattgagcatgaccgacgtgctgatcaccagtggcttttccacgttcgggtacgctgctcaggggctcgccggcctgaagccgtggatcatgcttaagtcggagaaccacgtgacgccagacccaccgtgcgtccgcgccatgtccatcgagccgtgcttccatcaagctcccttctacgactgcaaggcgaggaaggacaccgatttgggcaaggtagtgccttacgtgaggcactgcgaggacgtgagctgggggctcaagattgtagatcaaactcatttgtagtgtagctgtaatctggtcaggactcacggcagacttgcttgctaactagggcagaactattgttattcttattcttaatctgcgaaacacaaaggaaccatacaaaatgtattctttccctcctgtatttgatccaagtgtagatagttgatagacagatccattaatctgttcatcctctgatgtcaaaaggaagagaaacatgtttact

SEQ ID NO: 129189 - DNA, 1806 bp, Zea Mays
atggacatcaaggagcggatccgccgctcgccgccgtcgtcgccgcaggctgtgggggaggcggcggcgtccgcgcccggacacccgcgcgggaggaaggcccgggtcgcggtgcttcccctgtcagtcgcctgcggggtcacgctgttgttgctcgcgggcgtctccgccgcgaggaggggtgcccaattctccggcgcggatcctaccactctctccggcaacgacgatcgtggcggctttgaacaggccgggccgcgcgatggagagcatgcaactacggtgtcttccaaagttcaaagggacaaactaattggtggcttgttagctcctggttttgatgaacagtcatgtctaagtagataccaatcagcattgtatcgtaaagagtcgccccatttagtatcaacctaccttttggaaagactgagagaacatgaggttctccagaagaaatgtggcccatatacagactcatacaagaaagctattgagcaactgaattctggtcaggatataatggttggagattgcaactatttggtgtgggtatcttatagtggtcttggtaacaggatcttgactattgcctcagcatttctctatgccatccttacaaacagagttctacttgtagatggagataaaggcactgcagatcttttctgtgaaccattccctgaaacttcatgggtattaccgccggatttccctattactaaatttaagaacttcagtattggctcccctgagagttacggaaacatggcgaaaactgaagctattcattctgatggttcttttaagggtcctaaacctgcctttctatatcttcacctggctcatgactatgatgatcatgataagctttttttctgtgaacatagtcagcaacatctccagaagatcccatggctgatcttaagatccgataattactttgtaccttcgctttttctgatctcatcataccaagaggagctcacgaggctgtttccgcagaaagatgttgtcttccatcacttgggacgttacttgttccaccctaccaatgctgtgtggggcttgattacaaggtactatgattcttatcttgccagagctgacgagaagttaggtatccagatcagagtcttcgatactgaaaccggtccatttcagcatgtcttggatcaggtccttcattgcacactgaaggaaaaattactaccagagatcaacgcgcaacagccaattatctcgacagggaacatcaagtctaaagttgttctgattacttctttgaactcaggatactacgaaaggatcaggaacatgtactgggaacatccgactgagaatggtgagatgattagcttccatcagccaagccacgaggagcaccaggattcagacaagacaatgcataacatgaaagcatgggcagagatttatctgctgagcttatctgatgctatggtaacaagtgcatggtcaacttttggatatgtagctcagggtctgagtggttcgaagacgtggcttctgttcaagcctgaaaatcgcactgcgcctaatccaccttgccgtcaggtcatgtctatagaaccgtgctttcatgctccgcctttctatgattgcaaaactaggaagggaactgacacagggaagcttgttccacatgtaagacactgtgaagatatgagctgggggctcaagctagttgatacaggtgagctgtagataaccagatgcggtgttttttttcctttgtataattcatatatgtacagtagaaccgaatgctttgtgctgtggatttttcag

SEQ ID NO: 129190 - DNA, 489 bp, Zea Mays
atgtccgcggcctcgacgaccttgccgtcgcggtccttggtgaggcagcccatgaagccgatgtccgccacctgcacctgggcgcagctgttggggcatccggtccagtgcatgcgcaccggccgcggcacggccacgcgcttctccacctcccgcgccacctgcagcgcccgcgccttggtctcgatgatggcctgcccgcagaactggttgcccgtgcacgccaccaggccccggagcagcagcgacggctgcggcgagaggcgctgccgctgcagcagcggctccgcgagcagcgcgtccagcctccggttgctcacgttggggagcacgacgttctgctccaccgtgagccggagctcgcccgtgccgtactcgtcggcgaggcgcgccagctcgaacatgtccgcggcctgcagccggcccacgggcacgtgcaggcccacgtacgacaggccttcctgcttctgcgggtgcacgccgaggtag

SEQ ID NO: 129191 - DNA, 13430 bp, Zea Mays
gcgaaatggatcataataaaatagattttaggtatctagggaagattcacttggaagtaactatttcctagatacccatgcaggggacttcgcggtggaatgaatcaactcgaaaaatccctaaactaaaaaagacctaaagttaaggatttatcaatgggtaatgttgctccaatacctaaccaaagagctactgcagtaccgattaaaaaaacggtcgtagctactgggcgacgaaatggattttggaatttattgacattctctagaaagggtactgtcaataagcccgttggcacagaaaccattaagagaacgcccaataacttattgggtactgtacggagtatttgaaatacgggaaagaagtaccactcgggtaatatttccaaaggagttgcaaacggatccgccggttcaccaatcattgacggctctagaaccgctaaacctacattacacgcaatagtacctagaattactactggaaaaatgtataaaagatcgttgggccacgcgggttccccataataattatgtcccatccctttagctaattttgctcttaatacaggatcatttaagtcaggtttctttgttattgggataggtgaattctttaggatccatcccccaaaggaaccggacatgagaatttttcatcatccggctcgagcaagaatgaaagaaataagaccgtggaggatccacaatagaataggggtatataatgactcaatgactcaaggtaagaaaaactttatcaaattatcttttccgaagttgcgcctataactactcattgaaaagaatcctattcttatgcttaaatgctcaatatccaagtgggcttacaaatttgatcatgatcaattgctttgtggattgtctcttgattagttgttgtttatcccctcgatatcgcaagtttcttatgtccaaacaaagtatttacttgttactaataaaaaatcaaaaagtttagcctgcgttcttccttagatcccttcttttactccgatagtattgcggatcaaaatcgatgcaaagaaaatgaatgcatttccatactataataaaaagtaagtgtaataaaaattgaattggatcatatcacatgacttattccatttatactctataggatcttacggagcctgttcatggatgacatggttggtggggtatgatcatagaaaatattctcctcgagtgaaccagcctatccttcctagataggggacttacgtgttgattggatgcggagacacctttggtcgtgaattctaatgtggcagatccaattctctatctgcatggccaaattaataattcaagtcacacactcccataatccgccttattttctttcgtaaaattcacttcaactatttgtataaaaatacttcgaagttgaagagaagtatccaaatgacatgtcttattttacaataacccatgtttgtagcaatgaaataccataacctacccgatatgatatatgagaattagaattctctatgctatgccttccctataacggacccgaaataccttgcttacgtaccattggaaagtgcattaacataaatacggcagtaagcagaggtagtataaaggtatgtaaactataaaaacgagtcaaagtggattggcccacactagcacttccacgtaataattccactaaaggggaccctattaccggaatagcttcgggtacacctgtaacaattttgactgcccaataaccaatttgatcccaaggcaaagaataaccagttacaccaaatgatgcagtcaatacagccaaaaccacgcctgtgacccaagttaattcacggggttttttaaatccacctgtgagatacacacgaaatacgtgcaggatcatcattagaaccatcatacttgctgaccatcgatgaaccgatcggattaaccaaccaaagttggcctccgtcattatatattgaacggaggaaaaagcctctgtaacggtcggtcggtagtaaaaagtcatagcaaaaccggtagcgacttgtactagaaaacaagtaagtgtaattccccctaaacaataaaatatgttgacatgaggaggaacatatttactagttatatcatctgcaattgcctgaatctcaagacgttcttcaaaccaatcatatactttattgagataggtaactagcccgactccccctccgagaaccgtatatgaaaatttcatctcgtacggctcaagcagaaatacacaaattttcaacggatattagaaaaaagggttcaaaactccatcagccacggtattggatcgatttgccttgaagatatgaaataagaaaaatccagaatttcttctttgtgataataatgccaaaaaatctcaagttggctcatctgtctttctttcccttatgttgatcattagaggcctcttgacttttctcttccctattttttattgattttattttttgactagtcaaaaaataaaatcaaaatttctagtggttttctgatagaaattatcttgttgcgatcctatgaatcagttcaattaaaaccttagattcatactagagccacgatgattcagtctcaagataaacaaaaggcaagggttcttcgaataagaaccgcttgatgatcatttattgaaagagaaaagagttctcttttgggcaaacaaaattggaaggaagaaaatttctttttttattaagaactacttcatttttttttaagtctggttgcgaggtctaaatagtgagtatgaatcatagttccttttttttgatccactctatgtatttcgtgttccagatactagaataaataatatctgacgaattagaatcatcttgatagagataacatgccccttctatgtattatcaataggatcaattctaacaagtcacacactcatattccagagataccaaaacaaaaaaatccacggtcgaactaccagaatgtctagaaatgtggagcttaaagtagaaaggctttttttggatggaaaaactatgaagtcatagttttagttagtagaaacctaattcgttaaaattccgtccagtaaaacagaagaattataaatttctaaaattatagataggaatatcgcgaataaagccattgcgacccccataaaaggagtagtcccccaacccggagcaactttcccatattccgaattcaagggtttcaataaactagctgcgccagtccgttttggcttaggtctagaactatcttcaacggtttgtgtagccataaattctatttaatcattggtgttgactttgtatactattccgttgtagttgtaaatacacgatcttttcatagatccattgtaatcttgaaattctataaaaatggaaacagcaactttagtcgccatctccatatctggtttacttgtaagctttactgggtatgccttatatacctcgtttgggcaaccctctcaacaattaagagatccattcgaagaacatggggactaattgaagtaagaagtctcccctccgggggacttcttacttcaattaaattatttcatttcttagtcggaaccttaggtggttctcggaagaagatagcgaaaaaaattatccctaaagtcgaaactaaaaggaacgtataaaccaatgcttccatagattcgatcctggtttatttacaattataacttccacacctattcacttatcatttgggatcatttcccatataaaaaaagaaaaagagtcaaagaaaggacaggagatgttcctcatgtcaaatcaaacaaaaaatggaggtgaaagataccatagcaatgtggtatcaggctgcctgtctccttgtagttggatctccaactttttggaatgttccaaattccacttgagcatccaagtctggatcaataccagcaaaaacatctcggaacaaggttcgagcgccatgccaaatgtgtccgaaaaagaagagcaaagcaaaggtagcatgaccaaaagtgaaccaaccccttggactgctgcgaaaaacaccatctgatttcaaagtagctcgatctaattcaaaaatttcccctaattgagcacgccgcgcatatttttttacagtagcaggatcagaataacttactccattaagttcgccaccatagaactccaccgttacgcctacttgttcaacactatatttggattctgctcttctaaaaggaacgtccgctctcacaattccctcttcatctaccaaaacgaccggaaatgtttcaaaaaaagtaggcatacgacgtacaaaaagctcgcgtccttctttatctctaaagacgggatgtcctaaccatccaacagctatgccatccccattgtccattgagcctgctctgaataatcccccctttgccggattattaccaatataatcataaaaggctaatttttcgggaattttagaccaagcttctgataaactaagattttcggctaacccatcgctaactcttcgatatatttcttgctgaaagtatccctgatcccactgataacgagtaggcccaaataattcgattggggtagttgctgatccataccacatagttccggcaactacgaaagcagcaaaaaaaacagcagcgatactactggaaagtacagtttcaatattgcccatacgtaaccctttgtatagacgttgaggcggacggacacttagatggaataggcccgctaatatgcccaaagtacccgcagcaatatgatgcgaagctattcctcccggaacgaaaggatcaaaaccttctgcaccccacgcaggatttacagcttgtacttttccagtgagtccgtaaggatcggacacccatatcccagggccatataaacccgttacatgaaatgcaccaaagccaaaacaagccacccctgcaagaaataaatgaattccaaagatcttgggcaaatccaaagaaggttttcccgtccgctcatcacagaatatttctaggtcccaatatacccaatgccagatagctgccaagaaacacaagccagaaaacacaatatgcgcacctgccacaccttcataactccaaatacccggattcgttacagttactcctgaaatactccaaccaccccacgaattcgttattcctaaacgagtcatgaaggggatgacgaacataccttgtctccacattggatccagaacaggatcagagggatcaaaaaccgctaattcgtataaagccatcgaaccagcccaaccagaaactagagctgtgtgcattatatgcaccgaaagcaatcgacccggatcattcaatacgacagtatgaacacgataccaaggcaaacacatggaaatacccctttagcaaagaaaaatagacacgatgtcgctttattttatcgcattggaaaagactatccatacttattctatgtacctaacccttctaggggattctatgtcagaaagcgtgaatatttatttcattccattaaaaataacaagccaattctgtttgtaagaagaaagagaagcagatctattctatactcgataagtgccaatatgcaatgggtagcttgggctatttggaaaaacgaagaatagatccttcatccctctttgtttatcattcaaatcacggattcttttttctttattcaatctgttttaccttccttatatgtagaatatttcaatctatgtattaatagaatctatagtattcttatagaataagaaaaaaaaatgaagataataaactgcggattctttctttctcttccattcttacgtttccatattaaagtgtagtttttttacttaaatttaataatattaatctaatatgcccattggtgttccaaaagtaccttaccggattcccggagatgaagaagcgacttgggttgacttatacaatgttatgtatcgagaaaggacactttttttaggtcaagagattcgttgcgagatcacaaatcatattacaggtctgatggtatatctcagtatagaagatggaaatagcgatatttttttgtttataaactcccctggcgggtggctaatctcaggaatggcgatttttgatacgatgcaaacggtgacacctgatatatatacaatatgcctcggaatagccgcgtccatggcctccttcattctgcttggaggagaacccaccaagcgtatagcattccctcacgctaggattatgcttcaccaacctgctagtgcttattatcgggcaaggacaccagaatttttactagaagtggaagagttacacaaagttcgcgaaatgatcacaagggtttatgcactaagaacaggcaagcctttttgggttgtatccgaagacatggaaagggatgtttttatgtcagcagacgaagccaaagcttatggacttgtcgatattgtaggggatgaaatgattgacgagcactgcgatactgatccagtgtggtttctagaaatgtttaaggattggtagtgggtggatttcttgtaaatttatttcaaacctaaattcgggttttatgctatagaaaatagaaatacttcatgatgatgaatcatcaggttaagatcgatctaaaccaatccattttatatatacatacgacatgccaacggttaaacaacttattagaaatgcaagacaaccaatacgaaatgctagaaaatcggccgcgcttaagggatgtcctcagcgtcgaggaacatgtgctagggtgtatgtgcgactcgttcagatcatgagttcaaacaaataataaaatttttgaagtatccatgatcggtaccaatgaataggatagagaagctctatcctagatttctatggtatatggaatttatggtttcctttggtgcaaatccaatcatctagattggaagaagcaattcccccattggtaacaaatggttatccattaagcggaggaaatagtaataaaaagaaaaaggcttatgctcctttatcttaaaagaacggactaaagggtcagctacttagccaactttcataattaaataccgtcactgtatgaataactcttattgtgaaaagagttatttactctataatggataggtagagccaaagaatgtgaactatacaagttcacaataccttttgatgaaagaaagggctccggtgtatagagagggcctcgccgtttaaaagggaaccataaaaacgatggaacccactatttttttagtatcgttagaatttgttatttctatgcgaaataactaaatagaataaaaaatcgtggttgggaaggttatagtagcaaaagccattggaattaatattttatatatcggaataatccgtttagttattaatgggaaaaaagagggttaaaagaagagaaatcattagttattcattaaggttaatttgattcaatgaccagagttccgcgaggatatatagctcggagacgacgaacaaaaatgcgttcatttgcctcaaactttaggggggctcatttaagacttaatcgagtgattactcaacaagtaagaagagcttttgtttcttctcatcgagatagaggcaggcaaaagagggattttcgtcgtttgtggatcactcggataaacgcagcaacacgggtatataacgtattcaatagttatagtaaattaatacacaatctgtccaagaaggaattgattcttaatcgtaaaatgcttgcacaagtagctgtatcaaatccaaataatctttacacgatttccaataaaataaggatcatcaattaaaggataaaaaagtaatatacaggaataattaaaaccgaattcccggagagggaactccgggaagatacaataaattaagattaagtggtaggaatcgacgagcatgttgcaataaataaaaaaactatttattttttcccatttttctttcttataacaaacacaagaatccaaattggattactttactttatatatgagtctgagtctttcgaataaaacatcaacaatcggaacttaagtttcgattgttgtttcttaaattctggttggagtttcttaagtttcgattggaattgaacttttgtgttaattgaggaatatgtctattttttctgtgtctaggaccagtaattattgaaattgcctgggcttgaaattgcttctcattctcatagttacgaaatggtaagaaagataaaatacgagcctgttttatagcaagagtaattaatcgttgttgtttcaaggttaatctatttattcgtctagataatatttttccttgttcactaataaatcgattaattaaactcatgtttctataatcaattcgatcccccgggcctattcgagaacgcctacgaaaaggttgtttggatttacgaaaaggttgcttagatttacgaaaaggttgtttgaatttacgaaaaggttgcttagatttatgaaaagtttgtttggatttacgaaagggttgcttagatttacgaaaaggttgtttagatatatacatgatttattccttattttaaaatttgaaaaaaaatggatttctttcttttattaatttttgatccagaaccagaagaagtagtctttctttggtccatatattatttgattaaatcaaaatatactatataaattgattaaatcaaaatatactatataaaaatataaaaaatccaaatatataaaaataaaaaccctctatacatatgaaataatatctacctaaaatcagatgagttgatttgtatttagtattctatctatgttctatatatttaataagaagttcttactctttctgttctttggaaaaatcgaacacacgatgctcctatttctttatttcattatgagtggtatgcttgcgacaataacgacaaaattttcttaattctaattgtccgggcgtattgtggcgattcttttgagtactatatctagaaatccccgtcgattccttattggtaccctttcgaacacaactaatacattccaaaataactcggattctaacatctttgcccttggccatgaacctcctttcctttttggatcgacttaacttaattcttatacctattcttttattcttctattttggatccaaagaaaagaagaagaataaaatccatagaagttcctaactaaaaatgtgatttctaaagattttgttgtaattcttcgaattctcgaacaaatccaatccaatagaatacaaaatttttgaaattcgtaaattaagtaataaaacatagagaaataattaaagaatacaatccttatccatcttttctttctttttgcttcatatactaaaaaagaattcaaaaaggggaaattttcgtcatgtcacgaagaattctatctctcgcataggaataactagaataaaaaaaaagggaatgacaaagcatctgggaataaacgattgatttctatcaataaacctgctaaagccccaaaccatagagtacttagcacgggtgctacagagagatatgtttttatatcccgcattgaaaatcctccttccgtattggaatacatatatgatcagatactcttgcccaagatcctttgtatttcttttgtttaggcgaaattcctaactaaaaaaacaaaataaatattatatatatatagaatgaaccgtatagacgagattttcctatccctaaaaaagatgaccccttcttcctatacattactaaggaatagtagtctttcttttataggtgaaatttgactggattttagtttataccccttccttgattatatgagaccaaaaacaagaaatgacaagaaagttctatatggataaagaaatagaagaaaattacgatgtggaaaacaagaaaggaattgtgtacaatggcattgtacaacaatttggaaaagggatgtagcgcagcttggtagcgcgtttgttttgggtacaaaatgtcacaggttcaaatcctgtcatccctacctattaattctctcttcgttatgggcagtagtggggagatcgattaaagtgggtataacttgaatttgtggatactatacggacgtgagacacgttaggaatagaaaaggattttcttttttttttgttttgaaagcgctcttagttcagtttggtagaacgcgggtctccaaaacccgatgtcgtaggttcaaatcctatagagcgtgattccatatatcttatgtcgaaactaaaataacttaaaaaaaaacaaagtagaattgcaactccaatttgacctcctccagaccagagaggaggtcaatcaaaaaagaaatattactcaatcaaagatccaactgatccccacgcctgtattgcaaatacgcagtcacgaataatcccgctaaagtaataggaattaggcctaagacgattccaaatagaaaaacttcaatcatttcgatttgttcgaggggataaaaaaagaggtacgatctatctctaaataatagtctaaactacccacgaatctcaatgaccaagaaaagaattggtaattagtgtggaaaagagtctagaataccaagaatccaaaagaaagattcttctattcaattcatttcaaataagacgtatcttgttcaagctaataaatagagctggggttatagttaaagcagccagtagaaaaccgaaataactagttatagtaagcatgaaggggttcaattccattttttttactacactacatatgttggtaaagcacttacctaagtttaagttatggaaaattcataattcatcggttattttagataatactaaaaaacaagatagagtgagatacagaagtgtaaaaaaaagagaaaatcgattcatcagacggaacatgagtccctaattccgaatcaagagatttgttgtggaatctgtcagttaagtaaactaataatattaagaactagatcatctaaccccattgaaaaatgaaattggattttcgggagaattttggaataaaagataaataaagaattgaatttgaaaaaaaaaattctttctatttcggattcggattatttcttttttaataggatggatttcatcctctttttggagcaaattttaactcattgtattccatatggaataagaggagaagaaaagcattccacgacccccgaggggccccctcaaaaagggaactattccttaaatttacttttttttatttatttttattcgttttttgaaccccaacaaaagtggattcaaagttacttcaattatccttttcttttaagttcttcttgtaaagttccatgcttgctgtttggtcaagaaaattagacctaatccaacaaacaagacaaggattgattacgaatcttgattcttcaaagaatgtattccgtttctttcataacggattatccgctattcgattttctatttattagatattattttatgctaaccaattaaattcctttaactaaaaaaggatcgattttgcatatacttatctttgtattgcgtcaatatgagaatatccttcctaaattctttatcttattaatcattaacttagattttcccaagatcttggccgctattccaaattaaattattctactattccgaagacaatgaaaataagtaggacccaaaaaattgtggggttctattgatgccttgaataacatgtaattttcctatagacaaggaacaaaaaagagaaaaaaggaattctgtttcgggaccaagcaaaactggattgctgtgccataggaaggatagctatactaattcggtatactcaaaatacacctttggtacaaaattgacaatctcacaaggatgaaatatcagtaattttctatttactggtggatcccatcttttacggaatcaattccttttttgaataaaaattttgggagctcagcatgtctggaagcacgggagaacgttcttttgctgatattattaccagtattcgatactgggttattcatagcattactataccttccctattcattgcgggttggttatttgtcagtacgggtttagcttatgacgtgtttggaagtcctcgaccaaacgagtatttcacggaaagccgacaaggaattccattaataaccgaccgttttgattctttagaacaactagatgaatttagtagatccttttaggaggcccccaatgaccatagatcgaacctatcctatttttacagtgcgatggctggctgttcacggattagctgtacccacggtttttttcttgggatcaatatcagcaatgcagttcatccaacgataaaccaaattccaactatagaactatgacacaatcaaacccgaatgaacaaaatgttgaattgaatcgtaccagtctatactggggtttattactcatttttgtacttgctgttttattttccaattacttcttcaattgagagaaagaaagagagtagtaagaattctcttatcccatttggaaggataccatctttataactatccatgactgtttttgtctctagcatgaccacttgagaaaatgtggaggaaagtaggggaaatggccgatactactggaagaattcctctttggctgataggtactgtaactggtattcttgtgattggtttaataggtgttttcttttacggttcgtattctggattgggttcatctctatagtaatcggaggatccagattgtaaacatgaaaaagtaggaacttagcgggtccttactcccctttatctgattagagcggaaagggcccgcggaattcttattgttataacgcggttttgttccataatctagaaattggttacctatttctatttgtaaaaataacaaagagaaaacctttgctctgatggttggaatccctccatttattcttttgtttgttaatgatgttagtgagtgaagcaatccatcggtcgatttaaagcccccgcctttcgcccataaaatggattcactcttatgaagcaacaagaaagaggggagaggatccagtattttattccatgaaggaagtatcctgcaaatcgttgatttagtttagagtaataaactaataaaaccttaatcaaaactactcaactagcctaaaaatcaaaaccacccttccatgggagggtatagattttttttacaaaatttctgtaagttcaaagttgaacttaattcaaaaagtaaagcaattctatttgctcacaagaaatgtgtcccccgccataccttctttccctctgtttgtccactaccgcgcccgaacctaagcaaaggaagtccaaaagacagacccgaataaagaataaatagtaatctttgacaaaacaaataagaagaaaaatgattcttacttcgatacaagaagaatcgacacaag

SEQ ID NO: 129192 - DNA, 2342 bp, Zea Mays
ataatattaatctaatatgcccattggtgttccaaaagtaccttaccggattcccggagatgaagaagcgacttgggttgacttatacaatgttatgtatcgagaaaggacactttttttaggtcaagagattcgttgcgagatcacaaatcatattacaggtctgatggtatatctcagtatagaagatggaaatagcgatatttttttgtttataaactcccctggcgggtggctaatctcaggaatggcgatttttgatacgatgcaaacggtgacacctgatatatatacaatatgcctcggaatagccgcgtccatggcctccttcattctgcttggaggagaacccaccaagcgtatagcattccctcacgctaggattatgcttcaccaacctgctagtgcttattatcgggcaaggacaccagaatttttactagaagtggaagagttacacaaagttcgcgaaatgatcacaagggtttatgcactaagaacaggcaagcctttttgggttgtatccgaagacatggaaagggatgtttttatgtcagcagacgaagccaaagcttatggacttgtcgatattgtaggggatgaaatgattgacgagcactgcgatactgatccagtgtggtttctagaaatgtttaaggattggtagtgggtggatttcttgtaaatttatttcaaacctaaattcgggttttatgctatagaaaatagaaatacttcatgatgatgaatcatcaggttaagatcgatctaaaccaatccattttatatatacatacgacatgccaacggttaaacaacttattagaaatgcaagacaaccaatacgaaatgctagaaaatcggccgcgcttaagggatgtcctcagcgtcgaggaacatgtgctagggtgtatactatcaaccccaaaaaacccaactctgccttacgtaaagttgccagagtacgattaacctctggatttgaaatcactgcttatatacctggtattggccataatttacaagaacattctgtagtattagtaagaggaggaagggttaaggatttacccggtgtgagatatcgcattattcgaggaaccctagatgctgtcgcagtaaagaatcgtcaacaagggcgttctagtgcgttgtagattcttatccaagacttgtatcatttgatgatgccatgtgaatcgctagaaacatgtgaagtgtatggctaacccaataacgaaagtttcgtaaggggactggagcaggctaccatgagacaaaagatcttctttctaaagagattcgattcggaactcttatatgtccaaggtcaatatggaaattctttcagaggttttcccttactttgtccgtgtcaacaaacaattcgaaatacctcgactttttcagaacaggtccgagtcaaatagcaatgattcgaagcacttctttttccattacactatttcggaaacctaaggactcgatcgtatggatatggaaaatacaggatttccggtcctagcgggaaaaggagggaaacggatactcaatttaaagtgagtaaacagaattccatactcgatctcatagatccctatagaattctgtggaaagccgtattcgatgaaagtcgtatgtacggcttggagggagatctttcctatctttcgagatccaccctacaatatggggccaaaaagccaaaaaaataagtgattcgtttttagcccttataaaaagaaaacggattcttgaacctctttcacgctcatgtcacgtcgaggtactgcagaaaaaagaaccgcaaaatccgatccaatttttcgtaatcgattagttaacatggtggttaaccgtattatgaaagacggaaaaaaatcattggcttatcaaattctctatcgagccgtgaaaaagattcaacaaaagacagaaacaaatccactattggttttacgtcaagcaatacgtagagtaactcccaatataggagtaaaaacaagacgtaataaaaaaggatcgacgcggaaagttccgattgaaataggatctaaacaaggaagagcacttgccattcgttggttattagaagcatcccaaaagcgtccgggtcgaaatatggctttcaaattaagttccgaattagtagatgctgccaaagggagtgggggtgccatacgcaaaaaggaagcgactcatagaatggcagaggcaaatagagctcttgcacattttcgttaatccatgaacagaatctaggtatgtagacacatggatccatacatctcgatcggaaaagaatcaatagaaggagaatcggacgatatctttttcgaaac

SEQ ID NO: 129193 - DNA, 3877 bp, Zea Mays
aattttagaactactcaaaaacgaccaatcttttacggaacttatttgtttatatagttaattgtttttgaaaaaaaaaaatagattaattcattaaattaattccactttttttgaggttgatagtttatttgttgggaaagagtggatccttctcatttcaggattaatcatcttgagttctctgttgaaaatggaaattcaataataataataaataagtcttaagtaaactattttattcctctttttcgaactatgtttcattcatatgatagaatatgggtttaaataaattgtatctttgcagagtgttccccgataaatacttatttcttttatccaattttctccatagatagtaggtttgaattagtatacaaaagcaatgactattcatgattccatccatattggatcaattctcgataccattttgcaatgaaattagaggaatgttatggtaaaacttcgtttaaaacgatgtggtagaaagcaacgtgcgacttgaaggacatgatcgattgtggatttgcctatccatcattttccatagtaatgaaaatgctcttggctcgacatagtctgttctattcgccccgaaccgaattttcgctgggttgtttgtaagtaaagtaaatagtacacgatggagctcgagaggacagaatttctttttgatcaagggaaagaatctagggttagtgaaaactaataaattaggccaactttgtcagtctatccttaatatagaaatcaaaaggttaaaataagaaaaagtctaattttggaagattggaaaaacttttttgatgaaaagtctatctgaatcaattgttcatatttgatttctatagaagagtgaaatgctttatcgaaggaaataagaaaaaagaaagggtatgttgctactcttttgaaagaaaaaagaataggagttcccgaagtaatgtctaaacccaaggatttcacaaatcaaagataaaggattccggaacaagtaaacacgattttcaaccgtctcaacaatagaattagatctgaataaggaataaaagtcaatttgttcgagatgagataaagaaaagagtttagagacgactcaaaaaatttcgaagggtttttcttttgaagtttgtcagtaaaaattagccaacttgagtcatgagtataaatgaaatttgttttttcttttctttaaggaaattaatgcaagtcataatcaaatttctatctatttgcattatagacagattgcattatagacagaaattcgaatcattttctcgagccgtatgaggagaaaacctcctatacgtttctagggggggttgttatcttcatctatcccaataagctatctatcgaatcgttgcattgatgttcgatctcgaagagaaggaagaaatattcgaaaagtaggtttttatgatccgataaagaatcaaacttgtttaaatgttccagctattctctatttccttgaaaaagggtgctcaacctacaagaacagtttatgatattttaaggaaggcagaaattctttaaagataaagaaagaactttgagttaattgaagaactaaatgaataaaaaagtaggagagggtccttagtaccccttaattatttagacacaatttgcctctttcttagtcctatttttttttgctgcatttatgtcgtgccaatccaacaaaagtccctattttatttcctttttatatctaattacattgtatttgcattgacaaaggtctattgaacaaatagaatttgtagatagatgggtctctttattgtcactccatattaggtatttctgtctacacttcattcaaatgatagggttgcccctcttgcatgtactctcatacacatacaagattattttacttctttaaattgccaaaaaaatcacaattttgccattgtgattggggctgctttttttttacccttagccttagtgaaatttaaccggatctgttcatttttgtatttgagtgtttttaatggattagaaaatctttcttttgatgtcttgctaattcaatgtggtataatttcatcgatttttagattttgatcgtatctaagagatcctattttatccgggttgctaactcaatggtagagtactcggcttttaagtgcggctatgatcttttacacatttggatgaagcaacaaattcgtccagactcttggtagagtctagaagaccacgactgatcctcaaagataatgaatggaaaaaatagcatgtcgtaataaaatcaatttctttttttttaataaaaaaaattctgattttctgggtctagtgaataaatgaatagagcctggctctaattctggtaaaataaaaaaaaaagcaacgagcttaacttcttaattggttaattggaaggattccccgatctaattagacgttaaaaatagattagtgcctaatgtggggaaaggttaggttttcctatgaatggaccctttacttttttttttagaaatcctaattattcttgattatggattgaaaagagatgttatgaattgaatgtgtaaaagaaacagtatattgataaagagactgtattccaaagtcaaaagagcgattggcctgcaaaaataaaagatttgttcttgtttgttttataattagaacaaacataaactaattagatagaaaaggagcggaaaaagttctatggattagactccctttctttcctgggtttgtattatgcaacaccttgttctgaccatattgcactatgtatcatcatttgataaaccgagaaatgcttttttctctatttcaagtagaaatacaaatggaaaaattcgaagggtattcagaaaaacagaaatctcgtcaacactacttcgtctacccacttctctttcaggaatatatttatgcatttgctcatgattatggattaaatggttccgaacccgtggaaatttttggttgtaataacaagaaatttagttcactacttgtgaaacgtttaattattcgaatgtatcagcagaattttttaattaattcggttaattatcctaaccaagatcgattgttggatcaccgtaattatttttattctgagttttattctcagattctatctgaggggtttgcgatcgttgtagaaatcccactctcgctagggcaactatcttgtccggaagaaaaagaaataccaaattttcaaaatttacaatctattcattcaatatttccctttttagaagacaaatttttgcatttacattatctatcacatataaaaataccctatcctatccatttagaaatcctggttcaactccttgaataccggattcaagatgttccctctttgcatttattgcgattctttctccactattattcgaattggaatagttttattacttcaatgaaatccatttttcttttgaaaaaagaaaataaaagactatttcgattcctatataactcttatgtatcagaatatgaatttttcttgttgtttcttcataaacaatcttcttgcttacgattaacatcttctggaacctttctggaacgaatcatcttttctgggaagatggaacattttggtgtaatgtacccggggttttttcggaaaaccatatggttctttatggatcctcttatgcattatgttcgatatcaaggaaaggcaattcttgcatcaaaaggcactcttcttttgaagaagaaatggaaatcttaccttgtcaatttctcgcaatattttttctctttttggactcaaccacaaaggattcgtctaaaccaattaacaaactcttgcttcgatttctggggtaccttcaagtgtaccacgaattctctagatttc

SEQ ID NO: 129194 - DNA, 3281 bp, Zea Mays
aaaactgctcatactatcattatagtataatgacgagtggttgtatatggtgctatcgtctagtgatgcccccatcgtctagtggttcaggacatctctctttcaaggaggcagcggggattcgacttcccctgggggtagggagtattataaaaagaggttaatcatagattatcaaaaagcctagaaaaaattcttcctgggtcgatgcccgagcggttaatggggacggactgtaaattcgttgacgatatgtctacgctggttcaaatccagctcggcccaaaaatttagggcttcgtgaatatgaactaaatctatttttttatggaagaaaaaagatgtattatctatagaaataaaggataaagagaaacggggaaattgatttctaatccgtatctctctgattctttgtcttacaaagaaaagacaaagaaaagagcttttcttatggaaaagcggattatcgtttatttttagggataaaaaatcgcaacatactagttatgccactctcactatacccgcataggatatgcgggtatgtagtatatgattcgtctaattcttagagcacgacagacggatcgaatcttctatttaagaataggcatgccatacaccccgcagggattgtagttcaattggtcagagcaccgccctgtcaaggcggaagctgcgggttcgagccccgtcagtcccgaactagggttcaatgaatggacaaattcatcttttcttttttcatggaaatttttgatgaaaaaaggggggggggacaggaggcaagatcaaatatctatggggcacccttacttcacttttatttttttgcatttctcagtaaaaagagagcagtgcagtatagaattttttttgcactacttccggttgataaggaaaggcatacatatcatacgtggattagtataatttaggatactactccatttttatgatgataccaccctcatcttaacttcctattcgactcttatgaaatcgagtaccggtattttaccggaatccatacataaaccgtattcgtttattgttagagaatgaatttcatctaattagttactttttgggggttaaaccgcaccccttccattttctagttccaactttgtttgtgtatataattggaaagaatccacctcattctcactccatttgccgactcctttttttatggatttgctctcatctttagaccccaaaaagcgtatatggatagtaacctaataaaataaaaaccaagcaaacgctctttttcctaaatttaaatatgggatcctttttatttaagatcctcttttctccatctcatttctacttctactgcttattgggatgtctatgtgacccatagaaagttggtcatataatacatacataattgtatgtataactataagaaaaaggaagtgaaattggataagataagaaagattttgggttatacatatagaaaagcaaaagtagaaaagaatgaaaaaagaatagagggggtttcgaatccaatcaaaaaacctattttggtcttagtatggataagagatcttcctatgttatattattccactatccaccatgaattgatttgatagatgcaatattcataatattgaattgattcagtattatcagaatgcaagtcctccccttgaatttacaggatacccctttttcctctccatgggattacatcccgagttattgtgaaaaaaataaataaataaagaggttatggaagtaaatattctcgcatttattgctacagcattgttcattctagttcctactgcctttttacttattatttatgtaaaaacagccagtcaaaatgattaattggaattccaattaatcattgaagaaatgaaaaagggattaaagaaaataaaaaatccaagtcttaaatgaaagggtctggttggaatcataaagtgtggtagaaagaactacatatagttttttctaccacactttagattctttctattatattatcttgaatctacatagaatcgattagtagattgaaatagtagtctaattcaacttcttttttcactgcatccacttaatttcaatcaagtcaaaatcaaaaaaatcgaagataattcttcattgaaagaatccaaggagggggagaaaaataatacgagaatagactagaatagattatagtaaaagaaaaaaagtaaaaggaaaaaacctacggatctttcatgcttaaaaaaggtgcgagatgcttcaatcgagatccttcaaaaaaaaagaacatcaaaaattttctaagaataagaaaatagtataaatggaaaatgtgcgatatattgtgaatagcttcgtgtaagaaagtctaattttcttatgttctaattttcttatgtatagaactttctttttactcataatttctagtagaatagaagttatgaattactataatcgccctttctattctattatactggaatagaacgactctttcttactttcttaaaagagtttcttacaagagtgaaacaaaactaaagaaagagagaaaaaataaagtttggcaaaattattaatgcaaaacgatcaattaaagaaaagagttgatactacaattcgactactcaatcaattggtagtatccctagagtccactcctcccccatactactagcgaaagagaaaatgtaaagactaccattaaagcagcccaagtgagacttactatatccatgtaaattatgtctcctatttctatgaaagaattcttctactattgatcaataatcatagtggaatcaagggtacagagtcaaaaggccattctgccctaagactatggatgaatccgttaaaggaatttactcctaacaaattcttatatgatttctggtagaattggagagcattaagtagaaatatgatacatcgctctttccctaaaaaagagtaggggatgctctgaatagaagacgcgggaatagagagattttttctttcgtttgttaccttttttataagcaaaggacgtaagaatacaccataaaattaggatagataaatatttattggatacctaacttacccatgtttatttttatttttgacctaaaccctactgctgccccgctttctatctttctatgaaagagtaaggaggtcttatccacaatccaaaaattgatttttgatcagcctattcaatctaattctcgacagaatcagtagcctttactttagtgtatgtaggtagcataagatgtacgaag

SEQ ID NO: 129195 - DNA, 1352 bp, Zea Mays
ccgcggcccgcatccgctacgccaacgctgcgacgggcacgggcagcgcgataaaatccgccgcggccgcctccacccacctcgacgctcgcttctccaaatccccccttcgccttgcgagggggcggaggggaggtggtagtggtagggtatacaggagtgctctgcccatggagaaggcggggcaacaacgccatgttatcggcggcggcggcaagaaggcgcccgcgctggggctgcagaagcagaactcgtggtcgccggacatcgagcgcgacgaggcgtgggagcgccggcgcaggggcatgcgccgcgggggcacggcgctgcgccgcgcccgcagcgtcacggacgacgacctcgacgagctccgcggctgcatcgacctgggcttcggcttcgagccggcgcacgccgccgcgtgcgcgtgcgcctgcgcctgcgccgggaggaaccgcctcctggagacgctgcccgcgctcgacctctactacgccgtccacggcggggcggcggaggcgccgccgtgctcgtgcggcgccgcgtcggaggcgtcctcgtccgaggagtcgccgctcggcagccccatgtccatactctctccaggcgacacgccggagacggtgaagatgcggctgaagcagtgggcgcaggtggttgcgctgtccatgctgagccgccactgagctctccgggccacggccgccgctaccttgtcgcattgggagtagagagaaaaaaccattcgagatgcacacaacagcagaaggaaggaatctccggcggtcgcctcaagcagaaaaaagacgaagagaaaaaaaaatctgttagggtttggtcatttggtgggccgccgccgccttccaccttgctcgtcctatcttggactgctagctaatcatctttcttccaccatgattgtatgattccgttggagacaaaacatcatgcctaattactttgcttgcttattaatcctcttgcttcccccctaatccatattagtttctcatcttcgtgtatgtacatggttcctttcaagaggcagattaatttccatcatctcaaatgattagcggggcacttccttctcgatctactactatacctatacttgagatgacgacgattgttgaatacgcacggatgtctctctctctctctctctctctctctctctcttagatcctttttcagttcatcaactctgttgaaacctgtgctcaatcaagagttgagacttaatacatgtcgtcaatccagagtcttgcagatcaagggcaaggagacgaatttttcaacaaaaccaacagcggtggaaataaattccgtgtggttggatcggttgggag

SEQ ID NO: 129196 - DNA, 1287 bp, Zea Mays
gccaaataatttttcaccccttctaacttaatctcatttggcattaggtctatcttctgaactgattctatatgagcaacattgtctttaattgatgatggagcctcatccctttttgctgacagcagaacccaccgacaaatgtatttacctgtttcctttggcgcgacctcgcggccgactcccggttcttgatcatccggcgctgcctcctctcaaccaccttctccatagccggtggcttccttcccctcaacccaccaccgaaaatgtacgggaccggtgatggcgacaaggatgacaagtcgtctccctccatcttcccgaacgcgctggccgtcacaggcctgggcgataccgcggggggcacgggaccacctcgctgctgaccgacagcccccgacacgaacccattcccgaattgcagtggaggcaccaagggagccaacacattgccatggggaaacagcactggcgggcgcggagcaggagccgggcacaccggcgccggcggtacgggcggcggcgccgtcatgtcctcccgcaccacgcccgcgcggacgaggaactcctccagcgtgatctccccgagcgtcgggtgccgctgggccggcgggggcggcgctgcgggcgcggcggagccggaggagggtcctccgccgacgcacgtgaggtcgcgccagacctcgtcgacggtcttctggctgagcgtgcgggggagggtgagcgagccctggtgctggatggacacgggcccccgcgcggcggcgtgggcgtggtccgccgccgacgcgctggcggccgcgacgctgtgtacctcctccgcggaccagatgctgcggaggagctcgtccatgttcatggagccgaagtccttggcggccccgccgagcgagctctggaactcgtcgaacgtgagagagtacaccgacccctgcctcgccagcgggagcggcgtcatcggcggcaggtgctccggctcctgctgctgcggccgcctcccgcttcctcccgggaaatccatccctggttcacgtcgcccaccggattcacacgcttcgaaagagccctcctcacgagcacgcgcacgctgagagagccggacggagccgccagtccggtgagctcagagcgggggttaggcggagtagagtggcttagcgacaggagataccaggattagcaagggaaattccgcggaacaagaggaatttgatgcgggtgcgggaagggaagtccgcggcggcgaggcgaggggaatgggtggacaggtgtcacccacgagga

SEQ ID NO: 129197 - DNA, 1723 bp, Zea Mays
gacggatccgacacacttccgaattccgatccacccacttcatcaccaaggccgtcgtctctccccacgccggccgaacggatggcggcggcgccgactgcggatgccatggacgtcgacgcgccggctaggacgctgactacctctccggccaccaagttgcgctcccctcacgacctcctggcagagacacgcgcctccatcgagaaagtcgcagcccggatactcgccatcaagaaagacggcgcccccaagtcggagctccgcgagcttgtcactcagatgtctctgcacctcgtcacgctacgccaagtgaacagagagatactgatggaggaggacaaggtcaaggcggagacggaggccgcgaaggcgccggtggactccacgacgctgcagctgcataacctgttgtacgagaagaaccactacgtgaaggccataagagcgtgtcttgactttcagacgaagtatccggggatagagcttgtgcccgaggaggagttccagcgttccgcgcccgcagacatccttgagaagaccctcgctgccgacgcctcccacgacctcatgctcaagcgcctcaactttgagctcgtccagaggaaagagttatgcaagctacatgagaaattaggacaacagaggggcagcttgctggagacaattgctaatcagaaaaagtttctttcaagcctgccatcacatttgaaatcattgaagaaagcatcactgccagtgcagcaacagttggggatgcaacataccaagaaactaaagcagcaccatgctgctgagttacttcctactccgctttatatagcatacactcagctgctagggcagaaagaagcatttggagagaatattgaagtagagatcgcgggaagcacaaaggatgcccaaatatttgctcaacaacaagccaagaaggaaaacagcactctttcaagtggcgacaacagaatggatgatgatgtgattgatgatgaagaagatgctcagagaagaagatcaagatccaaaaagaatgtggtgaaggaagctaataatccagcagtggcctatcaacttcacccacttaaaattatacttcatgtatatgatactgaagattctggtagcaaacgccgtaaactcatcaccctgaggtttgaatacttggcaaagttgaatgttgtttgtgtcggaattgaagattcagagggtctggacagtaatatcttgtccaacctatttccagatgacactggtttagatctgcctcaccagatggctaagatttatgttggggaggttccaaacttcagcgacaaggattcaaggccatacaagtgggcacaacatttaggtggtatcgactttttgcctgaagtgcctccatctgttggggatgattctagcagagcattaaacactgctgatttgtcatctgggcttgctctgtaccgtcagcagaaccgtgcacagactattttgcagaggatccgcttgcggaaagttgcacagatggctcttatgtgagtcactggtctatgttttttgctgtttgggacatcgatgaaaaaaaccggatggcagattagcctgagagtgaccgtgtaatttgactgacgattttgagctaatgatgcttttgcttcattgcacatgtcattctgagttatggcaatactatgaatcatttaccaggcagaaattgtgaaacataccatttatatct

SEQ ID NO: 129198 - DNA, 2737 bp, Zea Mays
gacggatccgacacacttccgaattccgatccacccacttcatcaccaaggccgtcgtctctccccacgccggccgaacggatggcggcggcgccgactgcggatgccatggacgtcgacgcgccggctaggacgctgactacctctccggccaccaagttgcgctcccctcacgacctcctggcagagacacgcgcctccatcgagaaagtcgcagcccggatactcgccatcaagaaagacggcgcccccaagtcggagctccgcgagcttgtcactcagatgtctctgcacctcgtcacgctacgccaagtgaacagagagatactgatggaggaggacaaggtcaaggcggagacggaggccgcgaaggcgccggtggactccacgacgctgcagctgcataacctgttgtacgagaagaaccactacgtgaaggccataagagcgtgtcttgactttcagacgaagtatccggggatagagcttgtgcccgaggaggagttccagcgttccgcgcccgcagacatccttgagaagaccctcgctgccgacgcctcccacgacctcatgctcaagcgcctcaactttgagctcgtccagaggaaagagttatgcaagctacatgagaaattaggacaacagaggggcagcttgctggagacaattgctaatcagaaaaagtttctttcaagcctgccatcacatttgaaatcattgaagaaagcatcactgccagtgcagcaacagttggggatgcaacataccaagaaactaaagcagcaccatgctgctgagttacttcctactccgctttatatagcatacactcagctgctagggcagaaagaagcatttggagagaatattgaagtagagatcgcgggaagcacaaaggatgcccaaatatttgctcaacaacaagccaagaaggaaaacacaggcactctttcaagtggcgacaacagaatggatgatgatgtgattgatgatgaagaagatgctcagagaagaagatcaagatccaaaaagaatgtggtgaaggaagctaataatccagcagtggcctatcaacttcacccacttaaaattatacttcatgtatatgatactgaagattctggtagcaaacgccgtaaactcatcaccctgaggtttgaatacttggcaaagttgaatgttgtttgtgtcggaattgaagattcagagggtctggacagtaatatcttgtccaacctatttccagatgacactggtttagatctgcctcaccagatggctaagatttatgttggggaggttccaaacttcagcgacaaggattcaaggccatacaagtgggcacaacatttaggtggtatcgactttttgcctgaagtgcctccatctgttggggatgattctagcagagcattaaacactgctgatttgtcatctgggcttgctctgtaccgtcagcagaaccgtgcacagactattttgcagaggatccgcttgcggaaagttgcacagatggctcttatgtggcaacttgattatttgacaaagctgaagtggcctcgaatagaacataagaatgcaccatgggcatcacgcaacccactgtgcagtctacatagttggtcattgacaagttatcctgagtcatctcgttctattttgatgctaagtggtgctgcaagcaatgttgacagtgatgtagagagatctgtgacaaactgggaagaaactgagagtatcagggaggatggggagcttccagttgttattcctgctgagaatgagccaaatggttctacaattttgcaacctgaggtgtcagctgagatccggagccattctagaggcttatctcttatatcaaagagtgcaacaccatctaagctaagcatctcacgaagttttggtagaaatgaggacgatcttgatctcttgatgtatagcgacagcgagttggaggaccagccctgcattcttgacgaaactgaaaaagctactagcccgattagagacagattctgggaggagtatgcttccaaggaattcaccatggtcctgagtaaaactatgaagaatggtctaaaagtcatgctggaagccaaggttaagataagtatggagtatcctcttagacctccccttttcagattacgtttgctctcagaaaagtctgaaattttgaagtggcacaatgatcttcgtgcaatggaagctgaggtaaatcttcacatccttcgaagcatacctctatcatatgaggattatatattgactcaccaagttatgtgcctggctatgctgtttgacatgcattttgatgaggaaaacgagaaaagaaaagtcacttcagtgatcgatgttggtctttgcaaacctgttagtggaactatgcttactagatcggttaggggtagagacagaaggcaaactatttattggagaggtgctgattgctcttccagttacttgtagagtatgtgcgatcttgattggtcttggttgagttcagcattgactaccctctggagaaatcatttctgggcattggagaactgcatatataacttaagagctgacacagatccccttgtttatcactactgtgtcttgacagcaatagctgggaagatttctctgtgcccatactgactcgagaaactatttacaatgctgatggtaactacacttttatatgcccaggaagaaaagctataggtgcagttaatcaccacaaggc

SEQ ID NO: 129199 - DNA, 3188 bp, Zea Mays
gacggatccgacacacttccgaattccgatccacccacttcatcaccaaggccgtcgtctctccccacgccggccgaacggatggcggcggcgccgactgcggatgccatggacgtcgacgcgccggctaggacgctgactacctctccggccaccaagttgcgctcccctcacgacctcctggcagagacacgcgcctccatcgagaaagtcgcagcccggatactcgccatcaagaaagacggcgcccccaagtcggagctccgcgagcttgtcactcagatgtctctgcacctcgtcacgctacgccaagtgaacagagagatactgatggaggaggacaaggtcaaggcggagacggaggccgcgaaggcgccggtggactccacgacgctgcagctgcataacctgttgtacgagaagaaccactacgtgaaggccataagagcgtgtcttgactttcagacgaagtatccggggatagagcttgtgcccgaggaggagttccagcgttccgcgcccgcagacatccttgagaagaccctcgctgccgacgcctcccacgacctcatgctcaagcgcctcaactttgagctcgtccagaggaaagagttatgcaagctacatgagaaattaggacaacagaggggcagcttgctggagacaattgctaatcagaaaaagtttctttcaagcctgccatcacatttgaaatcattgaagaaagcatcactgccagtgcagcaacagttggggatgcaacataccaagaaactaaagcagcaccatgctgctgagttacttcctactccgctttatatagcatacactcagctgctagggcagaaagaagcatttggagagaatattgaagtagagatcgcgggaagcacaaaggatgcccaaatatttgctcaacaacaagccaagaaggaaaacagcactctttcaagtggcgacaacagaatggatgatgatgtgattgatgatgaagaagatgctcagagaagaagatcaagatccaaaaagaatgtggtgaaggaagctaataatccagcagtggcctatcaacttcacccacttaaaattatacttcatgtatatgatactgaagattctggtagcaaacgccgtaaactcatcaccctgaggtttgaatacttggcaaagttgaatgttgtttgtgtcggaattgaagattcagagggtctggacagtaatatcttgtccaacctatttccagatgacactggtttagatctgcctcaccagatggctaagatttatgttggggaggttccaaacttcagcgacaaggattcaaggccatacaagtgggcacaacatttaggtggtatcgactttttgcctgaagtgcctccatctgttggggatgattctagcagagcattaaacactgctgatttgtcatctgggcttgctctgtaccgtcagcagaaccgtgcacagactattttgcagaggatccgcttgcggaaagttgcacagatggctcttatgtggcaacttgattatttgacaaagctgaagtggcctcgaatagaacataagaatgcaccatgggcatcacgcaacccactgtgcagtctacatagttggtcattgacaagttatcctgagtcatctcgttctattttgatgctaagtggtgctgcaagcaatgttgacagtgatgtagagagatctgtgacaaactgggaagaaactgagagtatcagggaggatggggagcttccagttgttattcctgctgagaatgagccaaatggttctacaattttgcaacctgaggtgtcagctgagatccggagccattctagaggcttatctcttatatcaaagagtgcaacaccatctaagctaagcatctcacgaagttttggtagaaatgaggacgatcttgatctcttgatgtatagcgacagcgagttggaggaccagccctgcattcttgacgaaactgaaaaagctactagcccgattagagacagattctgggaggagtatgcttccaaggaattcaccatggtcctgagtaaaactatgaagaatggtctaaaagtcatgctggaagccaaggttaagataagtatggagtatcctcttagacctccccttttcagattacgtttgctctcagaaaagtctgaaattttgaagtggcacaatgatcttcgtgcaatggaagctgaggtaaatcttcacatccttcgaagcatacctctatcatatgaggattatatattgactcaccaagttatgtgcctggctatgctgtttgacatgcattttgatgaggaaaacgagaaaagaaaagtcacttcagtgatcgatgttggtctttgcaaacctgttagtggaactatgcttactagatcggttaggggtagagacagaaggcaaactatttattggagaggtgctgattgctcttccagttacttgtagagtatgtgcgatcttgattggtcttggttgagttcagcattgactaccctctggagaaatcatttctgggcattggagaactgcatatataacttaagagctgacacagatccccttgtttatcactactgtgtcttgacagcaatagctgggaagatttctctgtgcccatactgactcgagaaactatttacaatgctgatggtaactacacttttatatgcccaggaagaaaagctataggtgcagttaatcaccacaaggcttttactgcatgaatattgtgctatatgtttcaagaagcctttctgctagttcctattttcttggttgttcaaattggtatcctggatctacccagaacatttccaaccgcagttaaatcctggaagcttgcagcattcttttgcaataaacagagcttgcttacccggatgaagatgttggaggacccagcttttaaccaaccttagttatctcaatcgcctatggttggccgacagctatgaggtaaatggcttacggtatcaatcatttgttaattctacatttgagtaacgctgtgggtgcagtagcttttgctcttccaaaaacactggacagaaagatgagatttatgtcccacatgatgcaagtaatcgtttgaatgtaatttgcgttttccagccatgggaatgtctgaacgtatggaggaagtaactcagcagcatggtgctatc

SEQ ID NO: 129200 - DNA, 318 bp, Zea Mays
atgtcgtcgcggccccttccccaaacagaaaccagtacactaaaggggccatggaggatgaggtcatggacctcaaggtcatggtgccttgtcgtggcgatggatcttctaggcgatggggccgcgaaggatgaggtcatggacctcaaggtcatgatgcctgtcagctgggagcaacggcttggcctcctggtggatcaagtgcatcatgccttaggggaagctggttctggtcactggtggaaccaacggcatcgggcagctggttgtagcatcattgctgagcaggaacatcaagtcaaggttgctcctaagtga

SEQ ID NO: 129201 - DNA, 1262 bp, Zea Mays
catcataatttataatccattacttgcacttgcagaaacacacagcttcctacccctacccatagcatgccatgcaatgcaactgaggggaggtcgttgactccatggaaagctgccttaaaacatgtagctccatgagacactagtagtatagtaaaataactaactaatactagtatgaatcaattaatccttaatgcttatttataccgtgaccaattcttgatcacgtaggttgcagctgtaattaatcgctaagtgttgagtggatggacgatgatcacgtgaggcttgcttttgcttcacctctaaactgatgtctgtggaggagctgacgatggttggatcagttgagggacgagaagctccagaggtcgatctcgccttcctccgcccactcgctggccgcgtccgtagccacgggcgccggtgcgaagaacgtgctgcacgggtccatcatggcgtactccatgcacttaggcgactggaagaaggcctcgatgtccgcgagcgcggcgaggtccgcgtcggcgtcgcccgccaagtccatgtccatgtcgtcgtagtgcgccgtgccgtagcacaggccagcgttccggccggtctccggggagctaacgccagacgacgacgacgcgtcgccgtagctgcacggaggagtggcgccggcgccaccgccggccgagtagggcgccgacgcggcggcgccggcttgcagttgcggcgggctgcatgtggcgccgccactggcggcggcggcggcggcggcgacgcgctggatggacttgggcgacatggcggcggcggcggggacgtggaaggggaggtgcacggggaagttgaggtcggcggcggcggagcccttgaggcagagcagggcggcgtcgtaggcgcgcgcggcggcctcggcggtggagtaggagccgagccatatccgcgtcttctggctgggcgcccggacctccgacacccacgagccccagctccgcatccgcacgcccttgtactgccgcttggcgccgccctgcatcgccgcctccgcattgccgccggcgccgccgtcgaccgccgcgtcctggaaatgcgcgcccttcaccatgtcccgtgccgcgccgctcctggctctggtgctctagctgctatacaaagttcgatgcgtgcgcgtgatgtcgacggtgaggagtaataagagcgcgatcaagaacgcaaatatgcagagatagcatggggtaggtcagtcgttgtgtgtggctgtggctggc

SEQ ID NO: 129202 - DNA, 887 bp, Zea Mays
aatctatctattctaccccacctgacctgacccgccgtgcctcaaccggttccgcgcggccaacgcgtcttccggtctgccccgtcggcgataatccgccgcctagcaaagcggccgagccgagccgatggcgctggcgctggccgggctcccccacgccgcttcccgcctcgtgcctcgtgtccgccagcctcccttccgcgctctctgcgccgcagctgcggccggcgatgcctcgaagcggatgctggtactgtacaccaagccggggtgctgcctctgcgatggactcaaggagaagctccacgccgcgtccatgcttgctggcacgccctactcactcgcgtctctcgagctccaggagagggacatcacgacgaatccggagtgggagcggctctaccagtacgagattccagtgttggccaaggtgctccccgacgggaccgaggaagtacttcccagattatcgccacgtctaagtgttgagctcgtacaaaagaaaatttattttgcgtttgatcagtagggagaccgttctgggggaaacggtaattttattttattaattaatagctccagctgtaagattgccagttgttatattttcatgattttgacacatgaatttcaatttgcttgacttatgtttgcaaggaattactttaggtttgttcattgctctgatgaaatataaattatatggagtgacatccaaatacttgtgttggttcttaagaatttttatgtcacacatgatgcattgatgtcacaacgaaacgcggataaccgaacagaaataccatgtgaaatcacaggtgctgcttttcttctttcttctcgtaaagaagtgaaatctaggcaaccggatgtagaacaaaaaaaaa

SEQ ID NO: 129203 - DNA, 1785 bp, Zea Mays
cagcctcctctcccctcccgccattactcaccgggacaccgacgcatcctttgcgacgtctggctggcatgatggccccacaccagcttacataccacgcctctcggctctctgtctctccctcgaccagaggcggagagcactatagtcacgagctccacagtccaagctcgcactcgcaagtgctagcatctctcgggaatggcggcggagtcgcgtggcttcgtgatggcggctgtgatggtggtggcggcggtggtggccgtggtatcggtggcgccgtgcggcgcggaggcgaagacgacgatcgagccgtgctcggggtccgactcctgcccggcgctgctgggctacacgctctacgccgacatgaaggtgtccgaggtggccgcgctcttcgccgtcgacccggcggcgttgctggccgccaacgcgctcgacttcggcgcgccaggggcggcgcaccgcatcctgcccatgggcctcttcgtgcgcgtgcccacccgctgctcctgcgccgacggcgtccgcaagtccgtctccgtccgctacgccgcgcgcccggccgacacgctcgccaccgtctccgacgtcgtcttcgcggggctcgcctcctccgaccagatccgcaacgagaacggcctcacctccgccgaccccgacgcgccgctggacgccggccagaagctcgccatcccgctgccatgcgtctgcttcaactcgtccgacaacaacctccccgcggtgtacctctcctacgtcgtgcaggtcggggacaccgtgcccgccatcgctgcaagctacgagaccaccgtcacggatgtcatgaatgtcaatgccatggggagtcccgtcgccgcgccaggcgacattctcgccatcccattgccagcatgtgcatctacatttccaaaatccgcatcagaccacggactgattgtatcaaacggaacttacgcgcttaccgctagcaactgtgtgcagtgtagctgtggacctggcagcctcaatctatattgcacgccaacttcactgtcgggaacctgtcctagtatgcaatgtcctaacagcgacgtgatgcttggcaatgtgagcacccatccaaccggtgctggatgcaacgtctctgcttgcagctacggaggttttgttaatggaactataacagcttcgctaaccgcaggtctccaagccagatgcccaggaccacgccagtttcccgcactgacggaaccacctaccacggtgagccacgactcaacgtaccttcctccgttatcagcgcctgggccagcggaagctggtggcgtcatgcctgaaccaggctcgccagggccaggcgcctcggtgcaagcagggcccttcacgctcccgaaagtgtctaaggccaatggccccgctggcagcgtttcagcagctccgttggtgggtaaaccacttcgaatcctacccgtcctggtctcctgcctagctttctacttgcagctctgatcgagtgaacccacgtcgcgatgaattctttagctttgtcctgtccccgcagcgtagtatgcttttgaagcaccaaagggacatcattgctcgatcaaactctctctgagttgttgttctagctttgtttcgcgaaatctccccggcaaaactgcgcgcctaaacagcgtatctgatgatgtgttcgctgcttttgtacaaaaaaagatatggccctattgtgatgtgtaaagcagtaaagtggtagctattgttcttctccgcaaggcatcctggtccaggagctgcgttttt

SEQ ID NO: 129204 - DNA, 1507 bp, Zea Mays
gcaagcgggcacacgtctcggaatgcaactagccggcgcagcggctattgacgcgatgtcatcgattcccggcgacttccccgccccaatctcccgagtccacgccccatagagcgcacgccctggccacgccacgccacgccgcccgccgcgccccgcaccccgcccgcacgtcgtgccgcgacgatgtcatccggacgcccgtctgaacccgccatgaacgccggcgcaacgcccgcggcgtcgtcccctcccagatcgaagaagcggccgtcccgcatgggcgacggcaactcgagcccaaaccctagcccccgcggctcccccgcccgcaggagcgagctaaagcgcaggcgccgcacatccgccgagtccgccgcgctcgcgctcgccacggtcgccgcgcgcgcgtccgcggccggcgtccgctccgacgcgggcgacggcgccgtcgagaggcgcagacgcccgcgcacccgcgctgaaggaggcgatggggccatccggatgctcggagccgccgccgcccgcgtcggcggaggccgcggcgccgcccagaaacactggagcgacgacgacgagttcacgctcctcaccgccgccgttgccttccgcgaccgcaacggccgggcaccgcgcctcccggacatggccgagctgttcgagtccattagggagtccatctccccgcacatcgaccagttcatggtgtactacaagatcaagcgcctcaagagcaagttccagcactccgccggcccgcgcgaccgtcgcctgcgcgacttgtgctccgtcctatggggtgtcggcgtcgtggcctcttccgaggacgactcggacgtcggcgagcgacgcactgtcccggatgcggcagccatgatgccggtggtcaccgaggtgctcggcgagtactggaaaacgaatgagcgagccatggcaggggtgtcccttgagaagggtctgtccctactggggaaaaaggagggcagactcattgaaaccaaatggaggcagcagcttgatcaagagatgcaatctcagatgcggcggcatgatctggctaaggaagtctgcggcttgctcactgatgccatcaaaggcctcggcccttagctcgccttgcatctggtttgtaggagacttccttgactggtttacttgtttgttggtgtgattggttgaaacttcttgctcgtttcagattaagggttgggccaattacagcatcagttcttgagagaaagctggaagccgaaattccccatttgctgtaacattttctcaaaacttacaacacagtgactcctgtaacaaaacaggatggcaagaatgtcatgcttattctagcttgtttagtgaaacagtgatgttctattcagctggcctgtataaaagggctaagtttcgggcaaacctaatgttgttttcatttgtttacatttctcaaggctatgatttgtatgctcggatcctcgtcctcgtagaaatccagaaacgtaagtttgcc

SEQ ID NO: 129205 - DNA, 518 bp, Zea Mays
ctggtgacgacgtacgagggtacgcacaaccacccgctccccatcggcgccaccgccatggcctccaccacctccgccgcggccacattcatgctgctctccagcacgagctcctcctccgccacctccgaggtccgcggcggctcagcggcaccttcctacctcagccccccgtacctgctcaactccacctcccaccaccccgccgcttcgccgctgctcggcgcacaaccgtcgtcgtcaatgcccagcgcccctgctggcgtggccaatggcgtgcagcatctcaacatgttcgggcattcgtccatgctcgctcagcaggcgccacatttcagcagcaagtacccgtggtcatcggacccttcgcagtcgcagggcatcggtggtggtctgccagcaggaagcaagaggccgttttggagcaccggcggtgacgagaagacggcaacattgccggacaatgtcggcgcagtcatggcagacccaagtaagttctccgtagcgatcgcggccgc

SEQ ID NO: 129206 - DNA, 1597 bp, Zea Mays
ccagtgagtcgcacactgaaatcttttcctccattttctcaacttttcttctcttttctctctctctctctctctctctctctgatttcttctcttaactctcgcgtctcgcgtccttttcccttcctcccctccgttgcgtccctccgtccgtccgtccgtcgtcaccagcctcctccctcgcgcccaccgccgggatccgtccctcctcgtctgcgcccgcctcggtctagatttctgagaaaatggcgagaagtgcgggaactaggaggcgtgtggctcgccagctcaagtccacacatcccattccttcataccgatggaagtcaaagcccatgaaaaagccgatgaaaaaatccaaccgaaagcaagtgttgccaaccttgcaaaagatggactgggaagatgccaattgctctgtgtgcatggaatacccacataatgctgtgctcatcctttgctcatcccatgataagggttgtcgtccttatatgtgtggaactagctaccgccactctaattgcttggatcagttcaagaaagcttacaccaagggggcattgcttgaggaagttcctgcaaatagtgttggctctaatctggattcggcgccattggctgcagaaaaaactgactccattgaccttgcatgtccattgtgtcgtggcaaggtgaaagggtggacggtggtggaaccagctcgaagctacctcaatggaaaacgaagaacatgcatgcaggatggttgctcatttgtggggacctacaaggagctccgcaagcatgtcaagttggaacaccctcttgcaaagccaagggaagttgatcctgtccttgagcaaaaatggagattgctcgagattgaaagagagcggcaagatgcgctcagcacgatcacggcaacaatgggcagagccgttgtttttggtgattatgtgctagacttggaggatggaatggactccgaggatgttgacagtgatgctgataatgatggccgtgggacagaaaacactcgtaggatgctactatttattatgcgccaagttgctcaacatcaccaaaaccaaaggctccagaatgcgactggtgcatctgacaatgctgaggacaattatgtggtgagcagtggtgccaatggaaccacaccatactcttaccccttggagggggaggacgagaatggtatggttgtggccggaggcagaagcactgatgtgctgagaccagagaggaggcgccgtcgtcgccgcaggaaccgtgggagattgtttttaggtgctaattgagaggacaggtggccaggtagggtttagccgccagaggagtacatacagaaatgcttccctggtgcctggcattcatcaattcctgtctcaatttacttgatcatgatcatgtaccaagtagttatcttaacatcagctcattgtcataaatttatggtatctcacattcttcgttgaaaaaggaaaacaccgcatccatctcttgcggtttgtgtagcatctatttctgtctattgcttttgttaaagcatttgtttggagatcgtattagattttttaagtgaaacatatctcgttcgatcaggttt

SEQ ID NO: 129207 - DNA, 963 bp, Zea Mays
gtgacgagcagatagtgcgtatggacaaatacaccgatacaaatatttggatcactattgggagctcagatattgtccgttgccaatatatacaagaagctaattgggatttgggagccaccaccaagttcatgatgccttcaagtggatttggaagtcctcctgccaacacaggcacgaagtctcttctggttgctcagcaaagatagacccatcgcaagaaatattcgaagaaacatggttcttgactcttttgattgtgttctctgccagcaaacaatagcagaaactgctgagcacctgtttcttagatgtccctttgccacctcttgttggagcttcattatatctacacattccaagccagggtagtttccctgaagttgctgaagatttgaaggctcaactacaccaaggcttctccatgaacataattatcctcactttatgaatccagagcctgttgtaacttgtaaccgttactcttgagtttatttttttttcgtttttcgtttcttgaaccaccttgtcggggcgtctccaatttttaatttgctatagaggccacagctccatcagattcataaaaaaaatcctgcagtcactagtttattagagccaaacctgtcgcaactacggagtaccattttccaagcatgtacaactttatagctaatcaacatgcctgatgtacacaagagtccataatttatcgacatgttaagtgaatgactccactaccactaggactaacagatgaacaaattctcaaagtaacatagtgatacttataaaatggtatcaacacaacctggaaacacacactacaaacgaaacatttggatccagttactggtctctgtgaatagcatgactgaattttaacctccaggagcaggggagcacaatagatactcaagattgatatgagcaatctgaaaaaatggaagagcagaagaggaa

SEQ ID NO: 129208 - DNA, 192 bp, Zea Mays
atggagcgtctcctgtggggtgggcgaaggtgtggtggctccggtgcggcagatgaagcgcgatgggtcagagtggacgcgacgctaggcctgttcgcggattgcgacgcccggcctcaccggagtggcagggacgaccatacctcgcgtggcgacggacgggacgaggacaagatgtccctggggagctga

SEQ ID NO: 129209 - DNA, 291 bp, Zea Mays
atggctgggggcaggggcgaccagcgtgcaggaaacaggtgctgcggcggccatggaaagaaactcggccaggggctcagcgggagcacctgggaaggggcctggacgagcagaatcttggagctcgcgtccatggcagaggaagggaaggggaggagacgccatggctacctaggcgtcgagaggagcagaggcaccacgagctgggaacgagagggtaccggagggaaagcaggaggccagatccgaccgcggctaggagagcacgccggcgaggcttggtggaggtga

SEQ ID NO: 129210 - DNA, 288 bp, Zea Mays
atgtataaactcgacaccacccacctcccagggtggccaacacaaatgctttctgcactagtgaatgcaagtgctgtgttcaaaaatcataaggatgtttatttgctagccatacttttagagaacactttaaaggatgttgctggtgaatatacaagaagggaggcgcgcgagctgctgcgcacagatgggagagcgagctgtgggagcgggctgggaacagaacggctccgttccattaattttttggagtgggatggttccggatctgaggagaatattccctaa

SEQ ID NO: 129211 - DNA, 1444 bp, Zea Mays
tttctcgctcagccgcctataaattgggccgcgcgcaccgcctcgctctccactcaaacaaactcaagcctgccctgtcctgccttgttaagcaacacagcgagacatcacgagagctagagagagatggcggccacggtttcctccttcccggtggtgaacatggagaagctggagacagaggagagggccacggccatggaggtcatccgcgacggctgcgagaactggggcttcttcgagctgctgaaccacggcatctcgcacgagctgatggacgaggtggagcggctgaccaaggcgcactacgccaccttccgggaggccaagttccaggagttcgcggcgcggacgctggaggccggcgagaagggcgccgacgtcaaggacgtggactgggagagcaccttcttcgtccgccacctcccggcctccaacctcgccgacctccccgacgtcgacgaccgctacaggcaggtgatggagcagttcgcatcggagatccggaagctgtcggagaggctgctggacctgctgtgcgagaacctgggcctggagcccgggtacctgaaggcggccttcgcggggtcggacggcccgacgttcggcaccaaggtgagcgcgtacccgccgtgcccgcgcccggacctcgtcgacggcctccgcgcgcacaccgacgccggcggcatcgtgctgctgttccaggacgaccaggtgagcggcctgcagctgctcaggggcggggagtgggtggacgtgccgcccatgcgccacgccatcgtcgccaacgtcggcgaccagctggaggtcatcaccaacgggcggtacaagagcgtcatgcaccgcgtgctcacgcgccccgacggcaaccgcatgtccgtcgcgtccttctacaacccgggcgccgacgccgtcatcttcccggcgcccgcgctcgtcggcgccgccgaggaggaccgcgccgaggccgcgtacccgagcttcgtgttcgaggactacatgaacctgtacgtgcgccacaagttcgaggccaaggagcccaggttcgaggccatgaagtcggccatcgccaccgcgtgagaaagactgccttccgctgccggcttccttcgtggcgtcaagccttgaggcttgaacgaacaacgtacgtccatgtgcttatagtggcacagttgtgtgtgtaactaccgatcgtggaacggcctaatgtatttcggttgcctcagatcgatctatatgtgcgtatacattatgtactcaaaagtgtgtagcgtctggttaatgtacgagcagtgtgtatgtgaccaggacccggtgtgtagttgctattactaccatatccggtgaatgatcaaaccttttggtgtattaaaactagatgttcatccccctcacggactcaccccaggtattgacaaccaaatcggaatatggcatatataat

SEQ ID NO: 129212 - DNA, 1232 bp, Zea Mays
agacggaagcctcagtcaatcacgcccgacggagacggaggagtcgcggaggaggactgagacgcggacgggaacatcgccgccgaggtctaactccaagtgcgccggacgggagtggacgaggaggaggtgactggtgagcgatttggggtgggcggtgacgggcgtcgcaggtgcgcctcacatggtgcgcgatggcgaaatgggacgctcctgtccgtttgatctgggagaatcgatccgtcccgtttctgacgacggggaagcggtcatggcgacggcggagaacaagaggcccaggctcagcagtggagcagagaagaagccaagtaggaaggagattttggaaaggaagaaggccacatatgagcttataagaaaagctgtagctgtgaaggaccatctagctcaattatctgatttccataaatatcagagaaatgtgtacctagagtctggaagtggtcatcaactgagaaaaccaatgaggaagtacatccaaaatcttcttaaggttaacatggaggaaccttatggaccagaatggcttttagaagagaaagttaagcgtcgggagatggtggtcccagaagcacgatatatatttgtgaagcaatattctaatgggtttattactgaaagttccatgaaggaaacggaggtggaacatatgtgtgcagtgtgtcctgaaagctgcttgcttggttttgtacactatagatttgttgtggaagaggagcttcctgttctttatgtgtatgagctacaaatggagccttctgctcagggtaaggggctggggaagtttatgatgcagttgattgaacagatcgcttgcaagaaccaaatgggagctgtgatgctaacagttcagaaagctaacactcaagcgatggctttctataccaagttgagatatgtgatatctagtacctcgccatcgcgagtggaccctcagataggacttgaaaaaagctatgagattctatgcaagacatttgactctgaagctaaatcaaaattagaggatggggactattaagagtttagaatgcgtgatgacggtggtccttttagtatgatctgtagtcctgtgtcactgtaatttattattgacagcgtgatgccttgtccaacttgcattctatttgtctgtagcttcttttggaaactgacacatttgttcttgcgactaatgtcttgctggatgcttaaaagttaaaagttaacaa

SEQ ID NO: 129213 - DNA, 907 bp, Zea Mays
aaatcaaactcacctctgccgcctgcctcctatcttgaagacgacggggaagcggtcatggcgacggcggagaacaagaggcccaggctcagcagtggagcagagaagaagccaatgtacctagagtctggaagtggtcatcaactgagaaaaccaatgaggaagtacatccaaaatcttcttaaggttaacatggaggaaccttatggaccagaatggcttttagaagagaaagttaagcgtcgggagatggtggtcccagaagcacgatatatatttgtgaagcaatattctaatgggtttattactgaaagttccatgaaggaaacggaggtggaacatatgtgtgcagtgtgtcctgaaagctgcttgcttggttttgtacactatagatttgttgtggaagaggagcttcctgttctttatgtgtatgagctacaaatggagccttctgctcagggtaaggggctggggaagtttatgatgcagttgattgaacagatcgcttgcaagaaccaaatgggagctgtgatgctaacagttcagaaagctaacactcaagcgatggctttctataccaagttgagatatgtgatatctagtacctcgccatcgcgagtggaccctcagataggacttgaaaaaagctatgagattctatgcaagacatttgactctgaagctaaatcaaaattagaggatggggactattaagagtttagaatgcgtgatgacggtggtccttttagtatgatctgtagtcctgtgtcactgtaatttattattgacagcgtgatgccttgtccaacttgcattctatttgtctgtagcttcttttggaaactgacacatttgttcttgcgactaatgtcttgctggatgcttaaaagttaaaagttaacaactc

SEQ ID NO: 129214 - DNA, 327 bp, Zea Mays
atggcgcaggagaagcagcatgcgtggcagaggcaggggtgtcgtctccgtggcaggcgtagaatggtcggcgacgacatgggcttgctactattgttgacaaccatgggcgccgcgaggccagatgctcaatcatctctgttcatggtcgacaatatcgacgacaacgccgacaacagccccgtgtctcttacagctttcctctcaccatctccatctctgttggttcacctcgccacgaaccctatgcctagggctgctgctgaccccggcaactatcgtgtgccccaaccccaccacgtgcgagctggcctcaccatgccatga

SEQ ID NO: 129215 - DNA, 1635 bp, Zea Mays
gctagttctccaccccaccatgccgccgcctctccccgccgccggcggatccgccgcgcgcgccatcgccattcgcatgctttccacaaatactgtgcctgtcgaagccgcctccctacctcacactctcgcgttgccgcccatcgccccatcccccgccgccgacgagctcgcgcgcctcctcctcgcgcaccacaaccccttccacccggccgagtccccgctccagctcctctccggcggcggcgtatccctctccggggacctcctggtccagatcctcctccgcctccgtggtgcgtccaagctcgcgctctcgctcctccacgccgcgcgcctccacccgtccttcgtcaacacgcagccccgttccgacgcctacgacgccgtggtcgacgccctcggccgcgcgcgccagttcgacgccgcgtggcgcgtcgtcgtggacgcgtcggcggacggcgccgcttctccacgcacgttcgcggtgctggcgaggagatacgtcgccgcgggtatgaccagacaagcgattcgcgcgttcgacgacatggaggcgtttgtcagcagggagcctgatgccgctgagtttgccacgctgctcgacacgctatgcaagtacaagtaccccaaggttgctacagaggtatttaataaaaggaaatacaagtacgggccaaatgaaaagatgtactctattttaatttatggatggtgcaaggtgaatcggagtgacatggctaagaagttcctaaaagatatgcttgttcatggcatagaaccaaacattgttacatacaacatccttctaaatggtatctgcaggcatgcaagcttgcaccctgattaccgatttgatagaacagttcatgcagcagaggatctcttgaaggagatgcgtggcaggggaattgaaccagatgtaaccagttattcaatcattctgcatgtttacagtcgtgcacataaacctgagttgtgtctctgcatgttccgctcgatgaaagaaagaggcatttgccccacagtggcaacatacacttctgtgataaagtgtctttcctcttgtgggagattggaagatggtgaaattttgcttgatgagatggttgctgagggagtatgtccctccccggctacctacaattgcttcctcaaggagtatcggggaagaaaagatgtgactgctgccttagaactgtataataagatgaaggcacctggttcactgaccgcaccagatattcacacttacaacatactgctgggaatgttcagcaagctgaatcgacatggaactgttatggacatttggagtgatatgtgtgaaagcactgtgggtcctgatcttgattcatacactttgttgatccattgcttttgtgatagtcagaagtggagggaagcatgtcagttcttcatggagatgatcgagaaaggttttcttccccaaaagatcacctttgagacactgtatcgtggtctaatacaagcagatatgctgcggacctggagaaggcttaagagaagggttgatgaagaagcagcaaaatttggcgatgagttcaaactctaccacatgaagccttacaagaggtgaccattcatgattggggtgctgtcatgaacacactt

SEQ ID NO: 129216 - DNA, 402 bp, Zea Mays
atggaggaaatcctcgatccatcgattctctctaggcaattcatggaggaaatcaggtgtgctctggaggaagcacgggaggagcctgatcggaagttgaagacattacagctcccggaggaggaggaggagggttcccgaggcgacaccgtggatgaggaggaggaggaggaggaggaggaggaggagggttcccgaggcgacaccgtggatgaggaggacagcgacgatgagtttaagggtttcgacgagaatggcgacctgtgtctgccattcgtcgtctcctgggatccgccaccagtactagtttgcacggcaggcaatgataacctcgtcgctacccaaattgttttctctatcaaaattcgttatgtttggaaactccacaagcaacatccttag

SEQ ID NO: 129217 - DNA, 2742 bp, Zea Mays
atggacttcggcgacgacgtcatggacggcggctccgacgcgcagcgccgcaagaagagataccaccgccacactccgcgccagattcagcagctcgaggcgatgttcaaggagtgcccgcacccggacgagaaccagcggatgcagctgagcagggagctggggctggagccccggcagatcaagttctggttccagaaccgccggacgcagatgaaggcgcagcacgagcgccaggacaactgtttcctgcgcgcggagaacgacaagatccggtgcgagaacatcgccatgcaggaggcgctccggaacgtcatctgccccacctgcggcggcccgcccgtcgccgacgaccattttgacgagcagaagctgcgcatggagaacgcgcgactcaaagaagagcttgaccgggtgtccagcctgacgtccaagtacctggggcggcccatcacgcagctgccgtcggcgcaggcgctgtccatgtcgtcgctggacctgtccgtcggcgggctcggcggcccgtcgctggacctcgacctcctcagcggcggctcctcggggtatcccccgttccacctcctcccgatggcggtgtcggagatggagcggcccatgatggccgagatggcgacgcgcgccatggacgagctcatcaggatggcgcaggccggcgagcacctgtgggtcaagacgggcggccgcgaggtgctcaatgtcgacacgtacgacagcatcttcgccaagcccgacggctcgttccgcggcccggacgtgcacgtcgagggctcccgcgagacggggctcgtcttcatgagcgccatcggcctcgtcgacatgttcatggactcgagcaagtggacggagctcttccctgccatcgtgtccaaagcgcgcacggtcgacgtcctcgtgaacggcatgggcgggcggagcgagtctttgcttctgatgtacgaggagctgcacgtgatgtcgccggtcgtcccgacgcgcgagttctgcttcctccgctactgcaggcagatcgagcacgggctatgggcgatcgcggacatctcggtggaccagcagcagcgcgacgcgaggttcggcgcgcccccgtcgcgctcgtgccgcctcccgtcgggatgcctcatcgccgacatggccgacggctcgtccaaggtgacctgggtcgagcacatggagatcgaggatcgggttcccatccacctgctctaccgcgacctcgtcctcagcggggcggcgttcggcgcgcaccgttggctcgccgcgctgcagagggcgtgcgagcggtgcgcgtgcctcgccacggccggcattatgccgcaccgggacattgcagcggcaggagatatatctcatcgagagctgcttgcagtgacgccggaagggaagcggagcatgatgaagctgtcgcagcggatggtgaacagcttctgcgcgagccttagcgcgtcgcagctccaccggtggacgacgctgtcggggcccaacgacgtgggcgtccgcgtcatggtgcaccgcagcacggacccggggcagcccagcggcgtggtgctcagcgcggccacgtccatctggctgccggtcccgtgcgaccgggcgtttgcctttgtccgcgacgagcatacgcgctcccagtgggacgtgctgtcgcacggcaacccggtgcaggaggtgtcgcgcatccccaacggctctcaccctggaaactgcatctccttgctgagaggcctgaacgcgagccagaacagcatgctgatcctgcaggagagctgcaccgacgcgtcaggctcgctggtggtgtacgcgccgatcgacatcccggcggccaacgtggtgatgagcggcgaggacccgtccgcgatcccgctcctgccgtccggcttctccatcctgcccgacgggcggcccggcgcgtcgtcgtcgagggccggccaggcgccgtcggcggggtcgctggtgacggtggcgttccagatcctggtgagcagcctgccgtcggcgaagctgaacgccgagtcggtggcgacggtcaacagcctcatcagcaccactgtggagcaaattaaggcggccttgaattgcgccagccattgatggagccctgcccggccgatggatccatatggaattgatgcgtgcgtgcatgcatgcacgcgtaggtctcttctcctcccctcggccggccgcctgccgctcgcctgctggctgctgcgaggagtgaattcccttcaaggcgctggttcgcgacggggttcttggttggttgggggccttcaatgctggccattcatggaggcggggctgctgccatggtgtcgcccgcttggggttcacctgccgctgttgctgcgccgtccgatcacccatgatcattcagctctctctctctctctctcttcccgccactcatgcatgcatgatagcttttcctcttgctctagcatctaggtttcccgttcctgttacaggatttgaagcttgctcgcgaggctttgcatgaaacggaggagtcaagaacgcaccatgctcgtctcattcctcttgctgccgtcacgctcggttgttaattaattccattgctcttttaatttgtgcctcccccctctccctagtttttgcagtctcacattctgtagtctgcagcagaggatgatgaatggttcgggtattgacttctgtctaatggtgttaagccttcaatgatcattagttctacttgttttttagtag

SEQ ID NO: 129218 - DNA, 879 bp, Zea Mays
atttttatggtggcaaaatctcaagatggtattcttcttactttcttataagctatgatcatccgcttcacacaagaagaaattagtcaagaatatatcgtatggctcttttttcgcataacatggtgcatatcttgtgcatgtagcgaaatggcctcaagcgtaatggttaaggcttccgagtagcacctccaggtcccgggttcgatccccctcgggggcgaatttcgggcttggttaaaaaaaatctcctcgctgtatcccgcctgctcccgggttacgtcctgcgcgtcatcctccggctgggctgttgcagagtgggcggtgacggcccgctagtgatggagggctagggttcgggatttttctcggccgggaccatgtttttggtctcttcttaatacaataccgggagggcggtctttctctccccgaccgagtttatcttgtgcatgtagcttagtttttgttgtcgaaactaattccttaaaaaccatggtgatatgctttcagccattttttatgggcagcctatatgtgcaaaaggaattgaacttgccatctggcaatttggtgaggcttatgcctctatatactaccctggcatgggtcctctttgaattgaaattggatgcttgtattcttaaattggcccagttctttttacatactcccatttttagttcatggtcctaaaaattcatagaatgtgatggtatccctagttgctacgacatgacagtatattatctaataccgggatctatttgttggtccctactaattattttggtcatgtcatgtgctggattatttgttatgtaaatttggaaaatgccacactttgttactgctgtttgttttaactctttgcaaact

SEQ ID NO: 129219 - DNA, 444 bp, Zea Mays
ttaaccctgagttatctttacagtgtatccaacaatctccgtctcacactcgacaaatgtagtcaaagggacccttctgtaatcaccttgctctttgctttgtcctttgaatggggtaaagctggatctgacaatagaatacacagcctgtttgagagagctctagctgatgataagttgcagaagtctgtcctattgtggcgctgttatctagcctatgaggcagaaatagtctgcaactcttctgcagcacggcgtgtgttcttcagagctatacatgcctgtccatggtctaaaagattatggcttgatggtttccaaaagttgggctctgttctgacattgaaggagttgtcagatctccaggaagtgatgcgtgacaaggaattaaacatccgcactgacatctatgagatactcctagaagaagaaacaaatacatga

SEQ ID NO: 129220 - DNA, 714 bp, Zea Mays
ggcatgccttggattgacaatcttgccaaatatgaccatgttttactatttttgttctttcaagatggaccttgttggctgccgttctgaatatctcacatgattcattatcggtatatagatagaagtggcttcagtgggcccttcaactgcacgataagatcaatgttaggaaggcctattacaaattcctgtacggaaatcatgccacgaacaaaaccgaaacatcaaaagcagcatatatttttgtttgactatcagtaaagcaactgcagccaggttaggggatcctgcagtgtgcttgagtgtccaaacaaaaaggcttcgaatgtatagcttcacctggcgttttgttgaaggtagaaggggacacgttcctgcaccctacactagcttgctgtactaaacatttactgtggtttgttttttaaaggtccccaaagttatggactttaagatgctggtatatactggctgggagcacagataagagaagtagcagcactgacatgacggcctcagtaagtaataatgttagttttcattcgctgaggatgggtattattgctagctgtgttttgtttgtgcatactgtattgactgttcatttctcgaggattcgagccatctgttgttcatgtgtgcagtgtgcttgtgcatactgtattgagtgttcatttctggaggaatcaagccatctgtttatgtgtgcta

SEQ ID NO: 129221 - DNA, 894 bp, Zea Mays
cgaactcttcccaggaacacccctatatatatagctgcctctgcgcctcggccttcctgcaccaccttccttttcacagccttcgtacaccggagaaccccgcaagaaacctgcagcaggtccgccaggcatggctgccgagaagcgcaccattggcatgggcatggactactcgccctccagcaaggccgccgcgaggtgggcggtcgacaacctgatcaaggccggggaccgtctcgtcctcgtccacgtcctccccaagggcgtggactccagccacaaggagctctggaagaccaccggctcacctttgattcctctctcggagttcatggagatgaacctgcaggcgaggtacgggctcaaccctgataaggagacactggagatcctgcgagctgtatccaagtccaagcaggtggaagtactagcaaaggtttactggggcgatgcaagggagaaactctgtgaggcggtagatgatctcaaggtggactcctttgtgcttggttgcaggggcttagggccactgaaaagggctctccttgggagtgtcagcaactatgtagtcaacaatgcaacatgcccggttacagtggtgcgcggaccaactgggttgagtgcctgatcttttctgtttaatgtggggcttttgtagtgcaaggatcatttagtacaactgggttgatgtcgtttgtgaggatggtgtgttagcacttagctctggtaattagcttcggtgttattacttgacatctgttgtccagttgtgatatctgtgaatttcatctattaaatcttatctacatatatttatgcttttctttgtgaaattatgtaagaaaatttctacatactatatatatgactgtgtcactggtgagtctgttttta

SEQ ID NO: 129222 - DNA, 89 bp, Zea Mays
ctccactgtactttaccactggatgaagatgagccacttcctgatccgcttgagctgctagcagccagagaatccccctcaatctccac

SEQ ID NO: 129223 - DNA, 781 bp, Zea Mays
atgtaatggatcaaaagctatgtgctaatgtaatggatctgtgctgcagtgtttcaaaatgactgatcaggagcgagatgatgttcccatgttgctaagaaatgttgagctaccaagatttcctctaagaagtacttcaatgtgtataccagtcagggatgatgattatgaagaagacacctttgtgccccatactggtcctctattcgtccagccatcaactcagacggcaccgggaatttcatttacaggtagagacacacctgataggcttcctaaaccttcacagggaaaacaagtcagcaagccacatgcaatcatgccagaagaaataagaggaaataagtggtcttacagtgggcaggttccaaagaatgaacacttgatgatgtctgggcctttggggcaatgtgataatcccgactgtgtgaattgccctcctgcttgtaaaaacagaagacattttcagagaggttcaaatgctttagacaataagatccataatattctttatggtcacagtcgtggatggaagaagaagattgagcaaatcatggcatgcattccgattatgaacccacatgcaaagcctgttcagcggtggaatcaattctttgtcatatcatgcctgattgccattttcattgatcccctgttcttcttcttactatcagtacgacaggatggcaactgcatagtgttaaattgggaaattgctacagcgcttgctgttgtgagaagtgtgactgatgctatttatttcctccacatgttgcttcag

SEQ ID NO: 129224 - DNA, 105 bp, Zea Mays
ttttttttaaaaaaaagatgctacgtagtcatactatttattgcccacgagacgagaggagacgatgcagcgtccactgaactggcgggtttgactagaaacggc

SEQ ID NO: 129225 - DNA, 1165 bp, Zea Mays
cagcggataagccacccgcttccgatccgattccacagctcgaccaactctccgcctcccgtcaccacctcgcggctcgcgctctccgatcccgcgcatattctccaccccgtcctctgctccgccccatcagtacatcaccacgcactactaggacgccgcgccgcagccccaccatctccgagaccgagttctgatcgccgccggaaccggtacacggaaagccgtaaaccaatggcgctcctcgcgccgagcccgcgcgcgctctgcgtgcgggaggccgcggcggcgtcgccgcacccgcactcgttggcgaccgccgcctgctcgaccgttggcggcggggtggctgggcgggcgctgtggctgtggaacggcggcgggacggggaggaggaggagggagcgccgggagaggttccgggcggaggcatacttctgggacgtgtccaagccggtggagatggaggagatcgacagcatggagaagctcgacgacgcgctcaggtggtccgtcgagaacaaccagcccatcatcatcgactggtacgagtgattttgcacatgttgcccgacctgcataggtcactctaacttccattggcttgtctggtgtctgtggccattgattcggatgttgattgtcattatagtagaatcgagatgactttttccgcttttatcatatctatctgcatgcttagataatactatcatatctcatcagaagtcgagacgttgtctattgcttccaggatggcaagttggtgtcggaaatgcatatacctggtgcccagaatggagaagatagcaggagaatatcctgggtcagtgtgacttcatccccccagcagaatgttttttcggcacaatttctgagttctgacatatcgatgccttagcaagtaaactggtcctgagttctaaataaagacgtacacgtttcggattatgaaatgtgttgatttttttaaaaatcatgcttcacgtttctgttacagagtcaggttttacttcgtcgatgtcaacaaagttccacaggcggtggtgaaaagaggaaatgtaactgtaagtggaaaattcagaggttatttatgaaaaaattgttggttcaaaatgactctgaaataatccgagtccttcgcctttctgtgtgcatactgcaa

SEQ ID NO: 129226 - DNA, 1196 bp, Zea Mays
cagcggataagccacccgcttccgatccgattccacagctcgaccaactctccgcctcccgtcaccacctcgcggctcgcgctctccgatcccgcgcatattctccaccccgtcctctgctccgccccatcagtacatcaccacgcactactaggacgccgcgccgcagccccaccatctccgagaccgagttctgatcgccgccggaaccggtacacggaaagccgtaaaccaatggcgctcctcgcgccgagcccgcgcgcgctctgcgtgcgggaggccgcggcggcgtcgccgcacccgcactcgttggcgaccgccgcctgctcgaccgttggcggcggggtggctgggcgggcgctgtggctgtggaacggcggcgggacggggaggaggaggagggagcgccgggagaggttccgggcggaggcatacttctgggacgtgtccaagccggtggagatggaggagatcgacagcatggagaagctcgacgacgcgctcaggtggtccgtcgagaacaaccagcccatcatcatcgactggatggcaagttggtgtcggaaatgcatatacctggtgcccagaatggagaagatagcaggagaatatcctggagtcaggttttacttcgtcgatgtcaacaaagttccacaggcggtggtgaaaagaggaaatgtaactaaaatgcccactattcagctctggaaggacggagagtggaaagcagaagtaataggtggtcacaaagcttggcttgtgatggatgaggtcagagaaatgatccagaagaacaagtgacttagcacccatgttatgcaatggccaatggatattgtaccgtgttcaatgtaaatagagatatcagacgatctcttcatatactaagctgaaatcaaacacaaatagagcaaccatgttggaaataaccaaccaaataatactgctccctactccctacgttcagttctctttgtatatgtatgttggaacaagatggatttttatgccagcacaaggaagcaaggagcacattcatattcagttacgcaactacgcaagtatgaagaatagaaagcagaattaataggaaaggcatatggcttgtgaatttgttatccagaagaacctgactcgtgcattgatatagagagatgcgtccaattgatatagattatagagagatgtgtgacgat

SEQ ID NO: 129227 - DNA, 1675 bp, Zea Mays
aagcgaaaaccaaaactgttccccgtagatagagatacacatacacacccgagagggcgacgaaacagacagccggactcaagtcgacgcccggcgaattgcccgatactatggagggagacgatcggagggccccgctgctggcggccggcggcggccgtcccccgtctctgcggcgccgtgactcggcgcggtcgctgcgcagcagcttcctgtcgcggctgcccgacaaggtgcgcgccgggctcgacccggagcacctcgccgacgtcgacctctcccgcgccaaaggcatgtccagaggtaacagacttgcgaggtctgaatctccgatccctcgtccggtcaccccctctcctaccccttcgcctctcccggccgcgtgcaggtgtgagacagtactacgagaagcagctcgcgaccctgaagaccttcgagcaggtggaggcgcgctgcatgcccggcgaattctgcccggcgaattcgattcggatgtcgaggcctccgactcggaggacgcggagcagaagcagagcgagttcgccatgaagatctccaactacgccaatattgtgctgctggtcttcaaggtgtatgcgacgatcaggacggggtccatggcgattgcggcgtccacgctcgactcgttgctggatttcatggccgggggtatcctctggttcacgcacctttccatgaagagggtcaacatctacaagtacccaattgggaagctgcgcgtccagcccgtcgggatcatcgtcttcgccgccatcatggcaactctaggtttccaggtcttggtccaggccgtcgaacagctggtggagaacaaacctggcgagaagatgacatcggagcagctgatatggttgtactccatcatgctttcggcaaccgccgtgaaactggctctctggctctactgcaagagttcagggaacagtattgttcgggcttatgcgaaggaccactacttcgatgtgataaccaatgtcgtcggtctggtggctgctgttcttggggacaaattcctgtggtggattgaccccgcgggggctgtcatacttgctgtatataccatcgtcaactggtccaaaactgtattagaaaatgcagctaccctagtgggccaatgtgctcctccagatatgctgcagttgctaacgtacctcgccatgaagcacgacacacgagtgaggcgggttgacactgttagagcttacagctttggagctctctactttgtagaggttgacatcgaactagcggaagatatgcggctgagagaggcgcacgccatcggtgaatcgctgcaggagagaatcgagaagttgcctcaagtcgagcgggcgtttgttcatatcgatttcgagagcacgcataagcctgagcacaaagtcaggagcagactgccgtctactgatccctgacagatttccgaatgctcatgcatgtagtacattgttaagagatagtagctaatagcccggcgttttcttcgagggttacgagcaacgattcccttcacctgtaaaataaaggtacaggatcaacttttccagtttactgatcctaaccacgcatttgatcgttgactcgatgggtagcctgattgttatataccttcagtttttgcatgcagtatatatgatactgaatggtactatgatgt

SEQ ID NO: 129228 - DNA, 1590 bp, Zea Mays
aagcgaaaaccaaaactgttccccgtagatagagatacacatacacacccgagagggcgacgaaacagacagccggactcaagtcgacgcccggcgaattgcccgatactatggagggagacgatcggagggccccgctgctggcggccggcggcggccgtcccccgtctctgcggcgccgtgactcggcgcggtcgctgcgcagcagcttcctgtcgcggctgcccgacaaggtgcgcgccgggctcgacccggagcacctcgccgacgtcgacctctcccgcgccaaaggcatgtccagaggtgtgagacagtactacgagaagcagctcgcgaccctgaagaccttcgagcaggtggaggcgcgctgcatgcccggcgaattctgcccggcgaattcgattcggatgtcgaggcctccgactcggaggacgcggagcagaagcagagcgagttcgccatgaagatctccaactacgccaatattgtgctgctggtcttcaaggtgtatgcgacgatcaggacggggtccatggcgattgcggcgtccacgctcgactcgttgctggatttcatggccgggggtatcctctggttcacgcacctttccatgaagagggtcaacatctacaagtacccaattgggaagctgcgcgtccagcccgtcgggatcatcgtcttcgccgccatcatggcaactctaggtttccaggtcttggtccaggccgtcgaacagctggtggagaacaaacctggcgagaagatgacatcggagcagctgatatggttgtactccatcatgctttcggcaaccgccgtgaaactggctctctggctctactgcaagagttcagggaacagtattgttcgggcttatgcgaaggaccactacttcgatgtgataaccaatgtcgtcggtctggtggctgctgttcttggggacaaattcctgtggtggattgaccccgcgggggctgtcatacttgctgtatataccatcgtcaactggtccaaaactgtattagaaaatgcagctaccctagtgggccaatgtgctcctccagatatgctgcagttgctaacgtacctcgccatgaagcacgacacacgagtgaggcgggttgacactgttagagcttacagctttggagctctctactttgtagaggttgacatcgaactagcggaagatatgcggctgagagaggcgcacgccatcggtgaatcgctgcaggagagaatcgagaagttgcctcaagtcgagcgggcgtttgttcatatcgatttcgagagcacgcataagcctgagcacaaagtcaggagcagactgccgtctactgatccctgacagatttccgaatgctcatgcatgtagtacattgttaagagatagtagctaatagcccggcgttttcttcgagggttacgagcaacgattcccttcacctgtaaaataaaggtacaggatcaacttttccagtttactgatcctaaccacgcatttgatcgttgactcgatgggtagcctgattgttatataccttcagtttttgcatgcagtatatatgatactgaatggtactatgatgt

SEQ ID NO: 129229 - DNA, 804 bp, Zea Mays
catcaacaacatctccagcaacaaacctgcagcagggatgaggactagtcgcctggtgttcctatttgccatcgtccccctcctgctactgctagcatcatcaggtttgacgccgacgaaggcgtcgtccgccggatgcccgcatccccgttcgatgatcctgtacccagacctgccctgtgatcccgacgtgtgcgccaagagctgcgccaagggattgaacaacggcaacggcacctgcatgaggccgcttggatgtgattgcgagtactgcgtgccagctgcaaccgtcgcaaaacgcccggctgctgtctctacgcgtttgacgacgacgacgacgacaatggcgtcggccggatgcccgcacccccgttcgacgatcctgtacccagacctgccatgcgatcccgacgtgtgtgccaagagttgcgccaagggattgaacaacggcaacggcacctgcatgaggccgattggatgtgattgcgtgttctgcgtgccagaaaccgtcgcaaaacgcccggctgtctctacgcgtttgacgacgacgacgacgacaatggcgtcggccggatgcccgcacccccgttcgacgatcctgtacccagacctgccatgcgatcccgacgtgtgtgccaagagttgcgccaagggattgaacaacggcaacggcacctgcgtgaggccgattggatgtgattgcgtgttctgcgtgccagaaaccgtcgcaaaacgcccggctgtctctacgcgtttgacgacgacgacgacgacaatggcgtcggccggatgcccgcacccccg

SEQ ID NO: 129230 - DNA, 570 bp, Zea Mays
catccgttttccatgcttctatatacaattgtgctttggaaaaatttgggagcccttaaaaccaaactaacccacttcggccaatgtttttttttcttattttagtttttaggtgaaatgaacaagcttgtatgctttaaccatgctatttcattgatgttggctaaccactccataaagtcagcttaatgtcctttgcgtccaaactgaaaaatgtttgcttgctaattggtgccttggcgctagctagaaaagtgggggatgcctgtgatatacattgctcaatttgatgatcctgtttcaaaattcttaaaccattatgtatatcaacttccatttagcattgatgctaccctctcttggtagtatatgaatactagcaggataaatgaactggaattttgcagacaatgttttcctttttttggtttgttttaagacgaggtgaacacacatgtatgtatgttgtaaccatgcgacaagtttctaacaaaacatatcattaatgtagtctaactgctcatatgttagcttgttgatgtcatttgcgtccaacaaaaaagaaaaaaa

SEQ ID NO: 129231 - DNA, 1032 bp, Zea Mays
atggtgtcgaaccccgcaccgtcgtcggcaccgcgctactcggcgtactcgctaccgtcgacccacctccccggagaggacatcctcttctgcatcgacgccgacctcgaggtccacgccaagatgaagtccgctgccgtagcatcctcgggatccacgtccactgcgtcgccgcagtccgtaggagctgatggtgccccggcggtggggacccggactgtggtcgcccgagaaccacccacgttgagactgacgcatcccaagccagataaggatggataccctcacatcttcgattatttcgccgtccaaacacatgatttcctggttcccctttggcttcctccagatcttgccttcgcccgcatcgaccatcgcgccgctgccgtgacctaccatggagctctgcctcgccgcgcgcgccgggacgatggcggccgcgtgccggaggatggcaccgacgataggcgtgccgaagaagaggcacgacggtggcactgtgcgcgtacgttgcgtggtgacgacgcccatgggggagaagacggagtaccgggacggcccgctggagcgtgcgttcatggggctgttcgcgcgaagatggagaagtacgcggcgaagaagtcggcggcgcaggcgaaggagaagagggcggtgtgggagtgggactacgagagcttcgtggacgtgtcgtggcggttccggcggctgttcccgccgacgcggtgggcctgcgagttcaacacggcgctgaccgtgcccttcttccgatggctcgtgggcccctcggaggtggaggtcggcggcctccggcagcgcagcgaggtgcgcatcgagaagtgccggtacctggagagcagcggctgcgtggggatgtgcgtcaacatgtgcaaggtccccacacaggacttcttcaccaacgagttcgggctccccctcaccatggacccaagtacgaggttttcaaaaatccgagcattagtgatgtcctgtgcacaacaacagcagaggctcttgcaatggggaaattcgtga

SEQ ID NO: 129232 - DNA, 2234 bp, Zea Mays
cttgcggtgagaaacacggtgtcgccctcgaggctcgaccccgaccttttcctcccctcttctctagatcgcgacgaggcggactccccactcctgctgcccggagcgaagcggaccgcgtccccgccgcgtggcctgatcgatccctcagctctgccggtcgggccaatgctgcgtgcatcgagctgccgctgatcacgttcttcgcggttgcggcccccagtttgtgcggtgtggcgttggcggaaccttgtggaggctagttgctccaggactttgattttgacttatctatggaaatggatgactcacatggcaccatggttaataaaagtgaagagaatgactttgaaaagaaaggcacttctgatcctgtggtttatcagctagttcgggttgaaggtgatggaacacttgttcctgctacagaggatgatgttttgcagtttgaacatttccttcacaacgagaaggttgatcttcctcctattgaagatgcagaccatgtggaagagtttttcaacaatgactgcatgttactgaagaagcctgacttggaagatggatcttccaaattggagactgtggaagcacacacacaaaaattgggtgccaacttagaggaaaacatattacagtcattggatgattcccttagtcctccctcagactttagaattcatagtcagcattcagataaattgcttacagaacaaggggcaaacgtcactcgacaggacaatgcttcaactgagactacaaaatcgacagtgttaaatgactcttgctgtgctgaaaaatataaggctgatgcctgctcaagatctgtatgcgacacatctacagatccatctgtttcgggagttaatagttccatgcctgatttttccatattaagaggagaagtctgtttggatgatcttactattagagaacttcaggaggcgtttagagccacgtttggccggcagactaatgtcaaagacaagatatggctcaaaagacggattacaatgggcttgactaattcctacgatgttccaagttcaggttgtgtagttaaagactacaaaattgttggcaaggatgccaaaaatgatatgtcagacatggatgaaagagctaagactgggcttagagctacttctgtggttatatatccaggaaacgaaggggactctccatctagctcttactatcagagcgaggaccaggaagattcttccaagagggtgccgatccataatgatgaaccacaaggaaatctgctaggcgagcaatgcactgacaagcgaactagaaagccaacaaaaagatacatagaggagctatcagacattgagactcatgactcaactgtaaaaaattcttcaccagcaaaaaggcctgcacatgatgaactgttaatgaacccgcgagtagcacctttcaatgagactggttctctgggcacaatctatcctactagaaaggatacctttggaggatttagtgtacacgttccttacgtttcaaggatgagaagggggcgccctaggaaggacttcatttcatttgcggtaacaatctacgataagggaccctcggttgaacctaaagggattcagccatcagttgagatgatattagtgaaggatggtgacaagggaaaccacctgaggaaagtacctgaggttccactaaaggttagttctgagaacgagcatgcagaagcagttgatagcaaaggggttcggaacctacaagcaaaggtctgcagtgctgtttccaagcctaaaataaagcatggtttaacgcggaagcatcatcgagcatggacattgagtgaggtcgtgaagctggtggatggtgtggctcggtatggagctggcaagtggtctgagattagaaaactgtccttcgcctcgtattcctaccgcacttcagtggatctcaaggataaatggcgtaatctgatcagagcaacccagacacagcttccggcgcaaaaagatggtgcctgtccacggaagactaacccttctatcataccaataccaccatccattttgttgcgagtgaaggagctacatgagctgcagtcgcaagggggtggcttcacagccccagtcaagttctctgggcaggacggcaaggttctacagggaaaaggctcgggttttttgtgatccgtgtaatgcagatatacgtgtacgcttctggacgatgtggtatatatgagtaaatattatttg

SEQ ID NO: 129233 - DNA, 3159 bp, Zea Mays
gcggctccggccatggcccgcctcctccgggccctcgctgccctcctcgtcctcctcctcgcggccgcctccgtcgccgtcgccgacgacggagaaacactgctggagatcaagaaatccttccgcgacggcggcaacgcgctgtacgattggtccggcgacggcgcgtcgccgggctactgctcgtggcgcggcgtgctatgcgacaacgtcaccttcgctgtcgcggcgctcaacctctctgggctcaatctcgagggtgaaatctcagcggccatcgggagtctgcaacgtcttgtctcaatcgatttgaagtcgaatggactctctggacagatccccgatgagattggtgattgttctttgctcgaaactttggatttgtcatctaacaatctagaaggagacataccattctccatgtccaagctgaagcaccttgagaacttgattttgaagaacaacaaactggtgggagtgatcccatcgacactctctcaacttccaaatttgaagatattggacttggctcaaaacaagttaagtggtgaaattccgaatctaatatattggaatgaggttcttcaatacttgggattgcgaagcaatagtttagaaggaagcctctctcccgatatgtgccagttaactggtctgtggtactttgatgtgaagaacaatagcttgacgggtgcaataccagaaaccatagggaactgtacgagctttcaggtcttagatttgtcaaacaatcatcttactggagaaatcccgttcaatattggtttcctgcaagtggctacgttatctttgcaagggaacaagttctctggtcctataccatcagtgattggccttatgcaggcgcttgcagtgctagatctgagtttcaatgagctatctggcccaataccctctatactgggcaacttgacatacactgagaaattatacctgcaaggcaataggttaactggattgataccgccagagcttggtaatatgtcgacactgcattacctggaactgaacgacaatctgttgactgggttcattcctcctgatcttggaaaacttacagaattgtttgaattgaaccttgcaaacaacaaccttataggacctatccctgagaatttaagttcatgtgcaaatctcattagtttcaatgcttatggcaataaattgaatggaaccattccacgttcatttcacaagcttgagagtctgacttatctgaatctgtcatcaaatcatctcagtggagcacttccaattgaggttgcaagaatgagaaatttggacactctggacttatcctgtaacatgatcactggttcaattccctcggctattgggaaactagagcatcttttgaggctcaacttaagcaaaaataatgtggctggacacattcctgctgaatttgggaacttaaggagcatcatggagattgatttgtcttacaaccacctcagtggcctgattcctcaagaggttgggatgctacaaaatttgatactgttaaaattagaaagcaataatattactggagatgtctcttcacttatttactgcttgagtctcaatatcttaaatgtatcatacaaccatctttatggtactgtacctacagacaacaacttctcacgattttcacccgacagcttcttgggtaaccctggactttgtggctattggcttcactctgcttcatgcacacaattatccaatgcagagcaaatgaagagatcctctagcgcaaaggcctcaatgtttgcagctattggtgttggtgccgtattgcttgttattatgctcgttatcctagtagttatttgctggccacataactctccagtgctcaaagatgtctctgtaaacaaaccagcatcaaacaacattcatcccaagcttgtgatcctccacatgaacatggccctctatgtatatgatgatataatgaggatgactgaaaacttgagcgaaaaatacattattggttatggagcctcaagtacagtctacagatgcgacctgaagaactgcaagccaattgcgattaaaaagctgtatgctcactaccctcagagcttgaaggaattcgagactgaacttgagactgttggaagcatcaaacaccggaatcttgtaagccttcaggggtactccctgtcaccatctgggaatctcctcttctatgattacatggaaaatggcagcctctgggacattttacatgcagcttcatcgaagaaaaagaaactcgattgggaggctcgcctcaagattgctctcggagctgctcaaggcctggcttatcttcaccatgaatgcagtccacgaataatccacagggatgtgaagtcaaagaatatcctcctagacaaagactacgaggctcatcttgctgacttcggtattgccaagagcttgtgtgtgtcgaagacgcacacatcaacgtacgtgatgggcaccattggctacattgaccctgagtatgcacggacatcccggatcaacgagaaatcggatgtgtacagctacggcattgtcttgctggagctgcttaccggcaaaaagcctgtcgacgacgagtgcaaccttcaccacttgatcctatccaaagccgcagagaacacggtcatggagacggtagaccaggacatcaccgacacgtgcaaggacctcggcgaggtcaagaaggtgttccagctggcgctcctttgcagcaagaggcagccgtcggatcgaccgaccatgcacgaggtcgcgcgcgtcctggacagcctcgtctgcccagcaggcccgcccccgaagcaggcgcaggcgcaggcacaggcacaggcgtcggagaagccgtccaccacggcgccgagctatgtcagcgagtacgtcggcctacgaggcggcggcggcggcagcgccctctcctgcaccaactcgtcgagcgcgtccgacgccgagctcttcatgaagtttggcgaggtgatctcgcggagcacggaatagtccaatagatcgacgatcattttgtgttacagtttacaataggtgtctggccggcgccctgtgatgtgactcgctgtaaatatgctgctgccttctcgttgggactccactaggcactagtagctatttttctccgttatgcacgtc

SEQ ID NO: 129234 - DNA, 3379 bp, Zea Mays
catctggtgttcatgcgctttgcattgtgtaaaaatgcgtttttactgccatttcgtgtgcttggacgctcttctctttctgttctggccgtaaaacctggtgtttgttttctttgtatgttaatttgttattccgcttacattcattttttccttgcgtaacgaactccgttattttttccgtaactttcttatcgattcttcttcttctgtggtgctgccactgcttttactaatccaggagaaacactgctggagatcaagaaatccttccgcgacggcggcaacgcgctgtacgattggtccggcgacggcgcgtcgccgggctactgctcgtggcgcggcgtgctatgcgacaacgtcaccttcgctgtcgcggcgctcaacctctctgggctcaatctcgagggtgaaatctcagcggccatcgggagtctgcaacgtcttgtctcaatcgatttgaagtcgaatggactctctggacagatccccgatgagattggtgattgttctttgctcgaaactttggatttgtcatctaacaatctagaaggagacataccattctccatgtccaagctgaagcaccttgagaacttgattttgaagaacaacaaactggtgggagtgatcccatcgacactctctcaacttccaaatttgaagatattggacttggctcaaaacaagttaagtggtgaaattccgaatctaatatattggaatgaggttcttcaatacttgggattgcgaagcaatagtttagaaggaagcctctctcccgatatgtgccagttaactgtgatgtgaagaacaatagcttgacgggtgcaataccagaaaccatagggaactgtacgagctttcagagatttgtcaaacaatcatcttactggagaaatcccgttcaatattggtttcctgcaagtggctacgttatctttgcaagggaacaagttctctggtcctataccatcagtgattggccttatgcaggcgcttgcagtgctagatctgagtttcaatgagctatctggcccaataccctctatactgggcaacttgacatacactgagaaattatacctgcaaggcaataggttaactggattgataccgccagagcttggtaatatgtcgacactgcattacctggaactgaacgacaatctgttgactgggttcattcctcctgatcttggaaaacttacagaattgtttgaattgaaccttgcaaacaacaaccttataggacctatccctgagaatttaagttcatgtgcaaatctcattagtttcaatgcttatggcaataaattgaatggaaccattccacgttcatttcacaagcttgagagtctgacttatctgaatctgtcatcaaatcatctcagtggagcacttccaattgaggttgcaagaatgagaaatttggacactctggacttatcctgtaacatgatcactggttcaattccctcggctattgggaaactagagcatcttttgaggctcaacttaagcaaaaataatgtggctggacacattcctgctgaatttgggaacttaaggagcatcatggagattgatttgtcttacaaccacctcagtggcctgattcctcaagaggttgggatgctacaaaatttgatactgttaaaattagaaagcaataatattactggagatgtctcttcacttatttactgcttgagtctcaatatcttaaatgtatcatacaaccatctttatggtactgtacctacagacaacaacttctcacgattttcacccgacagcttcttgggtaaccctggactttgtggctattggcttcactctgcttcatgcacacaattatccaatgcagagcaaatgaagagatcctctagcgcaaaggcctcaatgtttgcagctattggtgttggtgccgtattgcttgttattatgctcgttatcctagtagttatttgctggccacataactctccagtgctcaaagatgtctctgtaaacaaaccagataaccttgcttcagcatcaaacaacattcatcccaagcttgtgatcctccacatgaacatggccctctatgtatatgatgatataatgaggatgactgaaaacttgagcgaaaaatacattattggttatggagcctcaagtacagtctacagatgcgacctgaagaactgcaagccaattgcgattaaaaagctgtatgctcactaccctcagagcttgaaggaattcgagactgaacttgagactgttggaagcatcaaacaccggaatcttgtaagccttcaggggtactccctgtcaccatctgggaatctcctcttctatgattacatggaaaatggcagcctctgggacattttacatgcttcatcgaagaaaaagaaactcgattgggaggctcgcctcaagattgctctcggagctgctcaaggcctggcttatcttcaccatgaatgcagtccacgaataatccacagggatgtgaagtcaaagaatatcctcctagacaaagactacgaggctcatcttgctgacttcggtattgccaagagcttgtgtgtgtcgaagacgcacacatcaacgtacgtgatgggcaccattggctacattgaccctgagtatgcacggacatcccggatcaacgagaaatcggatgtgtacagctacggcattgtcttgctggagctgcttaccggcaaaaagcctgtcgacgacgagtgcaaccttcaccacttgatcctatccaaagccgcagagaacacggtcatggagacggtagaccaggacatcaccgacacgtgcaaggacctcggcgaggtcaagaaggtgttccagctggcgctcctttgcagcaagaggcagccgtcggatcgaccgaccatgcacgaggtcgcgcgcgtcctggacagcctcgtctgcccagcaggcccgcccccgaagcaggcgcaggcgcaggcacaggcacaggcgtcggagaagccgtccaccacggcgccgagctatgtcagcgagtacgtcggcctacgaggcggcggcggcggcagcgccctctcctgcaccaactcgtcgagcgcgtccgacgccgagctcttcatgaagtttggcgaggtgatctcgcggagcacggaatagtccaatagatcgacgatcattttgtgttacagtttacaataggtgtctggccggcgccctgtgatgtgactcgctgtaaatatgctgctgccttctcgttgggactccactaggcactagtagctatttttctccgttatgcacgtctctctctttttttttgctgggaaactcgaactgtaactaaaggaatggatttatgtgcaggctgcgtttactgaca

SEQ ID NO: 129235 - DNA, 180 bp, Zea Mays
aataggcagcaagtgaatgggttcacaaaatactttgcaatcagcttcttttggagcttcttccagtggttttactcaggtggagacaactgtgggttttcacagttttccacttttggacttagagcttggaaacaaacgtaacacaagtcttttggttcattagtggtttaaattagt

SEQ ID NO: 129236 - DNA, 804 bp, Zea Mays
acactcccattcgctcccagccgccagtacactcttctccccgccgccgcctcccctcccctcccctccctgttccctccctcacctctcgtcctcgaagcaagggtttccctgcccctggctgcctctcgtccgttctccttctctaccgccgccacaactcgcccgccgccccggcctcaccgccggcaacgtgacacgacaagcccgcccctttattcttgcagctatactccgatggccctcgtgaagtccgacgctgaggaggactggtccgactctgacttcgatgatgcctccgactccgaggtcgccgaagctctggactggctcgacgccgtggagggccctgacggctcagctcgcccccacgtcgccttcttctcggcctccggaggcggggctgcggcgcggaggcctaacgcacacggcggcgtgctgtctcgcccgctccagccgttgtctaaccggacccagaagctggcctcgcacattagtgctactcccttggaggagtgggaaggtaggatgaacgtggcgatgtcaaattccgtcacaactgcaatcagggatagcataagggacacagctattgggaaaataaggaacactgagaaggctgatcgtgctacagtggaacaggctattgacccaagaacacgcatggttttattcaagatgttaaaccgtggtgtctttaataacataaatggctgcatttctacagggaaagaggtagctttaagatacaatattatagtgcatattggaatgacttcttatattgtgtatcaagaaacataa

SEQ ID NO: 129237 - DNA, 2104 bp, Zea Mays
aggacactcttctccccggcgcagtcaggacactcttcttctcaccgccgcgagcactgctctgggcgcgcgccgcctaccctcccctcttccctccctcacctctcgtcctcgaagcaagggtttccctgccccaggctgcctctcgtccgttctccttctctaccgccgccacaactcgcccgccgccccgccctcaccgccggcaacgtgacacgacaagcccacccctttattcctgcagctatactccgatggccctcgtgaagtccgacgctgaggaggagtggtccgactctgacttcgatgatgcctccgactccgaggtcgccgaagctctggactggctcgacgccgtggagggccctgacggctcagctcgcccccacgtcgccttctcggcctccggaggcggggctgcggcgcggaggcctaacgcacacggcggcgtgctgtctcgcccgctccagccgctgtctaaccggacccagaagctggcctcgcacattagtgctactcccttggaggagtgggaaggtaggatgaacgttgcgatgtcaaattccgtcacaactgcaatcagggatagcataagggacacagctattgggaaaataaggaacactgagaaggctgatcgtgctacagtggaacaggctattgacccaagaacacgcatggttttattcaagatgttaaaccgtggtgtctttaataacataaatggctgcatttctacagggaaagaggcaaatgtctatcatgcaacaaagacggatggccaggagcttgcaattaaagtctacaaaacctctgtccttgtttttaaggatagagaccgatatgtccaaggagattatcgttttagacatggttactgcaagcataatcctcggaaaatggttaagacctgggctgaaaaggaaatgagaaatcttctacgagtgagggcagctggaatccgatgccctgcaccattactcctaaggcttcatgtactggtgatggaattcatagggaaaggaggctgggctgctcctcgtctcaaggacgctgctttgtcagatgacaagttgcatgaaagttactttgagataattacaacaatgcggactctttaccaaacgtgcaaactggtccatggtgatttgagtgaatacaatattctatattttgagggtcacttgtatattattgatgtttcacaatccgtcgatcttgatcacccttcagctttggattttctgaaggaagattgcttgcatgtttctgacttctttaaaaaacgtggtgttcctgtcatgacagtaacggatttgtttaattttgttattgatcaaagcatttctgatgaagatgttgatgattacctggaaaaggctcagcaaaagattttggaaaatggtggtgcggttccaaatgatgatgaaattactcctacagtcatggtgcagacgttggactacgtgaagcaatgtgaggcagatattgtcaacatgtcaataatgcaacgttcatcctctggctatgagccaaccgcagataagctttatgaccaaccattgttagggtttgtgcggactaaaaacacaaacactgaaaaggagcaaggacaaccggcacgaaacttagttgaggttgaagaagacgagagcgaatcttgcttgagttctgatgaagatgattcgtggcacgaggatgatcctaaggtgggacccgaggaaaggaaggctgctcggaaggaaaacaagaagaaagtgaaggaagagaagagggaggcccgcaagaccaagatcccaaaagctgagaagaagaagaggaagaaaatggcgaaggcaaaatgcaagcggtagcgaatatctatgaacaatccagtagttaactccgtcagtagagatggataacttcgtcgtgaatcaaacaagatgatggataacttcattgtgaatcaaacaagatagcctttatgagggagtgcaggttggaagtttggttcacagcgctactttacacatcacaagattattcacgatgttttcaacctttttgttcgtttcaattttgtagagaactactgtacgtaatgtgaccacatatatgttta

SEQ ID NO: 129238 - DNA, 1305 bp, Zea Mays
ggctgccgccgaatggaagccgcctcatgctgccgcgtcttctccacgcagcggtgccgcttcccgctccgcaggctgtcggcgccgccgtggccgcagccgttctgcaccgagtccagcggcggcctcgtcaccccgtcggcctccaagcggaggtccaggggccccgtcatggccgcgaagaaggccgcggagggcgaaaaacaagaagatggaaaatacaagcacactgtggatctcccgaaaacaacatttgggctgagagcgaattctgtacagcgggagccagagctccaaaaattatgggacgataatcaggttctgaaaagggtttctgaaaggaacactgggactgcttttgttctccacgatggccctccctatgctaatggtgatcttcacatgggccatgcgctcaataaaatcctcaaggattttataaatcgctacaagctgcttcagaatcataaagtgtcctttgttcctggttgggattgccacggccttccaatagaactaaaagttttgaagtcaatggataaggaaactttgagtgctcttacacccataaaattaagacaaaaagctgcaaaatttgctaaagcaacagtcgatgcacaaatgaaatctttcaagcggtatggtgtatgggccgattgggacaacccttacctaactctgtcaccggaatacgaagctgctcagttggaagtgtttgggcaaatggttatgaaaggatatatctatagaggacgaaagcctgtccattggagtccatcatcacgtacggctttggcagaagctgaactggagtattccgaaaatcacatttccagaagcatatatgccgcattcaagattactaatccatctaaatctgggatgctagacgatttttttccaaatgtatctttggtcatatggaccaccactccatggacaattccggctaatgctgctgttgctgtgaacccaaagcttatttatgcagtagctgaggtacagtctgtatttgaaagtgagtcaacatccggtggtaaacaaagaaaagttggaaatatattgagttctgagaaaggaaaactgttcgttattgtggcttctgatcttatcacaactcttgagtccaaatggggtgtgaagcttgtagtacacaaatcatttcccggatctgccttggagcactgcaggtatgcccatcctgtgaatagcaacgaatgttccgtcattctaggaggagattacattacaactgaatcgggcactggccttgttcatactgcccctggccatggccaggaagac

SEQ ID NO: 129239 - DNA, 2260 bp, Zea Mays
caggtttgaagtatgggcttcctatcatttctcctgtggacgatgaagggaacttcacggctgaagctggacagttcggtggtttgtctgtcctgggggctggcaatgctgcagttgtgaagtatctggatgaacagtattcactcattttagaggaaccatacaaacacaagtacccctatgactggagatctaaagaaccaactatattccgagcaactgagcagtggtttgcatctgtggatggttttcgtgatgctgcaatggatgcaatcagacgagtaacttgggttccttctcaggcacaaaacaggattgttgccatgacctctagccgttctgattggtgtatttcacggcagagaacttggggtgtccctattccagttttttaccatgtggactcacaggaacctcttataactgaagaaacgattgaacacatcaaggctattgtgttgaagaaaggtagcgatgcatggtggtatatgacaactgaggaacttcttccagatagatatcgggacaaagcatctgaatatcgcaagggaactgatacaatggatgtttggtttgactctggctcttcatgggcagctgttttagcaaaaagggacggtcttaattttcctgcggatatttatcttgaaggttcagatcaacatcgtggatggttccagagctcattgttgactagcattgctacaacagggaaggctccctactccagtgttattacacatggatttgtactggatgaaaagggtttcaaaatgagtaaatcaattggtaatgtagtggacccagagaaaatcattgttggtggcaaaaaccatagggaagaacctggctatggagcagatgttctccgtctatgggtttctagtgttgattacactacagatgtgttgattggcccacaaatcttgcgccagatgtctgacatgtatagaaaactacgaggcacgatgcgatttcttttgtcgaatctccatgattggaagccggataattctgtgccgtacaatgatctgccaaaaatcgacaagtatgcacttttccatttggagactgtcatgacttccatgaaggatagttatgaaagttatcaattctataaagtataccagatccttcaaagatttgctactgttggtttgtccaatttctatttggatgttgcaaaggatcgcctttatgttggaggccgagtcagcttcacaaggaaaagttgtcagactgtgctcatggcacatctgctctaccttgttagggccatttccccgattatgcctcacctagctgaggatgtctggcagaacctaccctttcaatacaccttgcaggatggatcccttgcaaactttgtttttgatctgaaatggccagaaaagaatgaagaatggctctcggccccgaaggatgatgttgatttcctgggtgttatcctggagttgaggtcagaggtcaacaaaattttggagaatgctcgcactggaaagttgattggttctagcttagatgcaaaggtttatctccataccgaaagttcagatacggtattaaagctaaaggagctatcttctgcatccaatgatgcagacgctctgcatcgcctgtttatcacatctcaggtcgatattcttccaatcctaaatgaagagattacatcatctgtaccatacacaggaaagttcagtaacccacgcactggagtcatatggattggtgtgactcgtgcggatggtgcaaaatgtgagaggtgttggaattacacacaggacgttggatctttccatgaccatcctactctctgcgttcggtgctatggtgtcattgagttgcagacacaacctgcggccgcagctgtcagttgaaaggagtgatgttaacgtatcctatcgaaccatctaattttgaggatcattggtggaattcattcttttggagagctttcacgctaccatgtggcggtagcctgggactccagcttgaatcaagttttgcatgcagcaagctgtactttagattcttcatacataggtcacgagagttgtttggagcttgggtcatcgcttactttcccatactactggggggcttatttggaacagttttttacacaaaactcctgacctgtaaatcaattttggaaaaccgtatccggtggtcgatccatgtattaatagagtaataatgttactatgttcatccaaatctcaaagacgtgatggttgtgttgaaaaaacagcttgaatca

SEQ ID NO: 129240 - DNA, 1825 bp, Zea Mays
ccaccgcgccgcgtcatcttcttccttcagcgttgagcggaatcgcgaattgaaaacggaagttaccaattcacccgactcgatagacacaccggctctgctctaagcgagaatccgaggagcgctgccaagcgcctccgcgacgggatcgacgcgacttgattcgcgagtttcaacgtcgcgaggagagcagaaaattacgcaggcagagcggctgccggctgggtgttgaagctagagcggctaggagcaggttcggagcgctaccaaacaggcccttaacctaagcgctcctgcccttcggatccggaagttggaggcgcgcgaggaggcgaggcttgcaaggtctcccttgctagacggcaacggggtgacgatggcgcacgagcggggcgccgccgcatccgcccacccagcggctccaacctccgaggaagacgcgctgtttattgatttattacatgaagcgcccctgtctggtcaccgggagcctagaagcatagttggtgggaccttgtactgtatcttattggtaggttttgctgctgttgccatttcagctccatggatatttcttttcgcgccagatatgatctctccattgctatgtagctccaatgctatcctcctcgttcttacaggcatttttcaacaatattgggttcaccaggtcaggaaagtgagattgcagggctattacgattttagccagaaactgaagcgtattgctcgacttccatttgctactattgcttgtgggactgctttgatgctcttaatcatggtctggcaacctcttttacaaatactatcagtttcactgcttctcaggattgccattgtagttgaagtcacgtgtgctggatgttttatgggcttatatttatggcacatccacaaatacaactctttgaatgggcagcctgatattttgcggtcattatattctgcactccaaccatctaatactttggaagatcgaagatatcatgatgcccgtctttctgatcagcagatggcgttacttcagtaccaaagagagaatatccattatctgagtgaggaggttctccgcttgcaagaatgcttaagcaaataccagagaactgctggaaccactcctcaggttgatcttgcccatcttttagcaactcgtgatcaagaactccgagcactcactgctgagatgaatcaagtgcactccgaacttcaacatgcccgtggtttgatcgatgaaaaggattcagagctccagcgtatccgtctgagcaacaaccagtatgttgaagaaaacgataggctcagagctattctcggtgagtggagtgctcgagccgcaaagcttgaacgtgcattggaggcagagcgggtgtcaaacgtcgaattgaggaaaaatattgcaaagtttagaggtcatttgtacaaagagcaggaggcctgacttcggtatgttatagctggttccagaattttacctaagacacctgactaaaggcacaatttttgatatagaagggtatctcggtctggatccattcgaactgagattggcacgtgattgttcgatgacgcatggaatatgcgtctagtggtttgtagaatgcgtagtttgatgtacatgtgttcgtaggtttgagcatgtagagtatggtatccctcgggaaaaaaaaggagtatggtattcatgtggttgaagactgctgagtattgtgaacatggtagtgtcttgtggggtgtggttcgcaggagacaagaggaggaggttgcagcactggtcgttcttgtaggtgtgcggcagataggattatgcgtactaactgaagag

SEQ ID NO: 129241 - DNA, 1897 bp, Zea Mays
ccaccgcgccgcgtcatcttcttccttcagcgttgagcggaatcgcgaattgaaaacggaagttaccaattcacccgactcgatagacacaccggctctgctctaagcgagaatccgaggagcgctgccaagcgcctccgcgacgggatcgacgcgacttgattcgcgagtttcaacgtcgcgaggagagcagaaaattacgcaggcagagcggctgccggctgggtgttgaagctagagcggctaggagcaggttcggagcgctaccaaacaggcccttaacctaagcgctcctgcccttcggatccggaagttggaggcgcgcgaggaggcgaggcttgcaaggtctcccttgctagacggcaacggggtgacgatggcgcacgagcggggcgccgccgcatccgcccacccagcggctccaacctccgaggaagacgcgctgtttattgatttattacatgaagcgcccctgtctggtcaccgggagcctagaagcatagttggtgggaccttgtactgtatcttattggtaggttttgctgctgttgccatttcagctccatggatatttcttttcgcgccagatatgatctctccattgctatgtagctccaatgctatcctcctcgttcttacaggcatttttcaacaatattgggttcaccaggtcaggaaagtgagattgcagggctattacgattttagccagaaactgaagcgtattgctcgacttccatttgctactattgcttgtgggactgctttgatgctcttaatcatggtctggcaacctcttttacaaatactatcagtttcactgcttctcaggattgccattgtagttgaagtcacgtgtgctggatgttttatgggcttatatttatggcacatccacaaatacaactctttgaatgggcagcctgatattttgcggtcattatattctgcactccaaccatctaatactttggaagatcgaagatatcatgatgcccgtctttctgatcagcagatggcgttacttcagtaccaaagagagaatatccattatctgagtgaggaggttctccgcttgcaagaatgcttaagcaaataccagagaactgctggaaccactcctcaggttgatcttgcccatcttttagcaactcgtgatcaagaactccgagcactcactgctgagatgaatcaagtgcactccgaacttcaacatgcccgtggtttgatcgatgaaaaggattcagagctccagcgtatccgtctgagcaacaaccagtatgttgaagaaaacgataggctcagagctattctcggtgagtggagtgctcgagccgcaaagcttgaacgtgcattggaggcagagcgggtgtcaaacgtcgaattgaggaaaaatattgcaaagtttagaggtcatttgtacaaagagcaggaggcctgacttcggagacaagaggaggaggttgcagcactggtcgttcttgtaggtgtgcggcagataggattatgcgtactaactgaagaggcagctaggcaagaatcttaacacaaacaagaagaacaggatcgcccctccgactctaatcaatagagttcattacagataagcgacgcagtgcgatgaaatgtaccacctacattcacagacccagttgggcgtaccgttgaagcctcatgggccactcgcgcctgaacccagttgccactatagttttcttcttcggatttgtttgttttttcattctattttctattctattctgtgtgactttcttttctttgttgtttagggctcatttgataataattcagattggttcatatcaatgttctctaaaaaaacgttccagatgacgaatcggaattgcttaaccatttgactgtagaattagaatca

SEQ ID NO: 129242 - DNA, 1330 bp, Zea Mays
gccccgaaggccgagggaagtgtacgcgcctagcgaccagcatagattcgttccacgcctacctcctgccctcgcccgtgctctcagatctcgcgcgcgccccgcaaagggtaactttgagccatgggcacagttgtggatgctccagcagttgtggctgaagaggtcactgagaacatgttgggtggtaagaaagttacagctgtatttgttctaggtggtcctggaagtggaaaaggcacacagtgtgccaacattgtggaacactttggattcacccatcttagtgctggagatcttttgcgtgcagagattaaatctggctctgagaatggaaccatgattgaaaacatgataaaggagggaaagattgttccatcagaggtgactataaagctgttgcaggaggcaatgataaaaaatgaaaatgacaaattcctgatcgacggatttccaaggaatgaggagaatcgtgcagcatttgagaatgttaccaaaatttctcctgcatttgtgctattctttgactgttctgagaaagagatggagaaacgtctcttggggcgcaatcagggaagagttgatgataacattgaaactatcaaaaaaaggttcaaaacctttgttgagtcaagtttgcctgtcattgagcattacaactcaagggacaaggttaaaaagattgatgctgcaaaaccaattcctgaggtgtttgaagacgtcaaaaccatttttgccccatatgctccaaaggctgaatagagcagtctaaaagggacatgataaaggtgtcataggcaacacacaaacatatatgtgattatgaacccttcaatatagaacagaagttttggctcatatgagctaccagcgcatcagtaggcaattcgatttgttatcagcaatatttagatctgattctcaggggtcctgctagagtaacattttaccactgttgtttatgtatatcctttgatgttgtgttgtaccaatgtggaatttactttagggctagtttggacatggaaatacaggggatccatcaggcctgaggcaggaatccccttgttatttataaattaataagaggattcctgcctcatggattctctccattttcctatccaccaaaccagcccttatagagcaatgagaccttgtgcgatcccatcagatttcttgtggcattatggaaagtataaaactgctgccatattctttatacgttgaaatatgttcattgcactgaacatttgttttgatgactttgtatgtatataataccctcccaacagtaagtatctaagcttagcaagcctcttgtagttgt

SEQ ID NO: 129243 - DNA, 1529 bp, Zea Mays
gccccgaaggccgagggaagtgtacgcgcctagcgaccagcatagattcgttccacgcctacctcctgccctcgcccgtgctctcagatctcgcgcgcgccccgcaaagggtaactttgagccatgggcacagttgtggatgctccagcagttgtggctgaagaggtcactgagaacatgttgggtggtaagaaagttacagctgtatttgttctaggtggtcctggaagtggaaaaggcacacagtgtgccaacattgtggaacactttggattcacccatcttagtgctggagatcttttgcgtgcagagattaaatctggctctgagaatggaaccatgattgaaaacatgataaaggagggaaagattgttccatcagaggtgactataaagctgttgcaggaggcaatgataaaaaatgaaaatgacaaattcctgatcgacggatttccaaggaatgaggagaatcgtgcagcatttgagaatgttgtaaggccctcttttttgtacacaaaatttgttgattctcatgccagtttaagaaattattgctcctttcttttagttactcaaatgaattcgtagactattaattctttctcattccttcagaccaaaatttctcctgcatttgtgctattctttgactgttctgagaaagagatggagaaacgtctcttggggcgcaatcaggtttccttcatcattgaccaatcgtcgtttttagtcacaaaattcttgtttccaacatttcttactttctttgcagggaagagttgatgataacattgaaactatcaaaaaaaggttcaaaacctttgttgagtcaagtttgcctgtcattgagcattacaactcaagggacaaggttaaaaagattgatgctgcaaaaccaattcctgaggtgtttgaagacgtcaaaaccatttttgccccatatgctccaaaggctgaatagagcagtctaaaagggacatgataaaggtgtcataggcaacacacaaacatatatgtgattatgaacccttcaatatagaacagaagttttggctcatatgagctaccagcgcatcagtaggcaattcgatttgttatcagcaatatttagatctgattctcaggggtcctgctagagtaacattttaccactgttgtttatgtatatcctttgatgttgtgttgtaccaatgtggaatttactttagggctagtttggacatggaaatacaggggatccatcaggcctgaggcaggaatccccttgttatttataaattaataagaggattcctgcctcatggattctctccattttcctatccaccaaaccagcccttatagagcaatgagaccttgtgcgatcccatcagatttcttgtggcattatggaaagtataaaactgctgccatattctttatacgttgaaatatgttcattgcactgaacatttgttttgatgactttgtatgtatataataccctcccaacagtaagtatctaagcttagcaagcctcttgtagttgt

SEQ ID NO: 129244 - DNA, 1910 bp, Zea Mays
cgaaaccgccaccaagctgcttgcttacggcctagtttcacctcccccattcccttggaattggatttgctcccgaatccggcgaggaagcgaccggcactccacgccacgccgcggcgcccaaggaagggaagcttggggccctaggcctcgtctccatccccgccgcagccggcgcgaggcggcgcggcacgagcacgacggtcaccatcagccaccgcgcgatcccgggggacggccaggccagattccacaacgttttactcttattaaactccccaacttcgtctaaggaagcaagtgatttcattatgaaagactggtctattttctccaaacttgatcacaatggaggttaccttcccaggttcccaatggactctccaatatctcatgatattgggttacgattggtatcgcaagtcggaaacttagttgagtgttcatttcaacatccaaggcatatatgtgctacggggagtggagctgttcaggaagcattcagctgtttcaacaagtttgctggagctttctatttctggttttctagagcatcgaatcctaagttattccaaaggctatcagcagctgcaggctcaagttcaagagcttgtcggtcacacataaagcaagtgacctcttgcttgcagcatttacctggactggagtttggttcacaattaagagaagatcatgctgtacaagtgcttttagcaaggcttgcaagcgcaacttttggacgcctgtggacagaggtggaggagcggcatgcctgcaacatccttatgctggctgctgctactgtaattccaccatttgaaaacatatcaccaaagatgctggctgcgtcaatggcactaagaaaagatcgtggaaacatagagcctactgaacagtcttattcagaggaaaaccgtccaggttgtgcgtgtgttgctgtgccaagagtactcttaccagaagatgcaacggaaccaacaactggcatcaagttccccactgtactcgaagacaattccaatctgactacagaggtccttgttggaatgggttttagaagcatgcgaataatgagggtcaaaaatctgaatctttatgcctttggattatatatacaacctgattctgtctgcaagaagctgggtccaaagtacgcttatattccagatgctgagttaaaggatcacccagatttctatgaagatcttctgagggaaaatattgatatgactgttaggctagtagtaagctacaatggtctcagcattggcacagttcgagatgcatttgagaagtctcttggcttccggttgcaaaagatgaatcctaatactgattatggttgcttgaagacttttggttcttgttttagtgaagacattcgtatacctgctggtacaaagattgacttccggcaaacatctgatggccagctaataactgaaattgatggcaaacaaattggcactgtccagagcaaagatctttgcagagccttcttcgatatgtatattggtgaccccccagtttcagtggagactaaacaagacattgcgcaaaatgtggctggactcataagaagatgctagggaaacgggaaaactaaatcgaagaacctggaattatttcattcatctatacaaggagaggacatataaacagaaaggaagccaggagaggatcgattgtatttatagtggtagactgtctttgtaagctataaacataaagcatatgcttggcaaaggcctccatgcctttcatatggtttggcatctttgccatttcctggctggctggcgtgctgtatcatgtcgacaaatatatgatacagtaaaaagttgtacaacaagagcatgtttctgtgccccaagtgaaaaatgacggggttcagctttgttcatacagat

SEQ ID NO: 129245 - DNA, 1760 bp, Zea Mays
cgcgtcgttccgttccgccatgcgcgcaccgaggcacggcagcatgcgcgcccacgtcgccctggccttcgcggcgctggtgctggccggcgacgccctgcaaccggcgctggccggcggctgcggcttcgactacaaggatgccctcagcaagaccatcatattcctggaggcgcagcgctccgggaagctgccgcgcagcaaccgcgtaaagtggcgcggcgactccgggctcgacgacggcaagctcgccaatgtggatctcaccggcggatactacgacgccggcgacaacgtcaagtacgggctcccgctggcgttcacggtgacgacgctggcgtggacggcgctggcattcaagcccgagctggagtcgaccaaggagctgaagcacgtgcaccaggccatcaagtggggcaccgactacctgctgaaatgcgccgccaggaagaacaagctgtgggtgcaggtcggcgatcccaacctggaccaccagtgctgggtgcgtccggagaacatgaaggcgccgcgcacgctgtacgagatcgactcgaagacgcccgggacggagatcgccgccgagacgtcggccgcgttcgccgcctcgtccatggtgttccgcgacgacaagaagtactcgcgcaagctgctgaacaaggcgaagctgctgttcacgttcgccaagagccacctgggcagctacgacggcgagtgccccttctactgctcctactcgggctacaacgacgagctgctgtgggccgcgacctggctgtacctggcgacgaggcggcaggtgtacgcggacttcatcgcccacgaggccatctcgtcgagcgtggccgagttcagctgggacctcaagttcccgggcgcgcaggtgctgctggccgagttcaacatgacctcggcgggcggcgcgcagaacttcaagtcgcaggcggacaacttcgtgtgcgcggtgctgccggacacggcgttccaccaggtgttcatcaccccgggcggcgtgatccacctccgcgacggcgccaactcgcagtacgtgaccagcacggcgttcctgctggtggtgtacgcggacctgctgctgcggacggggcagacggtgctgtgcgggaaccagccgctgcccccggcccggttgcacgagttcgcgcggcagcagatggactacctgctgggcgccaacccgcggcacagctcctacgtcgtgggcttcggcgccaacccgcccacgcagccgcaccaccgcggcgcatccacccccgtgctgccccccggcacggacgtcaactgcggcctcagcttcggggactggatggcgcccgacaagcccaacccaaacgagctcaccggcgccatcgtcggcgggcccgacaagaacgacggcttcgtggacaagcgcggcaactcctcctacaccgagccctgcacctacatcaactccctcgccatcggcccgctcgccgcgctcgccgtccgaggcgtgcagctcgtcgccacgcagtgatctatccccatgcgtgcgtgtgtgtcccgctgtttcgtttcttccctgacatgatatgatttctactccgttactgatgattcattgattccggccgcccccgcattgttcattatattaggtgacgtctgcgggcgcgtgcggggatccatccaaatctctcactcgctattgtttctgtacgtacgtacgtgtacgtccaagattataatgatactcataataatctcgtcgcaactttcgcgtg

SEQ ID NO: 129246 - DNA, 1257 bp, Zea Mays
cttttggtacccgtgcgcggcgtgcgcgtgcgaaggcgagcgatagcggaagaaacaagaggctgctgctgcttcttccgttgcaacttgcatgtgaggcgaggccgcgagagaagcgcgagccatgtcgatcgcactgcagagcgggcgcggggtgggcggcggcgcccctaggttcggccacgtcgcccgctgcggctacgcggcctcgccgccgccggcggcggggcgcgggcgcggcggttcgtcctcggtgggacgggacagcgacagccccgcggcggcggcgcagtgggagtgggacggcgaggaggtcgagggcggcgacggcgaggtgcagagctcatacaagggctccgctttcgacaccatggacgcgctccaggaggccctgccctccaggaaaggggtatgcaagttctataatggaaagtctggatctcttgcaaagcttcaaggtgccgtagtaccttctccgctgaaaaagcttccgaagcaagaaagaccatcccctaggaagcgcaaaggtcttcttccattcagtctcaaatggggcaaaccacagaataaagaggtattccccgaagatgatgcgattggcagccccacaaactgcgtaaggatggctatatcgcctgctgccacaagcagctcaggaagcaacagtggtagcgacgatgaacataaccgctgccagaagccatcttcccgtcgtccgcacagaaggcccagcagtgtcatgggtgtttttgcttctccgcctgcacctcgtccaccccagcagttctcagctgtcatgagatctcaatcaatgcttgatctgcaggatgcgacagattcaactgacctggtcactcccagggacaagcgcataaagaattagcaaaagttgaatagtatcaggaacaagggcatgaagaactaggtagatctgatgtaacctgaaccttggtgtcagcccaaacaccggtgtccattttagacagcgaaacccaatggctgatgtctgcatgcttagcgacaccgaatgaactcgagttcatatagctgggattctccttatacccgatgtaccgagaattgagaaagatacagatgaattaggcaaattggtgtaaggagtcagtggctattgcattggttactatttgacttgtaaatgctggattctgcttctctttgcctaattcaaccatgttgctcgtattgacctttgctttgctcgtcgttctgaattaggcaaaatttgttgtctgt

SEQ ID NO: 129247 - DNA, 2689 bp, Zea Mays
gcaccaggcctcctcatacaataatcagaacgcctcccatgagcagagttgaataatcagaacgagtctcagctttattcccagagttggcgcggcgcgcatggctgccgtggtgatctgatcccacactgcgccaggcgccgtgtccatgcaatgtaaccaccaacccaatcgcctcgcctacttatcggcgccaccgcgacgccactgctcactcgtattctcattgtcaccttgagacatacaatggctgggctagccggcgtggtgtgcctctgcctcctcctcgctgccagctctgtcaccgccgcggcggcggcagcggccgaggaggagtccctgtcctcctacatcgtgcacgtcgcggcggagcacgcgccacggtcgacacgcccgcgcttgctctcccgctcatacacctctttcctgcacgacagcctgccggcgcacctgctgcgcccggcgccgctggtgttctacgggtacgcgcacgccgcgactggcttcgcggcgcggctcacggagcgccaggccgcgcacctcgcgtcccagcactccgtcctcgccgtcgtccccgacgagacgctgcagccgcacaccacgctgacgccgtccttcctcggcctctccccgtcgtcggggctcctcccgaggtccaacggcgccgcggacgtcgtcattggcgtcatcgacagcggcatctaccccatggaccgcccgtccttcgccgcagacgcgtcgctgccgccaccgccaagcaagttccggggcacctgcgtctccacgccgtctttcaacggctccgcgtactgcaacaacaagctcgtcggcgccaggttcttctaccagggcatgcagcagcgcatgggcgtggccgcctttagtgaggcgggggagtccttgtcgccgctggacacccaaggccacggctcgcacaccgcctctaccgctgccggctcggccggggtggacgcttccttcttcaactacgccaagggcaaggccatcggcgtggccccgggcgcgcgcattgccgcctacaaggcatgctggaaacacgggtgctctgactccgacatcctcatggcgtttgaggcggccatcactgacagggtcgatgtcatctccgtctcgctcggcgcctcaaagcccaagccaagaaagttctacaaagatggcattgccgtcggttcgttcagagccgtgcgcaacggcatcaccgtctctgtatcttcgggaaacttcggcccaggagagttcaccaccgtcaacgtcgcgccctggttcttgacggttggcgcgtcaaccataaaccgcaggttcccagcgagcgtcgtcctcggcaacggcgagacatccaccggcacttcgatctacgccggcgcgccgcttggcaaagccaagataccgctagtatacggcaaggacgtgggctcgcaagtctgcgaagccggcaagctcaatgctagcatggtcgccgggaagattgtggtgtgcgaccccggcgtgaatggccgagcagcgaaaggcgaggccgtcaaacaagcaggtggcgccggagcaatcctcgtgagcgacgaaagcttcggcgagcaggccctgactaccgctcacatcctccctgcaacagccgtcaagtttgccgacgccgagagcatcaagaagtacataagatcgaatgcgtcaccccctgtcgcgacgatcgagttccatggcaccgtcgtcggccggacgccttcgtcaccgagaatggcgtcgttctcgagcaggggcccaaacctccttgcgcccgagatcctcaagccggacgtgactgcccctggtgtcgacatcctagccgcgtggaccggcgagaactcgccgtcgcagctcggcagcgacccgaggcgggtgaagtacaacatcatctccggcacgtccatgtcgtgcccgcacgtgagcggcatcgccgcgctgctccggcaggcgcggccggactggagccccgccgcggtcaagtccgccatgatgaccaccgcgtacaacgtcgacaacgccggggacatcatcaaggacatgtccaccggcaaggcgtcgacgccgttcgtgcgcggggccggacacgtggacccggaccgcgcggtcgacccgggcctcgtgtacgacgccggcgccgacgagtacctctccttcctgtgcgcgatcggttacaccgccgagcagatcgccgtgttcaggacgaaagacgaccccgcggtcgactgttcgaagcgcaaggcctccgtcggcgaccacaactaccctgccttctctgtggtactcaactccaccagggacgccgtcacgcagcgccgcgtcgtgcgcaacgtcgggagcagcgccagggccacgtactgggccagcgtcaccagcccggccggcgtgcgcgtgacggtgaacccacggaagctacggttcagcgcgacgcagaagacgcaggcgtacgagatcactttcacgtcgcgacgcatgtggagcgtgcccgacaagtacacgttcgggtccatcgtgtggagcgacggcgagcataaggtgactagccccatcgccatcacctggccagcgacagcgagccaagtggcggcgatgtgatgtgagctgcccagctgcgtgtgcttctcttctgaataaggcaatataacctgccactgcatgtctgcctgcctcattc

SEQ ID NO: 129248 - DNA, 833 bp, Zea Mays
tttcttcttccccatcttcatcttcctcgcagcgccggtgctacatctccagactgcccctgctccgtgcggacccactctccagcgcgactgcacggctgttgttcccgcgggtggagatggcggcggtcaacctcctcgctgagtctgccgcggtgcgcttgagggcgccggcgccgccgagcgtgggggaggagctcgcggccaggctcacggagtgcgggttccccgccacggcgcgccgagggggagcggtcgcgggggctggggagagcgcgcgcaagtggagggagatggcggccaggaaggaggaactcctgctgcggagccggggccgagtcgcgtggacgatcgtcgcgctttgctgcggctcgcatgcgtcccacatcctgcactcgctcggtatccatgttggccacggaacgttttttggatctgttgcataatccttatgtgaaatgtggcattgctacaactgctttgtttgggcttggaagaggtcacggaggctgacattgaagaatttgaagctaaatatagagggtcagattctgagaaaacggacttgaaggaactctacacaaaatataagggcaacatgaacatgaataattatctcttatatcatattgtaaaatctgaaacagttctcatgtagatggttagcttgcattttacgctacaattacctcagatcacttcttgttgtatcttacaccaatttacgaaatttcttgatgtgttttatgacaacctcacgcgttgagagatacattcggtctacattcgttattatgaaacagatggacgatttacgctaaaattcatactca

SEQ ID NO: 129249 - DNA, 943 bp, Zea Mays
tttcccgagagcagggtagggtagccacatccacgcaagctataaacaatgctatgcaaagtttatttgagtgctttaacagtatagccattgtctattagcatcacatattcacatgccattgtctattagctctcacatagctagctagccctccttggctccttgccttgcccaggcacagccaagcggccgggagaggagatcgagcagtcatatcgatctgatggggggagagcagcagctcgctccggcggcggcccgcgtcaccccgcgtcggccgatgatgtccttccgggtgccgcggagactggtggccagcagagcggcgggtggagcgtcgccgtcgccgccggtgccggcggggctaaagaaaaagaagaagaaggtggcggtggcgaggctcggtgggaagaggaggctcttcggcgcgatccggcggctccggatgcggtggctggccgtgctgtacaggcgcacgctgcggcggctgcgcgcctactacgccacggcgatcaacgacctcctcgagggcgccgccgccatcggctccctccgcgggccggccggtgccgccgactgcgccttcggcaccgcgttcgcgccggtcgtcgccgtcggcctctgatgagagctcgcactcgcacgcccgccgtctgcatgcactccatacgacgagcccgtatggtggtctgcttgtatagaggacaatctcgattgctatcgttttcttgtccatctgcatcgtctctaccgtatggcatcttttttctggatcgatctctcaatcaagaattagaaaagagtacacaaacaaacaaagaaatacaactcctcgattcagatttgtttggtactaataagtataataatgcatatttcctatacgtttctattatgggttgataatttttttcttctaaacaacagaaagaagaaaaaa

SEQ ID NO: 129250 - DNA, 1866 bp, Zea Mays
atggcgacagcgacaatggcaaccgccgcgggggccgcggcactgctttactacacactgaaccgccgcctgcagacagagaggctgaataaggaaggggagtgcagcgatagcagggatgtgacacccagggccgcacagggttctcccagcaggagccgtgtatcgcggagggacgtccgcgcccctgccacctggcttgagactatctcgacgctgtcagagacgctgcggttcacgtattcagagacccttgggaagtggccgatcggcgaccttgccttcgggatcagtttcctcctcaagagacagggaaacttatctgtagcaagcatatacgctggaaatgatagtgtggagctcaaaggagctgaagtaattgctgatttaaagtatcttctcaatttgctgacactttgctggcatttctccaaaaagccattcccgttgtttttggaggcgactggctacactacggaggatgttcttatgcaagaacctaaagcaggaattttgaagccagctttcaccattttgcttgatagagacaaaaagtctatacttctattaattaggggaactcatatactaggatatgctcattttgggatggttgccgctgctaggtggattgcaaagctctcagggccttgtctggcacaagcattgcagatgtacccagacttcaaaataaaggttgttggacattcactgggaggtggtacagctgctctgttgacatacgttctgagggaacagaaggagtttgcctctactacttgtctggcatttgctccagctgcatgtatgacatggaaactggcagagtcaggagtgcattttatcactacagtcatcaatggagctgatctggttccaacattttctgctgcgtcagtagatgatcttcgttcagaggttacagcgtcagcttggctaaatgatctccgccaccaaattgaacaaaccagaatcctaagcactttttatcgttctgcgtcagccttgggatcccggcttccatctatggcaaatgctaaagcaagagtagctggtgctggcgccatcttaagacctgtatctactgggacgcaggttgtaatgaggagagctcgcagtgtagcacaggcagcatggacaagaccagcactgcaactgtcctcatggacttgtattgggccaagacggcgaaataatatatctacctcaactgtcacatcagaggaaataatagcatctacaggcggtggatctgaatccacttcattgttgactgaaaccactgcggaaaccacagagacagttacatcagaagctgtatcagaagtggttcagagttctgtttctgtggcggtcgatgctgttgacttggtagatgacaagggagatagcgatgatgacatcgtcgatcaccatggggacgaggacaggatgactgatgtggagctgtggcagcaacttgaaagtgagttgtaccggaagagggagggagaagaggatgacatagccgaagagatggctgaaagtacaattgctgaggaggtgggtggcgtggctgaagatgtgctcagcgagacaaaggaagtgcataggttctaccctcctggaaaaatcatgcacatattattctccagcagggaagaagcagatcgtggagaggagcctgaggatgatgttacggatggggaggcacaaagcagcatagggatcttcttgacgccaagatctctgtacggcaagctgaggctttcgaaaatgatgatcaatgaccattacatgcctatatacagaagaaacattgagcagctgatcgcggagcttgagaaggattcctcggatcaaatagggtgcgtcaggtgtagttga

SEQ ID NO: 129251 - DNA, 3363 bp, Zea Mays
ggaggcagtcgtctcactgggactggacctctgcctgttagtttagtttcctcgtcgcgctgggccgccggcttccgccgttccgcggcggagggaagccatgggcgccgccgtcgcagggtggaccgtggcggcagtgctgcttcaggtcgccggcctctccctcttcctctacggattcttccccgtgaagcccacactgcgtggcttcagtggagcggagagctaccgggtgccttcctgcggttccgttagtgctggggagcaggagccggcgcttcccccggatcagctcagatctctgtacagggaactctctgggatccctcctgtgtacgatcgcttagtgttgatggtgattgatggactacctgctgaatttgtacttgggagaggcaggaaacctccaagcaaaaaaatgatggagtctatgccatacactcaatctttgttagctggctgcaaagcagcaggttaccatgccaaggctgcacctcccaccgtcacaatgcctcgactaaaagctatggtgtctggtgcaattggaggttttctagatgtagcatttaatttcaatactcaagccttcttagaggacaatcttcttgatcagcttcatatgattggtttgaagttagtgatgctgggagatgagacatggatcaaattgttcccaaccctattcactagacaagatggagtgagcagtttttatgtgaaagatacagttgaggttgatttcaacgtttcacgccacttagaatttgagcttgctgcaaaagactggagtgtcttggttcttcactatctaggcttagatcatgttggtcatataggtggccgccggagtgttttgatgacccaaaagatgaaggagatggatgatgtcattagacgggtgcatgctgcgagtcttcaggataatctggacagaacacttttggttgtggttagcgatcatggcatgactgatgggggtaatcatggaggatcttcatatgaagaaactgattcacttgccttttttataggacacagcgttgagagcccatattgttcaccctatgaccagaatgaagcacttcaagtggatcttgccccaactcttgctcttctatttggtgtaccaattccgaagaatagttttggtgtcgtgcttccaaagcttttaaattcgttgacagatgaccagaaactaaggatgttagagcttaactcatggcaaatcttaagattgctgcaagcacaagtgtctgctttctgccttgaagattgtattaatgtggagagcagtattgaacttgacatccttcctgaatctattgagcaaaagttatgttttttactttctaaagccatttcttctcatcagtcttcacgtcttcatcgaggttctgatttcaagtctgttgaagccgggtactatgggactgctgcagataactaccacaccttcttaagaaatgcgagtgagtggttgtctcacagagcaaccgataaaccattatatttacttgtctctgcaatcatgttgatgacaatgtcatgccttttcctcatgggtactgtgtcttacctatttaagggacgatctctgagtcaagctgatcaccattcagagtcatatttggatcaacgctggcaccttgatgaggttctcgttcttgctgggatgtttctctatgtcatcagtcttggctcaagttcttttgtggaagaagagcagtatacatggcacttcctcacttctactctgtatctaatatttctggccaaggcagttcagtcaatgctaaaaggatcaaatccaacacttggtcataaagcagaaggaaatagctttgacagaagtagctttttctatgctacaagctatgaattaacaccaggcaagagaaatggttacaagttatgtactatccttgttgttcttgttgctggaagagttataagagcttggcatcaaggtggaatcaactgggttcactttcctgatatttccaagttactggcgcaagctgacccttctgttgtaaagtctcttcagattatctcagttcttgcagttgtggtattgttttcaatttcactcactttactcagagcaagaccagagtttgttataggagtatggttgacccacatttcttgtggatttttggtcctactgcatgtttggggaaatcatattggtacttcattaccaattaaccataccacagcatcggtagctcgacaattttatgtcattgctagtgtttcagtatctgtcactgttcttgcttcaccttgggtatttccaatattttctagggaagcaaaatcaccgtcctctggttctagtcctgtaaaggcaatacatggcatcagaaaatcacttgttctcactggaatgacatacacagcgttctggggccttctgcaattgcttcttcaacaaccaatcaatgcaattcctcttttcctcattttattgcaaacagtctcgagtgcagttcatttttctctggacaaaacattacataaacaatgggtacaggttgtggcaatgcatttcttgggaatggctggtcacttcggtcttgggaatacaaatagccttgccagcattgatgttgcgggagctttcattggcatttcaagttactccacagttctttctggtatactgatgtttatgataacatatgcatcacctctcatgttataccttgggttggtccttcatgcatcggtgaaagatgtcgatgatgcctccaatctacggcagctgaaatggagctatattctagacaaaattgtcacattgccatgtttgtttcctttgctcatcaattctcttgcgttgacttcatacaccattgttttgctagccatgaggaatcacttatttgtttggagcgtattctcaccaaagtacctctatgcctgcgcagcaacagtgtgcacatatgtcggagtatccatcatagctatgactgcattatacagttgtgctgttttcaagttcagggcgagaagctacagggataaatccctgtaatcagactaatgattagctgttctgatttaatggacatttgtaagaattcagaaagggagggtatcttggcctattctctcgttgtacaacaacatcgtactcacatgtttccagaccaccatgcaatccctgcaagggtctatacacatttctcgttctctttgctaatcgtattggattaagtttgtcctggacacatgacgtaagcacgttcaagatgaacagggggtatggagtacattgtagcctgagtcctgtttcgattgagagatccatgttaaccatttccgcatatggatctgggcattaagccctaaata

SEQ ID NO: 129252 - DNA, 2489 bp, Zea Mays
gtcccagccccggagactccgaggcagcaggcaacccgcgccgcgcgtgcgccccacgacgccaccacagaaatacgacctcgctgtcccggaggccctcaccaccacaaagtcaaaaaggaaaaaacccggacgcgagacgttccgggcgcgcacatacgtcccattttatcttccttcccgtcccacgcgtgcgccgcgcggcgcgacgcgcaggaggtggccggccgatcgacgggacgggacaaaccggagcccgcctggctatacggcgtacggtacgacggcgggttgaccgaccatgccgtgcggctcgggccccggcgcggctgacctctgggcgatggccgccgagctggagcgccagttcgcggggtacaagcagcgcctggcggagcggacgaccaccggggccaccgccaccgcacgcgagcgccacgacgccggggacggcgcggaggaggcgggtgatgatgacgaggcgggaggcggcggcggcgacgtgcggggcaggaagtacgaggcgtacgcgcggcggagggacgagcggctgcgcgacgggtggcgcgcgcgcatggagcgcaaggaggccgaggtcaaggcgctctgggcgcagctcgagctcgccgccggccgcgccggacccggtgacccgacgacgaccgcgacggaggacggagacgacgggacacgggaagcatgccactgtgcaatcgtgcagaggaagactgaacggaacgacgccgacgacgacaggaggagaagctcatcgggcgcggctcttgccccgaggagggtcaccggcaagaggcacgtgcggaccaggagcttctcgtcgtcaaccatgagcaggaaccgcaccgacgtcgggaggcggcgggcgctgtcgcacgaaccgccgccgtcggagccggacgcatcctgcggggaagccgacaggaaaagccgagcgtggccggccggccgcgcggcggcagcgactgcagacacgatgagacccagacccaagacgtctctgcggcgcaggagcacctccgtggaagggcacgggcccgcgaagacggcggcggggcggaagctcccgcggcctctgccccgacgagatgacagctccggcggacccgaggatctcggcagggatgtggcgctggcggtggctcagccaagcgccgagacggttgcgccacctgtgccgagtcgttcggccgagtatgctgccactggcggcgggacccccggggcttctccgacgaagatgtcgctcgctggcagggacgacgacggcagcggcggcaacggtgcggcgaacacacgagctacctcgccggagccagatcgcggagcggtggacgaagccgtgtcacacggcgaacctgacgcgacgcacgacgctggtgccaacgaacacggcggagaagagaaggtcgacgccgacggggaggtcactagtgagtcggaacccgagccgagctacgtctacgtcaacaacaaggacgccgccgaggagcgagccgtggcggcgctctctgagccttggacactggccggttcggccgctgcggttggtccggacgtcaagtcaagcggagagacgccggcggcactagcaccaccagccgaagctactaccgcggccgcagcagaggtcgcgacgacgaacgccgaagaagcgccggcgagggagagctccgacgagtcctatctgtcggccaggtcgtcggtgccgagcgcgcgggcgtcgtgcagctcgcgggaccagtccgccgagcggctgctagaggcggacgccgccctcgcgcggaagaagcgcgccgagaagagcgcgccggcgccgagtacgccgccgggcagcaggtcctccggcgcggcgaggtccccgagacaggcgacggtgagggggttcaagaggttcctgagcttcgggaggaagcacagggggagggaggtcactgtcatcgactgcacgtcgccgcccgtgccctcgccggtccacgacgccagcggccggtggcagcccgctgatgggtcagtcaagcgcaggatgggctcctctgatgctgcctctgatgatacaaaacatggctatccggtgtctccacaagcagcggcgtgctctttgcaaagccttgtagctgcctctcctgcaaagtatgaacttgctaagatagtcccacaagagaaatcaccaaaagttcatcgatcgttcttctcgttccggtcactcaactgcggcaggggctgaccctgctgataccatcataccatacaatgcattgggaatgtagttgctgtaaattttagagagaagaaactttgtgcttgatgtgttatgccgccttgtatagttgtgtctgacgatgtctgtatgattggtgtagtcgtctgtcatctggcctggcatatacatcagtagcactgtagctgtaggtttactgtgcctgtgtactacagatccatatcatgcgtgaagtgttttccttcttcattca

SEQ ID NO: 129253 - DNA, 1617 bp, Zea Mays
atggccgacgtcgacatggctgacctcccacagaccccgcgatccaccgccggcgacgacgacctctccttgctggacggagagggcgacctcgccgccgccatcctcgcgcgcctcggcggctcgccgcgggaggactttcagcacctctgtgccaccgccgccgccatggcgcaggccgttagcgaccaaggagtgcccgccaccccagtagcctacttcgcagcggctgctgcggcgcttgccccgctcgctcgcgcgggggacgccggcgccgaccgccacgtcgccggagcgctcctcgccttcctctccgcggcgctgccggccctcccggccgcagtggtgcgcgcccgtggccgtgaggtcgccgatgacgtgatgcgcgtgctcgatttcccttccacgcctgattcaggcgtcagggcggggctgagatgcctcgcgcatttgatatctgcgggggacagggcgaactgggaggcggtagagcctttatacactgtgattctgcgcctcagtaccgatcaccggctaaaggtgcggaaacaatctcattcatgcttgcatgatgttctcctgagttttcaaaggcaaacaattttgattccagcaagtgaagcaataacaagatcttttgagcggtttctgctgcttgctggaggatctagtgctgtaaatacaggtgtatcagaggaaggccccaagggggctaaggaggtcctgtatattttgaatgctttgatatgctgccttccccttatggcctccaaaccttccaatactatcttgaaatattttaaaccactattagatttgcatcaaccaattttgataaggagtcttctggacattctgcatgctgtttgtgagagtccaaccgtacagctcaaatctgatgtgttattggaccttctgtgctcgttgggtctgtcagtgtcttcagaaaggaaatcaggagatgaaatggcttcaattgcacgacttctacatgttggcactaaaaaaatttacaagcaaaacagggacatttgtgttgtaaaacttccattgatatttacctcacttggagatatattatcaagtgaattcgaagaggcgagattttcatctctggagggttttaaaggtttaatagataactgcattgatgaaaccttggtgtcacagggtattgctcagatgaaggctagacatcaagggttgaaatcagatccaacaatcatagataagatatgtgctatcctagaaggcttgctagatgtccgctacagtgacgtctgggacagatcatttcatgtaatttcagtggcatttgacaaactaggagagttttcagctgatctattgcccgaagcagtcaggaacttggcagacatgcaaaacttgtcagatgatgacttttcctttcggaagcagcttgatgcatgtcttggttcagcggttgctgcaatggggccaaagaatattctggaaattcttcagattcagtcaataagtgatgaaaatgaatggattctccctattctggagaagcacattgttggtgccagtttacaatttttcttaagagatattctgagtatggttggtgccatagagaaaaacattcctaag

SEQ ID NO: 129254 - DNA, 361 bp, Zea Mays
ttctgctagttagatacttgttattaagggtcacgaattcctgagctgagatctataacattttaaaacaggagagttttcagctgatctattgcccgaagcagtcaggaacttggcagacatgcaaaacttgtcagatgatgacttttcctttcggaagcagcttgatgcatgtcttggttcagcggttgctgcaatggggccaaagaatattctggaaattcttcagattcagtcaataagtgatgaaaatgaatggattctccctattctggagaagcacattgttggtgccagtttacaatttttcttaagagatattctgagtatggttggtgccatagagaaaaacattcctaag

SEQ ID NO: 129255 - DNA, 2318 bp, Zea Mays
tcctccagtattcaggttttaatcaaacaaaacaaaaaagctctgtcagtttctagggaagaagacattcttgctgaggatgaaataagcaaatctgaaagaagagcaaaggaacgttatactcaaaatctggctgaggaaaacttgaaagcgatacgtgctttctcttctaagcttttggaagtactttgttctatattcttgatgtcttcgaatgatgctattggattattgcagcctgcgataagtgagatagcttccatatcagacaaaaacgttgttgggaaattcttccttgatgcaataagaaagttgttggatgctacaaaggctgttaatgcagagcctgtggatgatagttcaatggaaattgaagccgattccaacaaaaatagcatgaagagggctctacttttggattttgcagcttcattgatgcctggtttagctgcaaagtctatcaatgtgttgttcagttatgtgaaacctgcaattaaggacagcgactctttgattcaaaagagagcgtacaaggtcctgtcaatgctgctcaaggatgctgaatttattgaaaagaatctggatgtcctgtcagaattgatgatttcgtcactaccatgccaatttccctcgaaacgttacagactcgaatgcctataccaccttattgtttacattttgaaggattcatctatggttagaaagagagaaattattagttcattcatcactgaaatacttcttgcattgaaggaggccaacaagaaaaccagaaacagagcttatgatttgcttattgaaattgcccgtgcctgtgaaaatgctggaaatgacgaggggaaggagggcttgcaccagttctttggcatggttgctggtggtctggccgctggtcaaacgccatatgcaattagtgctgttgtaactgggttggctcggttgacttatgaattctcagagcttatcggagtcgcatacaatctccttcctcagactttcttgcttatgcaaaggaacaaccgggaaatagtcaaagcgaacttaggttttgtcaaagctttagttgctaaatctaaagctgacatattgcatgaacacttgactggagttgttgagggcctgctgagctggcaaagtgatacaaagaattcctttaaagctaaggtcaagtcactcatagaaattcttgtgaagaaatgtggtttagacgctgtgaaggctgtgatgcctgaggagcatatgaaattgctcacgaatattaggaagattaatgagcgaaaaatgcgaaaggcaaaatcttctgaggatggggatgccatgtctatggcctcaggagctacaaggcaaagtaggtggaatcacacacaaatgttttcggactttggaagtgatgatgaatcagatggtcctttttctacccaacatactgctacttctcgatctcgtactgaatcaaaagcttcaactcggttgagtcggaggcgccaaggagataagaaactactagacaagttcattgaccattcaactggcgaccccctagatttacttgaccagaaaacggtgcggttggctctcaaatcagcagcagggaaaaagagggctgcacccgatgacgacgacgataagttcgaggtggaccctgaaggccgtataatcgtgcgcgaagagcgggagaagtggaaaaagaagccggcccctcgtgacgacgaggaggctgatggaaagagctctgtcagaagccagtccatcaagaagaggaagacatccggctctggctgggcctacactggtcatgagtacaccagcaagaaagccagtggtgatctgaagaagaaagacaagatggaaccttacgcgtactggccgctggaccgtaagcttctcaaccgcaggtcggaccgcaaggcgtctgcgcgcaagggtatgtccagtgtcatgaagatcaccaagaagctcgaagggaagagtgcaagcgccgcgctttctgctaaacggtcgggaaaaacgaagcacaaaaagaacaaataagtgggtagtggcgaagcttcctactttataggagccgaccagatgatttttttggagaaatttgctaccattttttttggtgggtaggggtggatttcggtctgtacagttcgggaattcagaacaccgtagttcttgtcttttcggataagttttgtattagaaccttgacactttggtgtttgtattagactggatcgtgattcgttctgattgtttggtgactagtaaatcttgtgttttgttgtgcacttgtgctgactaccgaaaaacattgagaaaaaaag

SEQ ID NO: 129256 - DNA, 1003 bp, Zea Mays
ctcccggtccttctggacgcgacagcacaccacctctacgaagcatctcgaactctcggtgccgctcaatttgtacccccaatccccttccacacaccgcctcgccacatcgcagagccagatcaagggaagacgacgcagatctcgccacgcgaacacagttagatcgagggagtaagtgagagtgagagccatgacggagctgttcgacacggccgtgaccagcctcctccacctgccggaggtgctggaccgcctctccgccgcagacggcgaccggcggtcggccggcaaccacgcggcgcacgggcacggccacggacgcgtccacgggctcggcggcggcggcggagcgccggtggacatcgtggagagcccccgcgagtacgccttcgtgctcgacgtgcccggcctctccaagtcagacatccaggtgacgctggaggaggaccgggtgctggtgatgaagggcggcagcgggaagcggaagcgcgatgaggaggaggacatgaacggcgaagggtgccgatacatccggttggagcgcggcgcggcgccgcggtcgttcgtgcgcaagttccggctgccggaggatgcggacacgggcggcgttgcggcgcgctgcgagaacggtgtgctcaccgtcaccgtcaagaagctgccgccgccggagaagaaggccaagaccgtgcaggtcaccatcgcctagaagtcggcagtcggcactcggcagagtagcagcagtagaattgtagcgcgtacgtagtggcctgtcgtgttgggaggagtgctcttttgtttacgtttgtgctgctgatgagccggtgtgtgtgtgtaacagaccgtgcttcttttctgaacaagaattattcaatcgtgtctctggtgaagctgtgcatttgtgcaaggagttcttgtggcctctcactgggatattattacaaggaagtgagtaacaaagaaattacatgcccaggaataacagtcgagagagaatgttggt

SEQ ID NO: 129257 - DNA, 2853 bp, Zea Mays
catggagcaggacccggagcgcgcctgccttcggagcttcgagctccacgagagcgagtcgagcctttacgttctaggaactaattctgacagaacactttggagactactcaagatcgatagatcagagccgtcagagcttgtgatagacgagtgttctactgtatatactgaaagtgaacatcctgacttgttgaagggtcttgatgacgagcacaggtcaactggcggagtaaaatttgttacaaagttttatggcataattggttttatcaaattccttgggccatattacatgttgattattactgagcagaaaaaaatcggggaaatctttggtcatccagtgtatcaggtgaccaggacttcaatggttgaattagcaaattctaagacaagatctacttttcaaaacttcaaggacgagaacagatacaggaagatcttgaatgcacttgatcttaggaaggatttctttttcagttactcataccacattatgagaagtcttcagaagaacttggctgatccacaggatggatggaccttatacgagactatctttgtgtggaatgagtatctgacacggcggatccgtaattgtctcagaaatactttgtggactgttgcattggtccatggtttctttaagcaggataaattctcaatatctggcaaggatattatgttcacactcatcgctagacggtcgaggcattatgctggaaccagatatttaaagaggggggtgaatgagaagggaagagtagcaaatgatgttgagactgagcaaattgtctatgaagctgtgcctggacctactgaagtaagttctgttgtgcagaataggggctcaattccactattctggtcacaggagacatcaaaattgaatcttaaacctgatataatattgcatgagatgcagaataattatgaagctacagagcttcattttgaaaatcttagagcaagatatggaaaccctatcattatcttaaacttgattaagacacgtgagaggcgagagtctatactccgccgagaatttgataaggcgatcaagataataaacaagagcctgtcagaagagaatcatctgaggttcttacattgggatcttcatcaaaactctcaaggaaaacctacaaatgtactcgacgtccttctaaaagtggcatttcgggctctgaatttaactgagttcttctattgtcaagtcgcaccaaattctgagacttctgcacaatgccccaccctattgaatggtcttgatcaatatttatgtgatgacaacaatagtgacgacacagaatgcactgagattgttggtgatgtatcccaagaggatatctcaggcagctctgattcctctggtaatgcaaccacagaagataaatttgagaatagtggactgccaccaccaaaaccaccaaaattccaaaaaggtgttttgaggacaaactgtatagattgcttggatcgtacaaatgttgctcagtatgcacatggtttagctgctcttggacatcaattgcatgcgcttggttttatagaatctccagaactaggtttagaagctcccttggcccatcatttgatgcacttttatgagatgatgggtgacacacttgctgtacagtatagcggttctgctgctcataacaaggtattctctgcaaagagaggtcacttgaagctttttattcagtcacaagagttctttaggacacttcagcggcactacagcaacacctgtatagatgctaacaaacaggctgctataaacttgtttttgggatacttccagccacagcaggaaaaacctgcactgtgggagttagaatcatctgctgggaagcataacaataatctttttgatggccacccaagtacattgaaaagagtaaaatcagatggcaccattcttcatgaaagtaatgcttctatatctggctctggtcgttgccataatgaacagttaagtgcatcgcagcctgatgtccagaatgggtttcaattcccaacttcagaatccgattcacttcatgaaaatgacatttcatcagcttgtggaagtggagtagcacacctaaggtatactcctacagcctctgacgtgcttcatgtcccaagagctaaagttgaatattgccatgattctggtgattcaaactttttggatcttgaatggctttccacttcaggcaactcaagtgatgaaaggtctattgcaactagcacgccagatgcaaacctatcaaatgagaatgtcattagtggcataactcctgatatcatggaaaaccatcttgctgaaatgcagtatcagaagttacctcggaattttgtgcagtgggttaatcacggtgataccttttggtactaagatcgcaattactggaattcaatatgtcgccagcttcccagggtgggcattaacacggatctgagtagtagattatagagtgatatggatgctgcggcaaggcatttctcccgtgatatactccgcaccatccccaaagtcctttattggtccacgtgtttttacaatgggtgagtagatagatatctttctgttgaaagaaaatagagatgataattaggcttattattgttgacctgaaattgtcattattcatgggaacatgtcatattttcttgtgtaaatatatatgcttgaggtgcctttggtggtggttgttctgttgcggagcagctgtcgccccgacggaggacggtcgcagggcgaccacgtgcagctcccgcgcccgcgtcccatcctggctgagcgcacccgccgcgactattctcacttctcagtgcattgcgtcatttcaaaatccaaaa

SEQ ID NO: 129258 - DNA, 895 bp, Zea Mays
gcaccctcacctccatctccatcggtaggcagcggcatggacgggcttgagaggagctcgctctcggtggaccaactccccgacgacgccctcgtgcagatcctctcgcgcctcggcgccaagtcgctgtgccgatccaagtgcgtctccaaaccgtggcgcgacctcatcgccgatcgcctctactgcaaggatctcccccaatcgctgcaagggttcctctacttcgacgtcggaagacgcggcgacggccacgatgctgctgctgctaatgcctacggcggcgatctcgccggcagccgcgacgggatgctgcttcgccacggccacgggcgtttcatcgacctgcttggtaaacccatgccactcctcgacccttcgttcgcctttttgaaggagcagccgggcgtcaatgctatcgagctcctcgattcctgcaacggcctcctcctctttggacacaggcgggtttcagacacatacgactccctgggctacatcgtgtgcaaccctgtcaccgaacagtgggtggcgataccatcctccggctggactccgactccagcagaagaaattgtggacgaacacgtcaaggacccgcgtccctttatcatcttcgacccatccctctcctcgaacttcgacattgtgcagttctggcaagatggcacggtggacgatgtggaaggggtgcatgttaaaataggatattttctatatatagtctaggatcttttgtatatggcagttcctaaattatagggttagattgttgatttgcaatcaccgtgatatggttgttgtaacttccttctgtaagccaccgcaggagggctgttctccttgcctatattaacacggaaccgagggcctgtattggtatcctcgttaatct

SEQ ID NO: 129259 - DNA, 522 bp, Zea Mays
atgcagctcgccagcggaaccggggcaccgccctccctgtcgaagtcctgtggctccgcgctgaggcagaacacaggcctttcctcccgcaatccctcgaagagcggcaggaagagcgcaccgcggaggaggtcccacacctcgccgagcttggcggccgcgatggaaatccccgagtcattgccgccgctccggccgaccgcgcaagggagagacgggacccagtcggggatttgggagaaggtcttgcgaagaaaggggaggtggttggcgcgacgcgcgcttcacggcgggggtgtacggcggggagtgcttggcgcgggcatgcatcgcgacgcccggcgtgcgtgtgggcggcgggagtttcgcggcggaggtttcgcggcggggggatgcggcggccgtaaggagcgtcgcggcgggggatgcggcggcctgcgggcgcggcggttgtttgccgggcggcctggaatcgcggctgggtggttgcgggtgcgagcgttgggttgtgatcgtgcttga

SEQ ID NO: 129260 - DNA, 231 bp, Zea Mays
atggcggccactgcttcgatgagggcccacgtggagctgctgctgctatgcggtctgggcgctccccgccgatctagccgcgcggagcaggtcccgacaagcgctgaggctgctctcccgctgctatggcgggcctgcttcggcgaggccccacgcgcagctgctgctgctatgcgggctgggcgctccccgccgatctcgtcgcgcggagcaggtcccgacgcgcgttga

SEQ ID NO: 129261 - DNA, 237 bp, Zea Mays
ttctcaaattggtggtgccaaagtatcaagaaagtggagaagagtctaaggaaaggtcttaattccttgattattttggtcgcttgggagatttggaagcaccgtaatacttgtgtttttgagggggttgtgccctgcacccagcgagtttagagtgttgtgattgaggagggcagcgtttcgtgcttggctggtgcatcagctctgcaggacctcctcctgcgccagctccctacg

SEQ ID NO: 129262 - DNA, 926 bp, Zea Mays
atttttggcaagcatcatgatggtgtcgttgaagatgttgcttggcacttgaggcatgagtacttatttgggtcagttggtgacgattatcatcttttgatttgggacctgcggtctcccgcccctactaaacctgttcagtcagtggtggcgcaccagggtgaggtgaactgcctggcttttaacccgttcaatgaatgggttgttgcaactggttctactgacaagactgtcaaattatttgatcttaggaagattgatacttctctgcacacctttgactgtcacaaagaggaagtttttcaagttggatggagtccaaagaatgaaactgtacttgcatcctgttgtctgggcagaaggctcatggtctgggatctaagcaggatcgaccaagaacaaacaccagaggatgctgaagatggtcctccagagctcatgttcatccatggaggccataccagcaagatctctgatttctcctggaacccctgcgaggactgggtggttgctagcgtcgctgaggacaacatcctccagatatggcagatggctgagaacatctaccatgacgaagatgatctgccaattagcgatgagccggcaaaaacttcttgaagcaacacatcacaaaaggaatcttaactcctatcgactgttggtgctcctagatcggaaccctgctcgccggagaatcttaaccgagtgagagttggctgtaggttgcttccgtggtcgtaactttatgcttgacgggttggtcgtttcttcgaccgtctgtatgtgtattcgtcgaacctttagcattatacatatgctgattgactagatctgttcgtcgcagttgtgttttgtagtattgctttatatctagcaggatcatgctcgtgatgtgatttgtaacgggaacaaaataatatccactc

SEQ ID NO: 129263 - DNA, 688 bp, Zea Mays
catcgctcgcatcgcccggcatctcgcccgccacatcccagatctcccgtccccgccccgcatctcgcccgccagcgaccggcgagggggcgcgcgcccgccgccgccgcgatgtacctggcgtacgggtggccgcagtcgatcccgctggacccggacaactcggaccgcgtggtcctcctccgcttgctcggccgcttcctcctcgccgtctgcccggcctcgctccacctctggtccgccgcacaacaccgggtccgcctcgcccgctccgaccgctctccggagtctctctccgcccacggctacaacgcgcacgccgtgtggagccccgacgccaagaccgtcgctgtcctgacctcttccttctacctctacgtttacaaggttcagcacttggggaagcaactgatcgtcggtggcaagcaggtcccggggctttgcctggctagcatatccctaatcatcaccgagaaggttcctctcgccaatggcgttgctataacgagcaatttcgtgtgtgacaacaaaagcatgctcctcggactatccaacgggcatgtgcaggtcatgtcctggaacgctgaggtacatggaaacgcatgcaacttttgtttattgtaagttactgattattaggtgcgaaatataggtctgctgaacccgctctttctactttctgtgctaa

SEQ ID NO: 129264 - DNA, 3934 bp, Zea Mays
catcgctcgcatcgcccggcatctcgcccgccacatcccagatctcccgtccccgccccgcatctcgcccgccagcgaccggcgagggggcgcgcgcccgccgccgccgcgatgtacctggcgtacgggtggccgcagtcgatcccgctggacccggacaactcggaccgcgtggtcctcctccgcttgctcggccgcttcctcctcgccgtctgcccggcctcgctccacctctggtccgccgcacaacaccgggtccgcctcgcccgctccgaccgctctccggagtctctctccgcccacggctacaacgcgcacgccgtgtggagccccgacgccaagaccgtcgctgtcctgacctcttccttctacctctacgtttacaaggttcagcacttggggaagcaactgatcgtcggtggcaagcaggtcccggggctttgcctggctagcatatccctaatcatcaccgagaaggttcctctcgccaatggcgttgctataacgagcaatttcgtgtgtgacaacaaaagcatgctcctcggactatccaacgggcatgtgcaggtcatgtcctggaacgctgagttctcagacagcttcaagcttggttgctctgtgtgttcgtctgagaaacctactgctgtcatagatgcgttggtgtttgatcctgccagtttgcgagataacactaacgcaaggcctgctccttgctgcacaggcaattcttctattgtccatgttgagctgtcggtgaagctaaggttgctggttgctttgtactcaggctgtcgcattgccctctgtactattggtaagaagggattgaggcagcctggcagcatcagagtggagagatggttggacactgatgatgcgatgtgtacttctgtggcttctgagcaacagattcttgctgttgggtgcagtagaggtgttgttgaattgtatgatcttgcagaaaacacacggcatatacgaaccatttcgttgtatgattgggggtattcagtggaagataccgggcctgttgcttgtatatcttggacgcctgacaattgtgctttcgcagttgggtggaaatttaggggacttactgtatggtctgtgtctggatgtcggttgatgtgtactattcgtcaaactggttcaaattctgcctcatctcctatggtgaaacgttgcactctaaaatttgagcctctaatgggaggaacatcacacattcaatgggatgataatggatataagttatttgctgtcgaagaaaacttgtcagaaagggttcttgctttctcatttgccaaatgttgcctaaacagagggctttcgggcacaacatattcccatcaggttctttatggggatgatcgaatccttttggtgcaaccggatgatgctgatgaactgaagatattgcatcttaatgttccaatttcatacatttcccagaactggccacttctacatgtggtggcaagcaatgatgggatgtacttggcagttgctggctctcacgggctagtgctatatgatttgcgaaataaaaggtggcgtttttttggcgatgttacacaagagcaaaagatccaatgcaaaggcctattgtggctgagaaaaattgttattgtgtgcaactatgttgaaacgtcaaacacgtacgagcttctctttttcccaagatatcatcttgattatagctctttactctaccgaaaaccactgcttggaaggccaattgtcatggatgttttccaggattatatattagttacttacagtccatttgatgtacatatcttccatgtgatgatctcaggagaattatcgccttctagcaatccagttttacagctttcaacagtgcgagaactttcaatcatgagtccaaagagtccacctgtttcaatgcgcttcattcctgaacaaaatgacaaagaagtgctgaagcgagatactaatgaatcttatgatcttttgtcccagcaaccatcaagatgtttgatcttgcggaccaatggggagctttctgtgcttgacatggacgatggacatgaacacgctcttacaaattcaattgaactcttttgggtcacctgttcccagtttgaagagaagggtagtcttatcaaagaggtttcatggcttgactatggtcatcagggtatgcaggtgtggtacccatcacatggagcaggtccttttaagcaagaggattttttgcagctggatccggagcttgagtttgatcgcgaggtgtatcctcttggtcttcttccaaacgttggtgtggttgttggtgtttcccagaggatgtccttctcaactgcggagtttccatgctttgagccttcacctcaagcccaaacaatattgcattgtttattacgacatctccttcagagggacaagattgatgaagctttgcgcttggcaaatttgtcagcagaaaaacctcacttctctcactgtctagagtggcttctgtttacagtatttgatgcagatatatcaaggccaagtgcttcaaaaaatcaggcttcacaaaaagttgattctcccaagaattctcttcttgagaaaacttgtgacctgctacggaactttcctgaatatatggatgttgtagtcagtgttgctaggaaaactgatggtcgacactgggctgatcttttctctacagctggacgatccacagagatgtttgaggaatgcttccaacagaggtggtacaggactgctgcttgctacatactggtcattgctaagctggagggccctgcagtcagccagtattgtgcactccgtttgctacaagctacacttgatgagtctttgtatgagcttgctggggagttggttcgcttcttgctaagatctggaagagattttgagaatgccactccagactccgagaagctctctccaagatttctaggctattttctgttccgttcgccatataagaggcaatcttctgatttgagaagtaactcaatgaaagaacttagtccacatattgcttctgttatgaacattctagagcgtcatgctagctatttgatgtctggcaaggagctttctaaactcgttgcttttgtcaaggggactcaatttgatcttgtggaatatctacaacgagaaaggcaagggtctgctcgtctagagaattttgcttctgcactcgaactgattggacaaaagctccaaatggatacactgcaaagtcgacttgatgcagagttccttctagctcatatgtgttcagtcaagtttaaggaatggatcgtggtgctagctactttattgcggcgtgcagaggttttggtggatctctttaggcatgatttgcgattgtggaaagcatatagcattactctacagtcacatgatgtattcacagaatatcttgaccttcttaatatcttggaggaggagctttcatctgtctctgatcttacattgcaaaatggaccattgtcatgaatgctggacaatgacactgattggaaaaacagctgaatgcggcgttttaaccttgagttaattaacacatacagtttgatgagatctgcggtggggccaggaatctgatgtaaatagattattcagggggtttttccctttgagcaacaccccggaggcgctatgacagctatttgtgcagtgatcagctaagcacctattgttgtattatttgtttgttgcagcagagttgaatgtgcattcttcgccttatggtaagtatgtgctgcactcttaacactgtaagtcatatgagtttttgaccaacaagttgttttctccgttccatagaatcgtgttaagagctagaaatctagaacatgtagattgtcctcacctgatgtttgtagactacgagatattattaaaactgacactatgaggttctcttcattgcattttttacatg

SEQ ID NO: 129265 - DNA, 4194 bp, Zea Mays
catcgctcgcatcgcccggcatctcgcccgccacatcccagatctcccgtccccgccccgcatctcgcccgccagcgaccggcgagggggcgcgcgcccgccgccgccgcgatgtacctggcgtacgggtggccgcagtcgatcccgctggacccggacaactcggaccgcgtggtcctcctccgcttgctcggccgcttcctcctcgccgtctgcccggcctcgctccacctctggtccgccgcacaacaccgggtccgcctcgcccgctccgaccgctctccggagtctctctccgcccacggctacaacgcgcacgccgtgtggagccccgacgccaagaccgtcgctgtcctgacctcttccttctacctctacgtttacaaggttcagcacttggggaagcaactgatcgtcggtggcaagcaggtcccggggctttgcctggctagcatatccctaatcatcaccgagaaggttcctctcgccaatggcgttgctataacgagcaatttcgtgtgtgacaacaaaagcatgctcctcggactatccaacgggcatgtgcaggtcatgtcctggaacgctgagttctcagacagcttcaagcttggttgctctgtgtgttcgtctgagaaacctactgctgtcatagatgcgttggtgtttgatcctgccagtttgcgagataacactaacgcaaggcctgctccttgctgcacaggcaattcttctattgtccatgttgagctgtcggtgaagctaaggttgctggttgctttgtactcaggctgtcgcattgccctctgtactattggtaagaagggattgaggcagcctggcagcatcagagtggagagatggttggacactgatgatgcgatgtgtacttctgtggcttctgagcaacagattcttgctgttgggtgcagtagaggtgttgttgaattgtatgatcttgcagaaaacacacggcatatacgaaccatttcgttgtatgattgggggtattcagtggaagataccgggcctgttgcttgtatatcttggacgcctgacaattgtgctttcgcagttgggtggaaatttaggggacttactgtatggtctgtgtctggatgtcggttgatgtgtactattcgtcaaactggttcaaattctgcctcatctcctatggtgaaacgttgcactctaaaatttgagcctctaatgggaggaacatcacacattcaatgggatgataatggatataagttatttgctgtcgaagaaaacttgtcagaaagggttcttgctttctcatttgccaaatgttgcctaaacagagggctttcgggcacaacatattcccatcaggttctttatggggatgatcgaatccttttggtgcaaccggatgatgctgatgaactgaagatattgcatcttaatgttccaatttcatacatttcccagaactggccacttctacatgtggtggcaagcaatgatgggatgtacttggcagttgctggctctcacgggctagtgctatatgatttgcgaaataaaaggtggcgtttttttggcgatgttacacaagagcaaaagatccaatgcaaaggcctattgtggctgagaaaaattgttattgtgtgcaactatgttgaaacgtcaaacacgtacgagcttctctttttcccaagatatcatcttgattatagctctttactctaccgaaaaccactgcttggaaggccaattgtcatggatgttttccaggattatatattagttacttacagtccatttgatgtacatatcttccatgtgatgatctcaggagaattatcgccttctagcaatccagttttacagctttcaacagtgcgagaactttcaatcatgagtccaaagagtccacctgtttcaatgcgcttcattcctgaacaaaatgacaaagaagtgctgaagcgagatactaatgaatcttatgatcttttgtcccagcaaccatcaagatgtttgatcttgcggaccaatggggagctttctgtgcttgacatggacgatggacatgaacacgctcttacaaattcaattgaactcttttgggtcacctgttcccagtttgaagagaagggtagtcttatcaaagaggtttcatggcttgactatggtcatcagggtatgcaggtgtggtacccatcacatggagcaggtccttttaagcaagaggattttttgcagctggatccggagcttgagtttgatcgcgaggtgtatcctcttggtcttcttccaaacgttggtgtggttgttggtgtttcccagaggatgtccttctcaactgcggagtttccatgctttgagccttcacctcaagcccaaacaatattgcattgtttattacgacatctccttcagagggacaagattgatgaagctttgcgcttggcaaatttgtcagcagaaaaacctcacttctctcactgtctagagtggcttctgtttacagtatttgatgcagatatatcaaggccaagtgcttcaaaaaatcaggcttcacaaaaagttgattctcccaagaattctcttcttgagaaaacttgtgacctgctacggaactttcctgaatatatggatgttgtagtcagtgttgctaggaaaactgatggtcgacactgggctgatcttttctctacagctggacgatccacagagatgtttgaggaatgcttccaacagaggtggtacaggactgctgcttgctacatactggtcattgctaagctggagggccctgcagtcagccagtattgtgcactccgtttgctacaagctacacttgatgagtctttgtatgagcttgctggggagttggttcgcttcttgctaagatctggaagagattttgagaatgccactccagactccgagaagctctctccaagatttctaggctattttctgttccgttcgccatataagaggcaatcttctgatttgagaagtaactcaatgaaagaacttagtccacatattgcttctgttatgaacattctagagcgtcatgctagctatttgatgtctggcaaggagctttctaaactcgttgcttttgtcaaggggactcaatttgatcttgtggaatatctacaacgagaaaggcaagggtctgctcgtctagagaattttgcttctgcactcgaactgattggacaaaagctccaaatggatacactgcaaagtcgacttgatgcagagttccttctagctcatatgtgttcagtcaagtttaaggaatggatcgtggtgctagctactttattgcggcgtgcagaggttttggtggatctctttaggcatgatttgcgattgtggaaagcatatagcattactctacagtcacatgatgtattcacagaatatcttgaccttcttaatatcttggaggaggagctttcatctgtctctgatcttacattgcaaaatggaccattgtcatgaatgctggacaatgacactgattggaaaaacagctgaatgcggcgttttaaccttgagttaattaacacatacagtttgatgagatctgcggtggggccaggaatctgatgtaaatagattattcagggggtttttccctttgagcaacaccccggaggcgctatgacagctatttgtgcagtgatcagctaagcacctattgttgtattatttgtttgttgcagcagagttgaatgtgcattcttcgccttatggaggaggaatttatacattgtggggttgccttcccctgccctttggcaggttagtgaagtgtgccctagaggaaagtggcatgtttgagagcaattagattggagggggctaaaatcccctttgttatttaaaattaaatagaagaggaatttagcctctcggatcccctcaagtcccctgtatcccaaacaaacccttgaagtgttttctacagctttaggaaatgtggtttacttctatggtaggtacatgggcaaccaatgtatatacatttatttttacagcatcctggccccgttcatccacaacgtgttgcacatgtctagcctctccattgcaagggcgtacagatatgtatataaaaatctacacaatgcatgcgcatgcaccggagtgtatctgtatcgaccatgaaaggtttggtacaagtctgaaaaagtatacattgttgtc

SEQ ID NO: 129266 - DNA, 531 bp, Zea Mays
atggcaacaacaccgagaagtataccacccgccggggctgaagctgaaggcggaagggtctacgctggccgcccaatttgcgactgcgacgcccacggcccgcgggctattctgggacagcgaggccccgacgcaacaggccggcggcagcagcagcacaggaacagcaaaggaagccagaagcggaacgaggcgagcgcccggtggctgcaggccgcatgtggccgtgtggtggtgcggtgtgcggccaatcggtcccgtgctgcccctgcctctgctctctccgtcgcgcacgatctccgtgacctggtgcgcgtgcggtgccgttggcgcctgccttccctgcctagcaacagcttgcggctccgcgaaggcaaccgggggccacacgcagatgctgccgccgcgcggggagagccacaccacacgcacgcacgggcacggttggcttggctcggatcggatttcggatggcggcgggactggaccggaccggaccggacggccgttggggatggaggagtgatctga

SEQ ID NO: 129267 - DNA, 79 bp, Zea Mays
atggtaaatcgttggagaactgggtagaggcaggattttctaaggtgcaattcagctattggatggaattgcaaaatac

SEQ ID NO: 129268 - DNA, 4087 bp, Zea Mays
agtatggcgccctctgctgccgtcccgggtggctctgaggttgaggggtcaccacgcatggccaagttcctctgcagctttggaggcagtatccttccccgaccactcgatggctgtcttaggtatgttggcggcgagacaaggattgtcatgttgccgcgtgacatatcatatgccgacctggctgcacggatgagagagctctataaggatgctgatatcatcaaataccagcaacctgatgaggatttagatgcgctggtctcggttgtgaacgacgacgatgtggtgaacatgatggaggagtatgacaaggtcattgcgacaggggaggcgttcactcggctcaggatcttcttattttctcagcatttggatgatgatgctgcatcagtggatgtgcattacaatgtagacgagcgggaaacagagagaaggtatgtagatgcgcttaacagccttggtgatgttaagtcaccttcctcccctgtgtctgtggagcagctttttggcattggaggcaatgattcaggaattcctgattttgctggcttgagacatttgaatgtccctcgtccaacacatagtcagaggtatggagagatggattctccttggagccctgcctatgtctcaccaggccagtacggggtacatgacccaagggattttccaatttcaccatcatctgcaaggtttcaagtaggagcggaggattttgatgagaggactcctgacgactttgtaaggcagtcaccaaaatatcgtcattatgaggcgcattcaccatcacatatggataatttagtctggcttccacctggtgctgtaattcagcaaaatgcaggctttcctggtaatttgagccggtccaacaatttcttggatgggagcaatggatgtgatcactgccgttcaccattccataaggttcaaggttcagtgaatgatcctatctatatgaaccctcgttggactcggccagtccaacaacattttgaccaaccaagcatgattaatgattatcccggtcaccatgctaattcttgtccagattactgccgccctggtgatcattatgtgggaggtcaagatgttagattggaaaatggtgtttatgttaaagagcaaaatggtggtcatcctcccatgttctataatgagtcacatcctcacgatagagtctggcatgtgcataccaagcaaagtcatcagcgatacgaggatccaaggctgcatcatcctgctaatggtagagtgatcgagccatacattatggatgccaacaaagtatatgaagttcattcagcatctcttgctcgttctagccatgagagtcctcactattatcacggtagcagtgaggtcataaatgacacgtatcacaaccaacaagttggaggcagtgggtcgtatgtgcagccagcagggtttgaagaatcccctagccaccattacaaccactcttcggcctatggtgcagattccttttaccaaatgcagcagaatttgccacccattcaatctctgagaaggagagcgaacagccctgttcacactgcctcaccatatgattccccacacctgccaatatcaaatgggaccattaacacaaacttcgtaagaaatacaggtgatgtcagtccgaggataccagggctacctggatatgatcgaatgccaaacacatggactcctcccaacggcagcataccatatagagttgttgggcatgatgttcatgctgcctccatggaaaacactagtgcctttggtcctaggtctaatccaactgctgctcagtatgttcagcatttcattgctcctgaatcaatccagcatcaacctggagctccattgagggaggttcatcctgaaagatcataccctgaacccatgccgtcgtcatatgttgatggcaaagtagctgtttctgcattgcctctcactgatcaattatccaggttggatacaaacacaataaagaaacctgaaggtccagatgatgttaactcaactcaaaatgtgaatgaaacaactcctttgcatgctgtggatgaaccaagtaccttaccccaccatgttgtagttgtacatgaagttgatactaagcaggggaagccaaccgaacatgaaagcaggcaaaagcaacatgaagctggggctacagcactgcaggaatgtggggatatttcagaggatagattgaatttccttcctgaattgattgcctctgttaaaaaggcagcactggaagatgctgctgagacacggatagcccaatcagatgctaatggtgctgtttcacctgttcctgatgatgatgatgataatgaaaagaagttggatgcagcagctgctggtactacagatgcaaatcaggaccctgatttgcaaggaagcattgatcggcagaagagctccaagattgagtctacaactgctgaagctgaagctttgtctaaaggactacagactataaaaaatgacgatttggaggaaattagagagctgggttcaggtacttatggggcagtttatcatggtaaatggagaggatgtgatgtcgctgttaaaagaataaaagcgagttgctttgtaggaagaccatctgagagagagcgtttgattgcggatttctggaaagaagctctgatcctaagctcactccatcatccaaatgtggtttcattttatggtgtagttcgtgatggtccagatggaagcttagcaactgttactgagtttatgatcaatggatctctaaaacagtttctgaggaaaaaagacaggacaattgatcgccggaagagagtaatattagccatggatgctgcatttggcatggagtatttgcatgggaagaatatagtccattttgacctgaaatgtgagaatctactggtgaacatgagggatccgcagcgaccaatttgcaagatcggtgatcttggactgtcaaaggttaaacagcatactttggtatctggtggtgttagaggaaccttaccatggatggcaccagagcttctgagtgggaaaagtaatatggtgtcagacaagattgatgtctattcgtttggaattgtcatgtgggagttgcttactggggaagagccatactctggcatgcgtgctgctgaaattattgggggcattgtaaacgattccctacgtcctcaaattccttcatggtgtgatcctgagtggaagggattgatggaaagctgttggtccagtgatccagctgagagaccgtccttcacggatatatctcaaaggttgaggaaaatggccgccgcaatgaatgtgaagtaaaggtccggaagccatatttgtcttgtatgtgtgttccccgcatccaatatatatagcgatatacaagaggaaggcagagttgaaacaggattattttgagtaaatatgttccatatgtcttggcagcatcgcagttgatgaccctactccaagtgataatttaacaagtgctgacttcatgggagaaaatctatgtcatggagattccaaagcatgtttgatgttttcttttaatcctggagtaaaccggctaccatttgccttccgccgaaaacaagtatgctatatggcgcattgtcttgatgggagctgttgcactgtcatgtaaataagttttgacttgctggcccgtagtagatgtgcaaagtaataggcacgatcacacagttacttttttttttcccatataaattgtgttctaggataggtagaacgaacatgactggagcgatccttgttcagattgtaaagaaaaggacagacccagtgctgacggttcttatatgagtggggtctggttaaagaataaccaaaacaagtcttatacttttatcttgcagagaggttgcatcgaatctaggactttggctcggtagaaaggtttttcaccactgcgttaggcctatacttttttcagtttaaccactgtgctagacctgcccccttttttgagtttgtacttggtctaaaaataagagtatactgttttccatgtgtatatatcatcacttcctatttgaatgccccaaaaaacaagagtacactgttt

SEQ ID NO: 129269 - DNA, 1086 bp, Zea Mays
atggggagggcgccgtgctgcgacaaggcgagcgtgaagaaagggccgtggtcgcccgaggaggatgccaagctcaaggcctacatcgaggagcatggcaccggcggcaactggatcgcgctgccgcagaagattgttgcgcagttgccggggcgaacggacaacgacatcaagaactactggaacaccaagctgaagaagaagctcctcggcaagcgcgcgccatcccggcgcgcgagggcaaaccaggatccctacctcgctgcgggaggcggcaacatgtgcagcaccagcggtggcaacagcgccgcgacggccacgcaaaccctaagcgcgtcggctctagagcggatccagctccacatgcgcctccaaggcatgtacggcgcgttcggttgcagtggcggcggcggcaacgacgaccgcaacgccgtcgtcggggcggcggcgccgcagtggccaaagcttgaggcgctgctgcaggcgaacaggctgctcccgggatcgctgccgacggacgccatggccacaacagtgagcgtgcaacagcggcaccatcagcatctggtcgaccaccagagcctcgcagtcggcgctggtaacgccgcagcagtcgagggcgagcaacagcagctcagctctgccgatgcggcaaactacatggcgctgccaggagggggctttttcgagcggcccaagctagggttttactctccatccgccgaggctgaagctaccgcggccgccgccagcgtagagatgaactcagtcgccccgatggttggtggcggctacggcggcgccggatttgaacagtatcatcatcacgacgtgctatacgaattcctgtacagcaattacggatcggtgggcgagctggcgcaggacgggcatgtccccacgttgccggagctgcagtgcccgaacggcgctgccgtcgatggagccgatgagaagttctcggtgtggaccgcatccgccgcctgcgattacggcgcggccggcggctatcagattcagctgggaaactccatcggtagcaatctgcacgattacgtgctaggcggctatgatcaatgggagtag

SEQ ID NO: 129270 - DNA, 510 bp, Zea Mays
atgcctcgccgccgcttccccttggcgagcacggtcaccgccgcggtcctcctcgccgccgccgtcctagccggcgcgaccgcgaccgctgacgccaagacggagaagagcttggcgtcgaggttcctggagccgcacaacgcggcgcggcgcgcggtgggggtgcccgcgctgcggtgggacgagcgcctggcggcgtacgcgcgccggtacgcggcggcgcgggccggcgactgcgcgctggcgcactcgcacgggccctacggggagaacctcttccgcgggagcggcggcgccgggtggaaccccgaggccgtggtgggcgcctgggtccgggagcgcgcgctctacgaccggtccaccaactcctgccgcggcggcggcggcgcttgcgggcactacacccaggtcgtgtggcgcggcaccacggcggttgggtgcgcgatggcgccctgcgccgggggacgcgccacgttcgcggtgtgcagctacagcccgcccggcaactac

SEQ ID NO: 129271 - DNA, 717 bp, Zea Mays
cacacccacacacacagagagagagagaaagacattgaagaaaaacagagaggcacagctcagcatcgcctccggaagaccggagcggagtcccattcccatcccatggcgagttcccggaggagctccgggctctcctccggtgccgcagcgctgggcattgcgctgctggtcctggccgccagcgcgggcaacgccggcgcgtcgtactacggggagatgaggcggcagttcctggcgcagcagaacgcggcgcgcgcgtcgctgggcctggcgccgctggcgtgggacgagcgcgtggcggcgtacgcgcgggcgtacgcggagtcgcggcgcggggactgcgcgctggcgcactcggcggggccctacggcgagaacctcttctggggcagcggcaccggctgggcgcccgcgcaggccgtcgccgcctggctctccgagcgcccccgctacgactactggaccaacagctgctacggcggctccatgtgcggccactacacccagatcatgtggcggagcacccgacgcgtcggatgcgccatggtcgcttgctacggcggcaggggcaccttcatcacctgcaactacgacccgccgggcaactacgtcggcctgcgcccgtactgacaccgttcctttcgtcgtctggccgccgccgccggccagtgtctcttgctgtcccaaatcgttgctgctacggtgctaccacta

SEQ ID NO: 129272 - DNA, 903 bp, Zea Mays
aaaaccccacggttaccaccgcagctagcgaccgagcaggaaccagtgaaccagcatgaagccactggtggcgcgcctgctcctctgctactccctgctctgcctggcgcccgcggcagccccgttacgcctgcagcacgatcatgtccggggccacggccacggccatgcccacccgcctccgtacgcgcgtaacgcgacggcgtacggcgtctcggcggcgctgtgcccgggctgcggcgcgtgggcggacgcgctggagttcctctactaccacaacctggtgcggctggcgtcgctggagccgccgctggcgtggtccccgcgcctggcgtcgtacgcgggctggtgggcggcgcagcgccgcggggactgcgcgctgcgccactccttccccgacggccagttcgcgctcggggagaacgtcttctggggcgggcccggcggcgcgtggcggccccgggacgccgtcgcggactgggccgccgagggcgccgactactcgtacgccgacaacgcgtgcgcgccaggccgggagtgcgcgcactacacccagatcgtgtggcgacgcaccaccgccgtcggctgcgcccgggtggcgtgcgacggcggcggggtgttcatcacctgcaactactacccgcccggcaacgtcgtcggcgagaggccgtactaactagctagcttagcaactcagtaccctcggcctcggggatttattacgtgacgtggcgaacggcctcgtgtagccgtgtcgtgtgtaaataatattcagcggtcgttccggtgaacatgatggtaattcactcgagtttttcactgttggcttccgtaaatcgtgtttggtttgaccagaggcctcagagccacgatcacaataaaatgtggttttacacttgattc

SEQ ID NO: 129273 - DNA, 626 bp, Zea Mays
gtgaaccagcatgaagccactggtggcgcgcctgctcctctgctactccctgctctgcctggcgcccgcggcagccccgttacgcctgcagcacgatcatgtccggggccacggccacggccatgcccacccgcctccgtacgcgcgtaacgcgacggcgtacggcgtctcggcggcgctgtgcccgggctgcggcgcgtgggcggacgcgctggagttcctctactaccacaacctggtgcggctggcgtcgctggagccgccgctggcgtggtccccgcgcctggcgtcgtacgcgggctggtgggcgccgactactcgtacgccgacaacgcgtgcgcgccaggccgggagtgcgcgcactacacccagatcgtgtggcgacgcaccaccgccgtcggctgcgcccgggtggcgtgcgacggcggcggggtgttcatcacctgcaactactacccgcccggcaacgtcgtcggcgagaggccgtactaactagctagcttagcaactcagtaccctcggcctcggggatttattacgtgacgtggcgaacggcctcgtgtagccgtgtcgtgtgtaaataatattcagcggtcgttccggtgaacatgatggtaattcactcg

SEQ ID NO: 129274 - DNA, 1876 bp, Zea Mays
ttattaaaatttgatttgaacctcacgatgcaaaggcacacgcgaatccgccccgcaatcgctgtcgtcgattctcccatctccactaaaagcatccgttggacggctggagtcattccggcgactcgagaaccgtccgacgtggaccaccaacgaaccgggaaatgcccgcatcttccagattctatacttccgccacgtgctccctcgcctccgcctccgcctcctcccgttccccacctcgccgccgccgcgtctccctcacgggccagtccccgagtacccccctcacgcgccacagtcgaaaccaaagcagctcgcggtggccacacccggacctcgggctcgacatggggttcctgctcgtgcgcaagccgcgtccgagggacgagaagccggacctggtgaactggatgcggtgcttcctgtcgcagcgtctgtctcagcccgccgcggcggcggaggagaccgcgaacgcggagggtaaggccgccgggagacgagaggaagaggagggtggcggggatgacgctgaccacctcgtcgtcatggtgaacgggctgtacgggagttctgcggattggaagtttgcagcagagcagtttgtcaagagattgccgggaaaagtctacgtgcatcgtagtcagagcaattattcaaaattaacatatgacggagttgacttaatgggtgaaaggctagcagaggaggttcgacaagttgttcagaggagaagaaacttgaggaaaatatcttttgttgctcattcacttggcggcttagtaacaagatatgcaataggaaaactttatgaacctgccatggatgaaacatcttcttgtgacattgataagccttctgatgaacaaaatgtacgtgatgttggtaaaatagctggtttggaaccaatcaattttattacatctgctacacctcacttgggctcaaggttgaataagcaacttcccttcctttttggtgtcccacttttggagaaaactgctgcaggaacagcacattttatagttggaagaactggtaaacatctattccttacagacaatgatgatgggaagcctcctcttctcctacgaatggttgaagattgtgacgacgggaaattcatgtctgctttgcgctgtttcaagcgtcgtgttgcctatgctaatgtaacatatgatcatatagttggttggagaacatcatcgcttcgacgtcaacatgaattaccaaaactcaagctaacagcaaacgatgaaaagtatcctcatattattaatgtcgataaaggaaatctagaggatcatcggcaagagggatctgtagaagattcactggcagatagttatgaagaggtgatgatccgtggccttacacaagtggcctgggaacgtgtggacgtatgctttcataagagttggctaagatacaacgcccataataacatccaggttaggatccatccaattaattcagatggagaagacgtcatataccatatgatagacaattttgtagtgtagccaagtagtccgtccggtgaatgccaactactacgtaaaagattactgctatttccagtggattcgccttgagaggtcattaatcttttaccatgtgggttgctatgcacaacagctagataattggcatcaatcagcacgtaactcatacgtgctgctaggtgattcgagcgtaggacctgtgcttgttggttgttgctggcaatgtaaatataagtgttaggtaatgcaaatatttgcatgacagtgcatattcttgtaaatgggaatttaccatgttattggaaatccaaagttcaaactatctcaagcttgttggttgctgtgctgaaataaaaaagatgttccttttc

SEQ ID NO: 129275 - DNA, 267 bp, Zea Mays
atggcgcgcgtgttgggggggcttccagttcagccgcccttgagcctttgtttttctggttccgggagggaggaggagggctccctgcagtgcagagaccacgactttcttcgtgtttgcagcactggccactggagcaccgctaccagctggtcacgccatcaaggtgcctgcctcctgtcctctcctgctgccccacgagagacgacgaggaaggacgtcgtcaacaagaagggcgagccagaactctgccaggacgaggtgtag

SEQ ID NO: 129276 - DNA, 2409 bp, Zea Mays
cccagagacgagagacggcacaacccttgctgccgtcctggtcgccacacggccacaccaacccaacacctcttcttcctccgctctcagcttaccccaccacaggcgagggaggcgactccttcctcgcggctgcccgctccggccccgatcgcatctcctttgcacgccacggcccgcggcccgcgcgcagtgtccatcggcacggccgtcctccgtgtgtgggggcgcatctggtgctagcttgccgggctagggtttggcttggcctcgtctaccgccccgtctcgtctgataggcacaggttccgtgcacgcgatcgtcgtctctccatccgttgtgactgcttgccgtcccccgcttgcttcgtcctgctacgggagggccactgctgccatcgcgtccaccgacgaatttccccacagagcattagagcaattatcttggagttgcagatctgtacctgaagattcatattgaaatctggaagcttctgctgttgagtacagagaaatatttcttgccttttgaggaagactgcagagcccctaaatgtgaaacttgtttcttttcttgtctactcctgaatgctgacgaactcagcctctcacgttacttagctgaaggtcgtactggtacagacaccgaggatggagcaagcaacaggtgtaagtggtcctgaacacataattgatattccaagggaaattggtcctcctgcttcggtttctcgtagtgctggtagagagaaccatgaagaatcgaatcctgtggacaggccttcaacaagagctctagtacctgccttgcaggcaccatcagcaataggtgctgtacctattacagggcatacttcaggcactaggagaaatgacaactatgttcgtcggcacagaagcccattgaattctggactgtggatttcaattgaagttattgttaactttagccagattgttgctgccattgttgttctttgtgtgtcaagaaaggaacacccacaagctccattacttgagtgggtcataggttacactgttggttgttttgcaacgttaccccatctctattggcgctatatacaccgtaatattgtaaatggtgagcatgagtcatcacatacacctcaagggtccgctcataacaactcaaatgaagcgactcatgctgcaagtgcatcagaacgccgcagaaatgctgcccgaaatgctgtgcttgctaatcctaggatcaatgcgctgtttgaccacttcaagatggccctggattgtttctttgccgtctggtttgttgttggaaacgtgtggatatttggtggccgttcttctgctgctgatgcaccgaacttgtacaggttgtgcattgtgttcctcacttttagttgcattgggtatgccatgccattcatcctatgtgcaatgatatgctgttgccttccctgcattatatctattatgggttttagagaagatacaaacaatacaaggggtgcttcctcagaatctatcaatgctttgcctacatataaattcaaaatcaagaaacgtcgccatggttcaggcagtgaaactgaaggtcaggaaggagggatattggctgcaggaactgacaaggagcgatcactctctgctgaagacgcagtttgctgcatctgtcttgcaaaatatgcgcacaatgatgagctccgtgaacttccatgtgcacactgtttccacaaggactgtgttgataaatggctcaagataaatgcactttgccctctgtgcaaatctgagatagtgagctcgtctggtacttctgatgcccgccaatcagaccagaacaccgttcctgtgcaggagatcgaaatgcattaggttggtctgttcccgcagcttatcacataaggatacatctgatttgtggctctcaatcttcatgtataaagttggagattgatgtatggattgtagagacgcgtaggtttttttttgtatttaacactgctatcttggagaagttacagctattctcgctgtcacccaactatggcaagccaatactacccaggttttcccccatagcgtgggttgcaccttatgttctgctctttatgacattgcatgacttctttcgagtttctagagcgaaataggcagaagatgttggagatagtctaatcaagtggttgtagtgaaacattttcgtgcatgcaacttttgaaatactccctccattctaaactatactataggacggttggttttttctatatatatattgtttttgctatgcacttagatatatattacatctagatatatcatatatagttataatgtatttagatgaaattgtcttatagtttgggacttggaatggagggtgtattttcatgctacaaattgaagttaccgatatcagtttatg

SEQ ID NO: 129277 - DNA, 362 bp, Zea Mays
gtagaccacctcagctttcctgggtgcaacactgtcactacagtaaaaaagaggagctagattgactagataattagggatgactgtttatacgtcgatcacaaacggcaaatgcagtacagaaaaagtaaccccgtctccaatatcaggcaaatatttttcacaatattgccaggtctgttacactataaactctatcctgtgcaactaactctggtttttgcacttgcaacctactactatcccgtaccttaaattctcatcatttgacctcgacttgtattggctaccaaagaaaagactggagcagcacctccagctgctagcgcttcagcagtgtctcagttggtttgtttcaaagc

SEQ ID NO: 129278 - DNA, 2504 bp, Zea Mays
cagagacaaaaaccaaacccgcggcgcctgtcgtcgctccttcgttctcgccgctgccgcactcccgacggccaccttaacaagcctctggcggaggaccaaatactctcgcgatcgccgtagcgccaccgcgtcgcccaatccgttgggagccgtcgcgcgatgcaggcggacgagcaggcggaggcgccgcgccgcgccaaggaggccggcaacgacgcctaccgcaagtccttgctcgaggaggccgtggagcactacaccctcggcgcgctccttgaccccagtgacatcgccttcctcaccaatcgcgccgccgcctacctccgcatgggcaagtacgaggagtgcgtgagggactgcgatgaggccgtgaagcgcggcagggagctcagctccggcagcgagctgatcgcgaaggcgctgtctcggaaggcgtcggcgctgctcgagctcgcgtgctgcgccgcagactacgcaccggctatcggcgccctcaagctgtcgctggccgaaaattacagcgaggagacgctcgagaagctcaacgacgcggagagcgtgaggaaggaggttgaggaacaggagcgattggatcaggaggccgccaaccaatgccgcgaggaaggcatttagcaacagagctcaatgccacatccatctgggagcctttcctcaaggtcttgaggatgccgagaaatgcattgaactagatccaacttttctgaagggctatgtgcgtaaagctaaagtccagttcctgatggaaagttatgaaaatgctttggcaacttacctagagggtctgaagtgtgacccaaataatatggaggttctggatggcttaagaagatgtgcagcatgtgttaagaggtctaatgcgggtgatgttgagatcgaggatttgaaatatgttgatattgatgaattgaaatatttctcggtacattttatatgaagtagagcaagagaactacatgatgaagagcaggccgaatggccatcgaaagtcaatcgacctctatcctgcatgccatgccatcatgaacaattggctattcagcttgactgaaggtctcgggtctatatctcctttgtttatcctgtccagtcctaccatccctatccttttctcttccattagctctggcagctttctgcacaagtgacctcggtctcaccgtcagtgcatgatgcagggtggtggtccaaacactgtacaccagcagaggaggagtggggtgatgacttctgagtgtcaatgcaacaccaaggacattgacgagtcatccgccgagaggctgtacgacgcagtgaagtacaccacggacaacatgatgctgatccaggtcccagtgttaggaacaacgaaggaattctggtgattatctgacaaagcgactaggatcagcagaaaacttgcattgatactgaggagccaccactccgtcggcaagtacctagctgctcctctgcaggtgtccaacatctggattgggagcaatgggagtgtcaagctaaggggggtcagtttcactggtcaaggcttcagcactgagcgtgtgagagatgactacaaacgcatgtccaggatcctgatggcgttaattactctctcgggtggggacagaagcaaattgcctccggactacaaagagttcctcctgctcttggaatcggacacccttacaatggaagatgaattcttgattgtaaacaatgctgcactgctgcccataaaaaaccgcactgaggtctttctgatgctacacgatagaattgtcgattatcttgggagtacggacaaaacgaagaagaagaaaaagaagaggatactctctagtcttccctacaaggaagactggctagatactgccaaggcaaatacaaaaatcaaccagtgggttgccaatgttcagaacgagtacagagcgactccacatgatctgctgcggctcaacagaaatgtaagaagccacatgcatcgctacagcgacggtgacgacatcgaggaagttctgtattgcgaatggcccgagctgctcatggtcatgcagaagatgttgcacttggaaggcgagctcgaaggcactgacattcagaacaagtttggctaggcgtcctacttaagctactgttcttcgatcgagttcaggggccgaaagtttatgctggtggagtgatggtcgatgtaagtttgtcgctctcatcatgaaggtaaagctggatcagctttataaaatgtatgctaaaatgtaaagtaaactttaaaccattctatctgagaaggtcttttcttaatacaataccgggagtatgtctcgtcttgcttgtaaatcgtgcctgggtatctggctgtaggtttgtcttgcttgatcttgtgaggatgctgctcgcgttccttggagatcaagcatgcaaacgtctgtaaacaacatccttctcctcttactgaagataaagctggaccagctttataaaagtattatgaaaaatgttgcatt

SEQ ID NO: 129279 - DNA, 736 bp, Zea Mays
gtcgtcgctccttcgttctcgccgctgccgcactcccgacggccaccttaacaagcctctggcggaggaccaaatactctcgcgatcgccgtagcgccaccgcgtcgcccaatccgttgggagccgtcgcgcgatgcaggcggacgagcaggcggaggcgccgcgccgcgccaaggaggccggcaacgacgcctaccgcaagtccttgctcgaggaggccgtggagcactacaccctcggcgcgctccttgaccccagtgacatcgccttcctcaccaatcgcgccgccgcctacctccgcatgggcaagtacgaggagtgcgtgagggactgcgatgaggccgtgaagcgcggcagggagctcagctccggcagcgagctgatcgcgaaggcgctgtctcggaaggcgtcggcgctgctcgagctcgcgtgctgcgccgcagactacgcaccggctatcggcgccctcaagctgtcgctggccgaaaattacagcgaggagacgctcgagaagctcaacgacgcggagagcgtgaggaaggaggttgaggaacaggagcgattggatcaggaggccgccaaccaatgccgcgaggaaggtttggatgttgctcgattacagcaccattgaaatgggaaattgggcaatgtttctttgaggatgttgggaaggggagaaccttacccaattttaaattaaaattaaatgcaaggtgtacatatgcaaagccaagcg

SEQ ID NO: 129280 - DNA, 2067 bp, Zea Mays
gtcgctccttcgttctcgccgctgccgcactcccgacggccaccttaacaagcctctggcggaggaccaaatactctcgcgatcgccgtagcgccaccgcgtcgcccaatccgttgggagccgtcgcgcgatgcaggcggacgagcaggcggaggcgccgcgccgcgccaaggaggccggcaacgacgcctaccgcaagtccttgctcgaggaggccgtggagcactacaccctcggcgcgctccttgaccccagtgacatcgccttcctcaccaatcgcgccgccgcctacctccgcatgggcaagtacgaggagtgcgtgagggactgcgatgaggccgtgaagcgcggcagggagctcagctccggcagcgagctgatcgcgaaggcgctgtctcggaaggcgtcggcgctgctcgagctcgcgtgctgcgccgcagactacgcaccggctatcggcgccctcaagctgtcgctggccgaaaattacagcgaggagacgctcgagaagctcaacgacgcggagagcgtgaggaaggaggttgaggaacaggagcgattggatcaggaggccgccaaccaatgccgcgaggaaggcaatgaattttttaggcagaagaaatacaatgaagcagcaatacaatacacacgagctataaaaatgaacccaaaggatccaagagcatttagcaacagagctcaatgccacatccatctgggagcctttcctcaaggtcttgaggatgccgagaaatgcattgaactagatccaacttttctgaagggctatgtgcgtaaagctaaagtccagttcctgatggaaagttatgaaaatgctttggcaacttacctagagggtctgaagtgtgacccaaataatatggaggttctggatggcttaagaagatgtgcagcatgtgttaagaggtctaatgcgggtgatgttgagatcgaggatttgaaatatgttgatattgatgaattgaaatatttctcgggtggtggtccaaacactgtacaccagcagaggaggagtggggtgatgacttctgagtgtcaatgcaacaccaaggacattgacgagtcatccgccgagaggctgtacgacgcagtgaagtacaccacggacaacatgatgctgatccaggtcccagtgttaggaacaacgaaggaattctggtgattatctgacaaagcgactaggatcagcagaaaacttgcattgatactgaggagccaccactccgtcggcaagtacctagctgctcctctgcaggtgtccaacatctggattgggagcaatgggagtgtcaagctaaggggggtcagtttcactggtcaaggcttcagcactgagcgtgtgagagatgactacaaacgcatgtccaggatcctgatggcgttaattactctctcgggtggggacagaagcaaattgcctccggactacaaagagttcctcctgctcttggaatcggacacccttacaatggaagatgaattcttgattgtaaacaatgctgcactgctgcccataaaaaaccgaattgtcgattatcttgggagtacggacaaaacgaagaagaagaaaaagaagaggatactctctagtcttccctacaaggaagactggctagatactgccaaggcaaatacaaaaatcaaccagtgggttgccaatgttcagaacgagtacagagcgactccacatgatctgctgcggctcaacagaaatgtaagaagccacatgcatcgctacagcgacggtgacgacatcgaggaagttctgtattgcgaatggcccgagctgctcatggtcatgcagaagatgttgcacttggaaggcgagctcgaaggcactgacattcagaacaagtttggctaggcgtcctacttaagctactgttcttcgatcgagttcaggggccgaaagtttatgctggtggagtgatggtcgatgtaagtttgtcgctctcatcatgaaggtaaagctggatcagctttataaaatgtatgctaaaatgtaaagtaaactttaaaccattctatctgagaaggtcttttctt

SEQ ID NO: 129281 - DNA, 79 bp, Zea Mays
gggaattcatcatcatccatttatacaatacttaatatgtgtgtgtctaaattcatcatcatccatttgaatatagaca

SEQ ID NO: 129282 - DNA, 3012 bp, Zea Mays
atgcagcagcaggctgaaacaatgggctactgctcctcctacacgtcgtcctctcgccccgtcgtcccctcctcctccctccgacgcctcggcctcgttctggcggccgcgctgctggtctggtgccagcgggtggccacggcgcagcagccggtgccggtgccggtgcgcgtgggcgtcatcctcaacctgacgccgtcgtcgccggtcgggcagcggcggaagctcggcattgagatggcggtggaggactactacgccgcgcgccccggatcccggaccagggtcgcgctgcgcttccgggactccgccggggacgtcgtcgccgccacttccgccgcggtggacctgatcaagaacgagcaggtgcaggccatcatcggcccgcagacgtcggcggaggccgacttcgtggcctacctctgcaaccgcacccgcgtgcccatgctctcctcctccgccacctccccggcgctctccccggcgcagacgcccttcttcgtgcgcaccgcgcccaacgactcgttccaggccgcgcccgtcgccgccgccctcgccacgttcggctggcgcgcggcggtcgtcgtctacgaggactcgccctacgggtccggcatccttccggcgctcgccggcgcgctgcagggcgtcggcgtcaggatcatggaccgcgccgccgtgccgggcgacggccgcatcgacgctctgctctaccgcttcaaggcgatgcccacgcgcgtgttcgtcgtgcacatgaacgcccgcctcgccgcgcgcttcttccgccgggcgaggcttgccgggatgatgacggaggactacgcgtgggtcgccaccgacggcgtaggcggcgtcgtggacgcgctcagccctgacgacatcagcgccatggaaggggtcctcagcctccgcccgttcgtgcagatgacggaccgagtcggcaacttctccgcgcggttcagggagaggctccggcgggagtacccgagcgccgacgtctactacccgcatgacccgactgtggtcatgctctggacatacgacacggcgtgggcgatcgcggcggcggccgaggctgccggtgtctccagcccggcgttccagacacggcagcagagcacggcggccacggacctggaccggctaggcgtgtcggcaaccggagcgacgctcctcaaggcggtgcgcgagaccaccttccgcggcctcgccggtaacttcacccttctcgacgggcagctgcagccgccggcgtacgagttcgtcaacgtcgtcgggaaaagctcgagagcggtgggcttctggacgccggatgatgggatcacgcagactctgggggcggacggcgccaaggggatgaggaggacaatcttttggccaggtgattccacgtccgccccgagaggctgggtcgtgtcgccgaacggacataagcttcgcgtcgccgtgccggtgaagaatgggttcaaggagttcgtcgacgtcggcggtgagtcggcgacagcagagcatccaaacatcacaggctactgcatcgaggtgttcgacgcggtcatgagcaagatgccgtacccagtgagctacgagtacgagccgttccccgacagctccgagtcctacgaaaacatcgtgtcgctggttccagagcagagcgcggacatcgtcgtcggcgacgtgacaatcacggcgagcaggatgagcaaggtggacttcagcatgccgttcacggactcggggtggtcgatggtggtggcggtgcgcacggagacgagcacgagcatgtggatcttcctgcggccgctgaccaccagcctgtggctcgccagcttcgccttcttctgcttcaccggcttcgtggtgtgggcgatcgagcaccggatcaaccccgagttccgaggcacgcggtggcagcagttcggcctcatcttctacttcgccttctccaccctcgtcttctcgcacaaggagaagctggagagcaacctgtcgaggttcgtggtgatcatctgggtgttcgtcgtcctgatcctgacgtcgagttacacagcgagcctgacgtcgatgctgacggtccagaagctccagccggcggcgaccgacgtgacagagctccagcggaccggggcctacatcgggtaccaggagggctccttcatcaagcaacgactccagaaacaaggcttcgacgagaccaagatgaggagctacagcacggcggaggagtacgccgacgcgctgtccagcggccgagtcgccgccgtgttcgacgaaatcccgtacctgaagctcttcctgtcgcagtactgcgatggctacaccatgtacggcccggtctacaaggccgacggcttcgggttcgtcttcccgacgggcagcccgctgacgcccgacgtgtcgcgggcggtcctgacgctagcggaaggggaggagatggcgcagatcgagaagaagtggttcggcgagccgggagcgtgtccgagacagagcggcggcggcgccgccgccgcgctcggcgcctccaacctcagcttccggagcttcggcgggctgttcctcatcaccggcgtcgtgtccagcctcatgcttctcgtctacctcgccaccttcatctaccgcgagcgcggcgaggtccggccggagccggaggagggagggttggggagctcatcggtgcgccggctgctcgcgtggatgcgacacttcgaccagagggatctcaagtgccccacgttcaagacggggaacgacgactgcgtcagggaagggaaccataggagatgggtggagtccgtcaggaatggccgtggcgggaacgggtcggtgcaggcggcgatcgaggagggagccatagccgttggcatgaccccgctcaggttcagcacctctactgcgtcggagacgatcaacgctgattcgtcgccggcgtcggagcttggcacctcgttcgggcaggggatactggaggcgccacactctgtatcggtggagatgccaggatcaacggcctcataa

SEQ ID NO: 129283 - DNA, 2109 bp, Zea Mays
atataccgagtagaatagagaggggagagggctagggttcagagcacgacgagccataacttcaacaagcagcgggcgggtctcgggcggcgcgcgggcgcttggtggacgacgctcaagcggaggcgggcagcgcttgggagtcaggcgtgcgaccttgcggctgtgctcaggcggggcgttgcgtgaagcgctagggagtcgggtgtgcgacgggcggcgctcgttcctcaggcatgtgcggacgacgctcagacgcatggctgtgtcgaccacttgcagacgacgccgacacagatccaggtccaggtccaggttaagtattgttttttggtgtgtggacgtgattcttctagtgagatatgttctgaagcggcaaggtaaaccctcttagtctacttgtttaacttttaaaatatacccatcggtttgaatgatgcaaaactacaataatcttcatgtacttgattgactaatgagttggatatgattcgtattctatttcttaaaaaagtaaggcagaagatagctagattcatgatttggcaaatacaacctcaaattaacttgcctattcatcgattatgttcaggaaataatgtatcaattaattgaaggaagtaatagtagtggctcatctagaactcattcgattcctagttctaactatgaccactaacttttgccttgctagctggctatgtacaagcctgcaacacattcttatgataccatcatgtcattaaatgtcaagggctgagtatccccggacagcagggcctcgactacgcagttcgtagtcgtgacccatcttctccggcgagattttgcccctcagccacaggttttgttggtgagtggagaggagagattagagagaataaactttgcttaatccttccagccggctggttacacatatatatatggccgatcggccctaataaactagagataattactccttgatcctagggatagctatctaatcattcctaacaaccagcccctcccccctaaatcttctccttaattctaggaacttgaaacaaaaagtaaccatgttctatctgtaacaaaccagtgcgtgcgcgcctaaccgcccacgcgtatcgcacgctcttttgcccggcgcacgtcgttggcgcgcctgcgcctggtgtaggtacgtccgcacatgacatatactagagtctaaagtccattgaaattttaaattatatactttcatgtatggatggtgtttggagtgcaaacgtgcctttttatgttccacaaaatcattttactattgatccattccatcttttatactctttaatctattatggcattgatttccttcagttgcgtgtttccattttctgccactagttctatagaagttcactgatgtgtttaaagttataatggttacctagactaggctaagtagagtatacgtattgtagttctactgccttgaacaagaaaattcttgtctttgatgatgtagtttcttggttttttttcatctacaacaaatttatgatttattctcatttccttttgcaagttcatggagcatggttaccaccttggtttgcggcacaatatgctcattacgcggaggttgtcgcaggtcactagaataaacaagggaaacctgctgtgcagaatgttttgcataagagaaaatggttgccctcaagaaaaatgtaggaccttatgtataaaaggtatcaacaagatgttaatgggataaacctcatattgagaccgctaagatgaaatggattcatgttaaggagaaattggttgtcctcaagaaaaatgcagaaccttatgtacaaatggattgtcttcaaaatgttgttcttgtagctacaacaaagagaaacaacaatggtggtgatgctatacgtgtagaagtagcaatgttggtcttgtagctccaagattttgttattttgttgttgatgaatgatatctatgataatatattgctaagtgtatgtgatgatcattggttgttgtttaattataatggtttgtgcttattgtgctacattgacattggtaataattaaaaaattaaaatggccttggttgggccaaatgttttgtgac

SEQ ID NO: 129284 - DNA, 934 bp, Zea Mays
atataccgagtagaatagagaggggagagggctagggttcagagcacgacgagccataacttcaacaagcagcgggcgggtctcgggcggcgcgcgggcgcttggtggacgacgctcaagcggaggcgggcagcgcttgggagtcaggcgtgcgaccttgcggctgtgctcaggcggggcgttgcgtgaagcgctagggagtcgggtgtgcgacgggcggcgctcgttcctcaggcatgtgcggacgacgctcagacgcatggctgtgtcgaccacttgcagacgacgccgacacagatccaggtccaggtccaggttaagtattgttttttggtgtgtggacgtgattcttctagtgagatatgttctgaagcggcaagttcatggagcatggttaccaccttggtttgcggcacaatatgctcattacgcggaggttgtcgcaggtcactagaataaacaagggaaacctgctgtgcagaatgttttgcataagagaaaatggttgccctcaagaaaaatgtaggaccttatgtataaaaggtatcaacaagatgttaatgggataaacctcatattgagaccgctaagatgaaatggattcatgttaaggagaaattggttgtcctcaagaaaaatgcagaaccttatgtacaaatggattgtcttcaaaatgttgttcttgtagctacaacaaagagaaacaacaatggtggtgatgctatacgtgtagaagtagcaatgttggtcttgtagctccaagattttgttattttgttgttgatgaatgatatctatgataatatattgctaagtgtatgtgatgatcattggttgttgtttaattataatggtttgtgcttattgtgctacattgacattggtaataattaaaaaattaaaatggccttggttgggccaaatgttttgtgac

SEQ ID NO: 129285 - DNA, 3504 bp, Zea Mays
ccacttcaaatattttttaggctgcttcaaaaaacatggtttagaagtgctctaaatacttcaagtcaactccgttctagatgaacgctcgtttccctcccggcgactacttgcatccattaccggctattgcttccattaccgtccgcgcttagcactaaccacagtgaaaactgcgccactaaccgcagctttaaccccaattccatcaattagcggcgactgataaagtaattaagccggtggcgaagcatcctcgtccgcgtccgcatccgcaccgatccggtacgggagttctcggctccgacgccccacgcggccccgcctcgcgctccttcctcgaacacctcgccgccggctctcctcagctccgccgactcgcttcgctgtcctcctcgcccccagcctcctcctgatcccagattcgcctcgccggcccccggcgcccgccacgagcgccgtcaagcgaagccgttcttccctggcgcgcgccgctggcgtagctgccaggctccttccgccgaagcacatcgcggccagctggcgctcgtcgtccaccgtcgtcgcggcggacttcgtcctcctcccggaagcacagatccgcacaggctcggctgcatttctccacttgctggtaaggaagctcgctccgatggattactccgagggttagttccgccctggtcttccgtttctacgctgccagcaatcaagttccaacaagtcgtcgatggactgcgatttgttcgctgcgtggtggagcagcagcaccagattagtctccaggatttttcgggggtcagctgatgccccgggcccgtcgccagcgaggccagccatgccgcttcaccagaagcaggcggggctcgctgctagcaagctgggcgtggggacctcgaagaaacacagggcttttgtcgcaagcgatgagcagtggtacaacaagatttttgatccgtcaagcgacttcatcttgacatggaaccgcattttcctcttctcctgcttcgtcgcgctatttatagaccccctctatttctatgtgcccaagatcagctacggcagccccaaattctgtatcggaacagacacccgtttcgccgtcggtgttacattcttcagatcgattgcggatttattgtatgtcctgcacatcataataaagttcagaacagcatatatcaatccaagctcgactctgagggtgtttggaagaggggatcttgtcacaaatcccaaggaaattgcgtggaaatatatcagatctgacttagctgttgatgtggcagctgctttgcctttgccacagattattgtctggtttgtgataccagctataaagtattcctctgctgagcacaacaataacattctggtgctcatagttcttgctcagtatcttccaagattgtatctcatattccccttaacttatgaaattgtcaaagctactggagttgttgcaaagactgcttgggaaggagctgcatacaacatggtgctctatctgatagctagtcatgtgctaggtgcactgtggtatttgctatctgttgatcgccagacattctgctggaagacgaactgcctgaatgaaactggttgtgatcttaagtacctagattgtgacacgacaccaaatgctacatgggcgaatacgactgctgtcttcagtaattgtaatgctagcgataccaatataagttttgattttggcatgttcgagcctgcattgtctaatcaagcccctgctcaaagttttgcgatgaagtatttctattccctctggtggggattgcagaatttaagctgctacggtcagactcttactgtgagcacctatcttggcgagacgctgtattgtatattcttggcggtacttggtcttgtcttgtttgcgcatttgattggaaatgtgcagacctacctgcaatctattactgtgagggttgaggaatggagattaaagcaaagagatactgaggaatggatgagacatcgtcagcttccttgtgaactgcgggaaagggtgagacgatttatccagtacaagtggcttgcaacaagaggagtgaacgaagagtcaatattgcatgctctgcctgcagaccttcgacgtgacattaagcgccacctttgcctgggtcttgttcgacgggttccttttttctcccagatggatgatcagcttcttgatgccatctgtgagcgtcttgtatcatcactgtgcacaaaaggcacatacattgtccgtgagggtgatccggtgacagagatgctcttcatcatccgtggaaaactggaaagctccacaacaaatggtggccgcactggcttcttcaattcaatcaccctgaaacccggtgatttctgtggcgaggagcttcttggatgggctcttgtccccaggcctactacaaatttgccgtcatccactcggacagtgaaggcactgatagaagtagaggcctttgcgctccaggcggaggatctcaagtttgttgccagccagttcaggcggctgcacagcaagaaactgcagcacactttccggtactactcgcaccactggaggacgtgggcctcatgcttcatccaagctgcctggagacggtacaagcgaaggaagatggcaaaggacctgagtatgagggagtcattcaactccgttagattagacgaagtggataacgaagatgacgattctccgcccaagaatagccttgctctaaaattcatagctaggactagaaaagtgcctcagaacatgaaagagttgccgaagataacgaagccagacgagccagatttctcagctgaacccgaagactaaagttgtctttgcttatgctatcatgtacagtggtcatagctgactattgtgaattgctagtcctatttggttcgtgatggaggttacaagccaactaggtatggtgggtgaattgaacttgggttgacggtgccatctgtggatgtgaggaaggtaactcagaatatcaatgaaagcgtaatgaagcttctgactggtatatagactgaatggttgtaagttaactagttgctacgttcatgttgtatattcagacatctctgtgcctatagatttcttgaaaaaaaaaggaaagaaaaaacaagaatacatcattacatagactgtaatcttaaacatctgacataagggtgtggctacgttgtccgtggccgtggaggactgtaaatcatgagggtgtggcttctggtaaaatggctagcaccacgcagtgatgagagatatctcgttgagtcatcagggcgcagattcgaacaggggcggagctaggccgcggattcgaacaggcgcagagctaggcctgtttatcggtgtcagctgacaccggcggctttttgcaaaatcaatgagaaatatttgatatgcgttgtttatccatagagctgatatcagtgtctagtggaatcggctccttcagctggcttcgctccgcatttgtgagacaaaggttt

SEQ ID NO: 129286 - DNA, 1629 bp, Zea Mays
cataatttggaattttctgtcttacaacatgatgattattatcaagacctacctgcaatctattactgtgagggttgaggaatggagattaaagcaaagagatactgaggaatggatgagacatcgtcagcttccttgtgaactgcgggaaagggtgagacgatttatccagtacaagtggcttgcaacaagaggagtgaacgaagagtcaatattgcatgctctgcctgcagaccttcgacgtgacattaagcgccacctttgcctgggtcttgttcgacgggttccttttttctcccagatggatgatcagcttcttgatgccatctgtgagcgtcttgtatcatcactgtgcacaaaaggcacatacattgtccgtgagggtgatccggtgacagagatgctcttcatcatccgtggaaaactggaaagctccacaacaaatggtggccgcactggcttcttcaattcaatcaccctgaaacccggtgatttctgtggcgaggagcttcttggatgggctcttgtccccaggcctactacaaatttgccgtcatccactcggacagtgaaggcactgatagaagtagaggcctttgcgctccaggcggaggatctcaagtttgttgccagccagttcaggcggctgcacagcaagaaactgcagcacactttccggtactactcgcaccactggaggacgtgggcctcatgcttcatccaagctgcctggagacggtacaagcgaaggaagatggcaaaggacctgagtatgagggagtcattcaactccgttagattagacgaagtggataacgaagatgacgattctccgcccaagaatagccttgctctaaaattcatagctaggactagaaaagtgcctcagaacatgaaagagttgccgaagataacgaagccagacgagccagatttctcagctgaacccgaagactaaagttgtctttgcttatgctatcatgtacagtggtcatagctgactattgtgaattgctagtcctatttggttcgtgatggaggttacaagccaactaggtatggtgggtgaattgaacttgggttgacggtgccatctgtggatgtgaggaaggtaactcagaatatcaatgaaagcgtaatgaagcttctgactggtatatagactgaatggttgtaagttaactagttgctacgttcatgttgtatattcagacatctctgtgcctatagatttcttgaaaaaaaaaggaaagaaaaaacaagaatacatcattacatagactgtaatcttaaacatctgacataagggtgtggctacgttgtccgtggccgtggaggactgtaaatcatgagggtgtggcttctggtaaaatggctagcaccacgcagtgatgagagatatctcgttgagtcatcagggcgcagattcgaacaggggcggagctaggccgcggattcgaacaggcgcagagctaggcctgtttatcggtgtcagctgacaccggcggctttttgcaaaatcaatgagaaatatttgatatgcgttgtttatccatagagctgatatcagtgtctagtggaatcggctccttcagctggcttcgctccgcatttgtgagacaaaggttt

SEQ ID NO: 129287 - DNA, 1937 bp, Zea Mays
cagccgtcttccccctcgctcgtctccaaacgaggtcgcttcactcctccaaagtccaaacccggggcattatcgcgcgtgaggtagggcgagatggcggcggcggaggaggaggaggagtgggaggatgggcgttcggtgatgccggaggaggaggacggagacatcgaggacgtcccaccgccgccgctgctaggcaggaacttcggcagcgaggacgaggacgaggacgaggcgggctcgttgaactcccagtcccagtggtggccgcggagcttccgggaagcgactgacacctataccattgccgcgcccccgggcctccgtcacctcgtcgtcggtgactgcaatggcctgggctctgacctgaagctgcctcttctgtcggacaagctagatgggaggcaagattcatccaacaacttgctgccagtagcagaccccttcggttcagtgctaagcgacgggagattctcagatagagtgcaacaagccccaaccactccaggatgcaatctgacgcaaaccgtgttcaatggggtcaacgtgcttgctggcattggcattttctctgctccatacacgattcgtgaggccggatgggccagccttgtggttctggcttttttcgctgtggtgtgctgctacactggagttcttctaaagtactgctttgagagcaaagatggtgtcaaaactttcccagacattggggagcttgcctttggaaggatcggccggtttctcatttctatagttctgtacaccgagctctattccttttgtgtggagttcgttattctggaaggtgataacctggcatcaattttcacgagcaccactttcgattggaatgggattcatgccgatggcagacatttctttgggattctatttgctcttgttgtcttacccagcgtgtggttgcgagatcttcgagtaatatcttacctttcagtgggtggtgtgtttgcaactcttctggttttcctatctgttggtgtagttggtgctactggcaacgtagggttccacttggcagggaaagcagtgaagtgggatggtataccatttgcaattggcatttatggtttttgctacgctggacactcagtgtttccaaatatctatcagtcaatgtccgatcgcaccaaattcaacaaggcactctacatatgttttgcaatatgcacgacaatttatggcgctatagctgttattggctacctcatgtttggagataagactctctcacaaataactttgaatcttccgaaagattcatttgtggcaaaagttgcactggggaccacggtgatcattcctttcacaaaatattctttggtgataaacccattggctcggagtatagaagagttgcgtccagaagggtttctaaccgatagactcttcgctgttatgctgcgtactgccattgttgcatcaactctatgtgttgcctttctcctgccattctttggtcttgtgatggctctcattgggtctcttctcagtatacttgtggcgctcataatgcctgccctgtgcttcctgaagatcgctcggaacaaagcgacgcgcttgcaggtcatcgcaagcgtcgcgaccgtggtgctgggctccgtctgcgcagttcttgggacgtacaactctatcgccaagatagccgaaagctactagctagcaagcgtccaaaggccaagaggtctgccatggcccggccgccgcgcctgcacagggcgccatcgtgccctgtgtctaggcctcccttgtatgaactgcacggctgcaccgtgcatgcagaaacgcgaactgtactctgtctgtccgtggcccgtcccggcctgtacagggtaccatcgtgccctgtcggcctgaaataagagggtacctctgtccgtgactgtgttttctgaagacctgctgtttctgctcgc

SEQ ID NO: 129288 - DNA, 3123 bp, Zea Mays
gggaggggggcacaggcacacgcatatccaggcttgccatatttataccaccacctcacctccctcacgcgcccgagacacacctcggccgttcttatccccagaagcttccgatcgtctcccacacccgaccgcctgccaaacccgacacactcgtcgcggcgcggcgcttctctcctctcctcttcatgcgccatcgccgccgcctccacctctgcgacgcccacagataggcaggaggaggagggggcgatgccttcgatctcctgccacaatctcctcgacctcgccgcggccgacgacgtgcccctgccgtcgcccacgccgctccgcctcccgcgcgtcatgtccgtcgcgtccccggcctcgcccacctcgccgcccgcgcccgccccgccgcgccgcgtcatcgtctcccaccgcctgccgctccgcgcgtcgccggacccggcggcgcccttcgggttcgccttctccgtcgacgccggcaccgtcgcgtaccagctccgctcggggctgcccgccaacgcgcccgtcctccacatcggcaccctcccagccgccgcggccgaagccgcctcagatgagctgtccgactacctgctagccaatttctcgtgcctgccggtgtacctccctaccgacctccaccaccgcttctaccacggattctgcaagcactacctctggccgctcctccattacctcctcccgctgacgccgtcgtcgctcggcggcctgccgttccagcggactctataccactccttcctctcggcgaacagggccttcgccgaccgcctcaccgaggtgctgtgccccgacgaggacctcgtctggatccacgactaccacctcctcgcgctcccgaccttcctccgcaagcgcttcccgcgagccaaggtcggattcttcctccactcacctttcccctcgtcggagatcttccgcaccatccccgtgcgggatgacctcgtccgcgccctcctcaacgccgacctcgtcggcttccacaccttcgactacgcgcggcacttcctgaccgcgtgctcgcggctgctcggactcgactaccagtccaagcgcggctacatcggcatcgagtactacggccgcaccgtcacggtcaagattctccccgtcgggatcgacatgggccagctcagatcggtggtctcggcgccggagacggaggatgcggtgcggcgggtgaccgaggcgtacaaggggcggcgcctcatggtcggcgtcgacgacgtcgatctgttcaaggggatcgggctcaagttcctggcgatggagcagctgctcgtggagcaccgggagctccgcggccacgccgtgctcgtgcagatcgccaaccctgcgcgcagcgaggggcgcgacgtgcagggcgtgcaggacgaggccagggccatcagcgcccgggtcaatgcgcgcttcggcacccccgggtacacgccgatcgtgctcatcgacgccccggtgacgccgcaggagaaggctgcctactacgcggctgccgagtgctgcgtcgtcagcgccgtccgcgacgggctcaaccggatcccctacatctacacggtgtgccggcaggagagcaccgcgctcggagacgactcgcccaagcggagcgtcatcgtgctctcggagttcgtcggttgctccccgtccctgagcggcgcgatccgcgtcaacccgtggagcgtggagtccgtggcggaggccatgaacgccgcgctgcggatgccggaggccgagcagcggctgcggcacgagaagcactacaagtacgtgagcacccacgacgtcgcctactgggcgcggtccttcgactcggacctgcagcgcgcctgcaaggaccatttctcgcgccggcattgggggatcggcttcggcatgagtttcaaggtggtggcccttggcccgaatttccggcgcctctccgtggagcacattgtcccgtcgtatcggaggacggataaccggctgattctcctggactacgacggcaccgtgatgccggagaactccatcgacaggacgccgagcagtgaggtcatttctgtgttgaatcgtctgtgcgaggaccccaagaacagagtgttcatcgtaagcggacgggggaaggacgagctgagcaggtggttcgccccctgcgagaagctgggcatcgccgcggagcacggttacctcacaaggtggagcagggacgcgccatgggatacctccgggttggccgccgacttcgactggaagaagaccgcggagccggtgatgcagctgtacacggaggcaacagatggctcctacatcgagcacaaggagagcgccatcgtgtggcaccaccacgaggcggatccggacttcggttcctgccaggccaaggaactgctcgaccatctcgagaacgtgctggccaacgagcccgtggtggtgaagagaggccagcacatcgtcgaggttaacccccagggcatcagcaaaggcgtggtagtggacagcctcctgtcgtcgatggtgaggacggggaagccgccggacttcgtgctgtgcatcggcgacgaccggtcggacgaggacatgttcgagagcatcgtgtgcccggcctccaacagcggcgtgaagctgccggccagcagcgaggtgttcgcgtgcacggtgggcaagaagccgagcatggccaggtactacctggacgacacggtggacgtggtcaagatgctggacggcctggccagcgcgccgtcgcagcagcggtccaggccggcggtgcagctgcgggtctcgttcgaaggctcgctctgagggggaagaggagaacacacagcgctagtagcagcagtaaacagcaaacatcgagcaaggataaccagtggtgatgaacacaacgagattcagcagacggcgtggtgtaggattgattagctgcagtttacaggatcgacaatttttttttgctttcttctacattgctacccccaaatctttcgtgcctgtatatgcccgcatggtaatatgcaaagaataacgtttcgaccaccaaccaaaccaccattgtacatgtagttgacgatgacgacgagatcagaaaaggagaagtggggaaaatgattctttcac

SEQ ID NO: 129289 - DNA, 780 bp, Zea Mays
ggtttattttcgctattctagaaaaaacttagtcaaaattgattgcacgctgtttaaggcatgatttgtaagctttgtaagcttgccgatctctgctgggattaggccggtgatgttgttgttctgcaggagactgcagcagcagggaagggaagcaaacgatcaacctcgctccagccaaaaaaaaggaaccacaccacacgtccatgcacactgactgaaagcagaaacgcgagaaggaagtaacacactcacatagtctcaaggttcgtcaggttccctatgcttggggagagcaggccagagaggttctgacctgggacctccctgccaaacgatcaaacagccacaaacatcggtaataagaacacatggacacggggaagagttgtgcagatgggatgggagagcgatcgagggagtggaatgatgcttacagtccggtgacgaagttctctagcgagcagctgactatggtccagctgcagggatccacggagtcctggtcccagttcttgagcacgccgtgggggtccttgagcgtgttcttgatcgtcatcagagcttgcactgcacaacatcatacacatagtaggctttgtaagctaaaactttggcaggtttattttcgctattctagaaaaaacttagtcagaattgattgcatgctgtttaaggcatgatttttctctcttctcaaaaaacaatctattttcccagaatatttgtatcccgactttttatcctatataaaaaacatgaaaaagaatacattgttcc

SEQ ID NO: 129290 - DNA, 255 bp, Zea Mays
atgaagctggtataccccgagaatggtaacttctggctagcatggcataagtctgttcatgatagattagcttgtattgttgagatggaaaaagagaatgcaagtttggctgaacttcgcgaaaggaagctgatgaacaagtacaacgagctcaaggaggcaggaaagcttgatgcattcatggaaaagcggtggaggaagaatgcctccaaagatcatcggttcatgccgtaccgacgcagtggagatgtataa

SEQ ID NO: 129291 - DNA, 2123 bp, Zea Mays
agacaagtgagactctcgtgagtaaatctgatatttggccacataacgctgctagggtttcttaacgctaaaaacctcatttgagcgtgtgaggtcgttggcctcgacccctctcgcgcactcgcgcttgcctgcacgctccagggcttcaggctcccctcccacctcgccgcggcagccatggcgatcacggcgccaactcccgacatccgcggcgagcgtcagtccggccaggacgtccgcacgcagaacgtgatggcgtgcggcgcgttgtccaacatcgtaaaatcctcgctcggccccgtcggtctcgacaagatgctagtggacgatatcggtgatgttacaatcactaatgatggtgcaaccatacttaagatgttggaagttgagcacccagctgccaaggttcttgttgagttggctgaactccaagaccgtgaggtaggagatggaacaacttccgttgtcatcatagcggcagagctgctcaagagagccaacgatcttgtgaagaataagatccatccaacctctataatcagtggctacaggcttgctatgcgtgaagcctgcaaatatgttgaggaaaaattggcagtcaaggttgacaaacttggaaaagactcccttatcaactctgcaaaaactagcatgtcttcaaagttgataaatagtgacagtgatttctttgcaactctggttgttgaagctgttcaagctgtgaagattacaaatgccaagggagaggtgaaatatccaatcaagagcatcaatattttgaaagctcatggtaaaagcgccaaggatagttacctgctaaatggctatgcactaaacacaggccgtgcagctcaaggaatgcctacgagagtaactcctgctagaattgcttgtcttgattttaaccttcagaagacaaaaatgcaacttggtgtccaagttctcgtaactgatccaagagaacttgagaagattcgtcagagagaatctgacataacaaaggagcggatcgataaaattctcaagtctggagctaatgttgtgttgaccactaagggaattgatgatatgtccttgaagtactttgttgaggctggagctattgcagtaaggcgtgtgcgcaaggaagatttgcgccatgttgccaaagccactggtgcaactatggtgagtacatttgcagacatggaaggtgaagaaacatttgattcatcattccttggacatgctgatgaagttgtggaggaaagaattgctgatgatgatgttattctggtgaaaggcacaaagaacaccagcgcggtctctataatacttagaggcgcaaatgacttcatgcttgatgagattgaccgatcattgcatgatgccctgtgcattgtgaagagaaccctggaatcaaatatggttgttgctggtggtggtgcagttgaggctgcgttatcagtttaccttgagaaccttgcaacgaccttgggttctcgggaacaattggcaattgctgaatttgctgaatctttgttaatcataccaaaggtactttctgttaatgctgcaaaagatgcaactgagcttgtagcaaagcttagggcatatcatcatactgctcaaacaaaggccgataagcaacattattcaagtatgggtcttgacctctctaaaggtatcattcgcaacaaccttgagtatggcgtgatagagccatctatgagcaaagtgaagattattcagtttgccacggaggctgccattactatactgaggattgacgacatgatcaagcttaccaaggaagagggtaacgaagaagagtaatcagcccaccagtatctcttttgcgctggttgtcatagcgtgtaactttttttccttcccatttttccgtttagttttttgctggctgtgtgtgagcattcgtgtagggtgttgtaggaaaactgagaatgaaggtggtattaacgtatccccgtggcgtgacgttatttagacaacgacccacggatggatcaaattttgcgtgtattggggccaaaacagttctgcttcaaggattgaagttggaaatttgaattgttccgtgtactgatggactttttgctggttggcgacttcgcgtcagg

SEQ ID NO: 129292 - DNA, 2277 bp, Zea Mays
caaaataggcgccgcccgcccaggccatgggaccccaccgcccccgtctctcaattcaatcaatcccgggccgcccgtccgccgcggctaccactcgcccctcctcgtcaccagcggcggcaccatctgctccgccaccgcgttcacgcgctcccgtcgctgtcggccccgctcctctatttatataccgccccatcccagctccacgctttccctaggcaggcgcgcatccagctcctgccttgcttcctctcctcccggttcccgaataaaatttcctggacccggagcgcgcagcgcgctcccccgcctcccaaggaaacttatctaagcattccggcggtcgatccatcttcccgtccagggagagcaaggaataatcaatcaaccggccagtgaaacgttaggaggaggaggagagccggagtccgtccagcgcggcgcgggttgatcccttgcgtctccgcccctgccccgcgccggcgacacctttttgcggtgctagcgttgcgtcgaggagggacaggcgctctgcgtccttcgcacggcaacggcaagacggcggcgttgaagatgcgggtgttggaggaggacctcttcccctccaccccaggcaaggtgaagatcgagcgggcgggcgccatgaaccggcagctccaccgctgcttcgcgtccaccagcaccatgttcctgtgggcgctgttcctcgtcgccatgacggcgtcctacctcagcttccagtccttcgtcgacacctcctccaagtacttggccgcctcctggggcggcctgcactgggagcggcagatccgtgcgtccgccgcgccgaggcggccccccgggtccgccgccggggccgggatgtcggtgctggtcacgggcgccgcgggcttcgtcggcacccactgctccctcgcgctccgcaagcgcggcgacggcgtcgtcggcgtcgacaacttcaacgcctactacgacccgtcgctcaagaaggcgcgcagggcgctgctggcctcccacggggtgttcatcgtcgagggcgacatcaacgacggccgcctcctggccaagctcttcgacgtcgtgccattcacccacgtgctccacctcgctgcgcaggccggcgtgcgctacgccatgcagaacccggcgtcgtacgtgcactccaacatcgcggggctcgtcacgctcctcgaggcctgcaaggacgccgacccgcaaccggccatcgtctgggcctcctcctcctccgtctacggcctcaacgacaaggtccccttctccgagcgcgaccgcaccgaccagccggcctcgctctacgcggccaccaagaaggccggcgaggagatcacgcacacgtacaaccatatctacggcctatccatcaccggcctccgcttcttcaccgtgtacgggccctggggccgccccgacatggcctacttctccttcacccgcaacatcctgcaggggaaacccatcacggtgtaccgcggcaaggaccgcgtcgacctggcccgcgacttcacctacatcgacgacattgtcaagggctgcctcggctccctggacacggccggcaagagcaccggcaccggcggcaagaagcgcgggccggcgccctacaggatcttcaacctcggcaacaccgcgcccgtcacggtgcctaacctggtgtccatcctggagaagcacctccgcgtcaaggccaagaagaacgtggtcgagatgcccggcaatggcgacgtgcccttcacccacgccaacatcaccctcgccaggcagcagctcgggtacaagcccaccaccaacctcgatgtcggcctcaagaagttcgtcaagtggtaccagtcctactacggctacaccaggggatccaagaactcgcgacaatgatccatgctaattcttccttcttcctttctcgctttggcccggccgcggccacccactctcggatcaaacattgacattcttatcaggatttttttggtggaaatatgttatgttagggtgttcctttattaagtagagaaataccggggacaaattctttgcttggtgaggagatgggaggagagtgctggaggaagaaaagcaatcgagggctggaggaagaaaagcaatggggagcaacctttactttttctcttttctcctcctgtatctttcttctctctgtgtaaattggtcggcgctctacaggatcttaatccttttccgctccgttaatccttttccggattccgatgtgctgaccctaatcaaactgtggtagtc

SEQ ID NO: 129293 - DNA, 706 bp, Zea Mays
cgcgcatccagctcctgccttgcttcctctcctcccggttcccgaataaaatttcctggacccggagcgcgcagcgcgctcccccgcctcccaaggaaacttatctaagcattccggcggtcgatccatcttcccgtccagggagagcaaggaataatcaatcaaccggccagtgaaacgttaggaggaggaggagagccggagtccgtccagcgcggcgcgggttgatcccttgcgtctccgcccctgccccgcgccggcgacacctttttgcggtgctagcgttgcgtcgaggagggacaggcgctctgcgtccttcgcacggcaacggcaagacggcggcgttgaagatgcgggtgttggaggaggacctcttcccctccaccccaggcaaggtgaagatcgagcgggcgggcgccatgaaccggcagctccaccgctgcttcgcgtccaccagcaccatgttcctgtgggcgctgttcctcgtcgccatgacggcgtcctacctcagcttccagtccttcgtcggcacccactgctccctcgcgctccgcaagcgcggcgacggcgtcgtcggcgtcgacaacttcaacgcctactacgacccgtcgctcaagaaggcgcgcagggcgctgctggcctcccacggggtgttcatcgtcgagggcgacatcaacgacggccgcctcctggccaagctcttcga

SEQ ID NO: 129294 - DNA, 183 bp, Zea Mays
cagctttattgctgcgtgggaccatgtgtctgtgagcctgggtggagatgggtcggtggggtggggttcttgccccacgttgtagtagatcacatgggtgggcccggaagatgcggtggcgttcgtctctgatgagctgccgttgaggattgaactccaattttttggttattttcttgggac

SEQ ID NO: 129295 - DNA, 223 bp, Zea Mays
tttgcttcggtgtgccacgtgagagctgagctcgctgcctcgctgcatgtttcgggctcccaacgtctaagcctggctacagttacatgcacacgtaccgcagaggtttcgatctacaataatacgggcaggtttattttattttctgaaaacatatatagcggtggcgtgtttgctgtagcattgctcctgtgctactgctgctgcagcagctacaactgag

SEQ ID NO: 129296 - DNA, 1481 bp, Zea Mays
atatatacataggggttgcaaactgcagagcagcggaggcggaggtggggggcggtgaggtcagtggtcacagcgacatggaccgatcggtggctgcttgccatgcattaccacttccactgctccgatccatgcatcatatcctgggtcgctccatccatcccgagctcgatctagcacagtagcagctggtagtagctagggctctcttgccgctgcaggcgagagaaggaccacgcacgaggcttgctgcatcggtgttccgggaggagaacacggccgcgagttattgctgctctcgtttgctgcatcttccatgtggagtctccgtccgaccgacgaggcccagaggtggaggaggaggaggaggatgatggaggagagagcgggcgagccgtcggaggtggaggagcagggctgcgcagcgaggccagccaaaagtagattcggcgccgtgggcccgccgtcctccagctgaggaggaaaggcagctatcggcgaggaagggtggtggactggtggtgctagcggtggtggtggtggtggtggtggaggatcccctctcacgtcaagcgctgtgtggaaagcataaaggcgggaggaggaggagagggcgaaggcgcagagcttccccgccgcacaaagcgaaaaggcttcagaaagaagaaagcttccgccttgggagggagagcgaggcatcctgcgtgtgagcgtgcgataaatagcggctccaggtccaggctgagggagagcgcgtctctggtgctctcgcaaccaccgtgcgcttgctttcctcctgctctactccgttgcacacttgtactaggcctggaggtcctgtagctcgcctggtgctgtgtcggagacggtggcaatggcattgcaggagcaggaggcggacggcgacgagggcggggaggaagacgacgaaggcgaggatgagcggatgacgggatacggtgtgggggagctgatatctgcttgtcccgaggcgtgctgtccgcttgcggcggtgtaggagtaagatattggcgcaataggctcaatcatttttttttttgcttctctctttctctttttcccttttcttccttgtttgatgtggcgtgcttgtttttttttttgttgcctttttttgtttctgattgatgagaccaatgttgattatatgatgaagagttgattggtaagaacgctaaggggcctctaagatggacaatataaggtataaaggctcgttaacatagatttatatacgcgctaggtttgagaggcttaacctcgtggcgttttatcgaacacgccttgttgattcggcaaggaacacgggtgggacgctgctgtttgctgatgtggtgttggtcggccaagaaatgtgatgaacacgggtaagacgccgctgtagcattgactgaaacacagacgaacatgtcgaggacatgctactattttgttacgatcttagtatactgtatacccgt

SEQ ID NO: 129297 - DNA, 1978 bp, Zea Mays
ggcaagtgtgggagtctggaaccgggacgctatagtagtagactaggtggcagaaagctggagccgccatctgccgtgtgcgttgcacacttgcgctcgtagtcgtaggtgactcgtaaggtttttatccggtgaggccgcagagatcgagcgctctcggccaaccaaacgtcgtgggaccgaacatgacaacgccctctaccgcaccagcgccactggcatctctcctccgcgtctccgctgccgctgttccagtggctcgacgacgtcctaagagccccgcggctgcggcggcggcacggtgggagggaggtgggggcagaaggaggtgccgggcggcggtggtggaggaagccggggtgctgctgcccaaggagggggagggggagggggagggggaggaggccccggacgcggcggcggggcgctacgactggagggaggagtggtacccgctgtacctggccaaggaggtgcccgacgacgcggcgctcccgctcaccgtcttcgaccgccagctcgtgctctggcgcgacgcccacggcgtgctccgctgccacgaggaccggtgccctcacaggttagcgaagctatcggaagggcagatcgtggacggcaagctggagtgcctctaccatggctggcagttcgacggcgacggcaagtgcgtcaagataccacagctgcccgagggcgccaagatcccgcgcagcgcgtgcgcgcgcaactacgaggtgcgcgactcgcagggcgtggtgtgggtgtggatgtcggacgccaaccctcccgacgaagggaagctgccgtggttcgagccgtacgcgcgggcggggttcacggacctgtcgacggtgcacgagctcccctacgaccactccatcctgctggagaacctcatggaccccgcgcacgtgcccatctcccacgaccgcaccgactggacggccaagcgcgaggacgcgcagccgctcttcttcgacgtcaccgagcgcacgccccgcggcttcgcgggctactggggccgcaccggcacgccgcacctccgcaaccttctgcgcttcgaggccccctgcgtgctcaccaacacgctagagttcgccgacaaggacggcagggagcagtgcttctccgcgcacttcctctgccgccccgccgggcagggcaagtccatgctcctcgtgcgcttcggctccaccctcaggtcgccgctcgccaaggtgctcccgtcctggtacttccaccagaacgcgtgcaaggtgttcgagcaggacatggggttcctgtcgtcgcagaacgaggtgctgctccgggagaagctgcccaccagggagctctacctcaacctccgctcctccgacacctgggtcgccgagtacaggaagtggatggacagggcgggccacggcatgccctactacttcggccacagcaccctgtcgccgccgcccgtgccggccgtcgtggagcaggcgcccgcaggggccgtcgcggggatctcggcctcgttcccggccaagggcggcgtcggcatggtgcacgcgcccaacccgaccaacaggtacttccgccacgtcgtgcactgcaagggttgcagggcaaccgtcaaaaagtacacctcgttgaagaccgtgttcgcggccctcgcggcggcggccctatcggccgccatcctggcggcgacgagacagtggaaggccgtcttggtggcggcgtcggccgtgctagccgccgcatcctatgcgtgtgacgcggtgctttctttgatcaccaccaacttcatcaggacacacaggagactgtaattaatgtggtactggccactgtatatttaggtaatggccggcggggaacgttctgtacatttgtatcaccgtagctgctggcctgcggctgttgtattttgtatatttgcagtaacgttttgcatgtcagcagcaactgattaggttggttaccttaccggttagtttttttacta

SEQ ID NO: 129298 - DNA, 925 bp, Zea Mays
tccagagcatccaatctagatccaacggtttcatatgaaaggggttaaaagtaaaataggtactatgtttcaggtggaaggggttaaatgtaaaataacagtcatcattagatctagattagatgcaccaaatcgtttgattgcaaacttgcaccaatataagtgattgcataagatatttccccgccttcttcgtccacgcgaacgtggttgttttcaacagacgctcaattgcccaccataacaccgtttcgctttctcgctccaactcccacagaaacggccgccagcgccgcaggcccgcagcgttgatggccgccgcacctggcgcaccagaggagcgactcggcgtcctcactcctcaatgcctccgggagaagaccggaatctccgagcccaggtcggaggtgcacagggacggaaactaccaccgagcggtgaacgtgtggatctacagcgagagcaccggggagctgctgctgcagcgccgagctgattgcgaggaattgtggcctgggcagtgagacatcattagcgccggccacatctccgccggcgattcctcgcactctcggcagagggaccttctggaagatccaggcatcaaccatttcagtcgatgctttcgagctcatgtgtgtgtttcttcaggaacggtaacggagtgcaacatggacattgcccaacccttcttccatcatcgcaacattgatataagttgcagcggtgttaggatgagaagggccacatgtaaggtgcaaaagatatagggcacgattgacatacctgaaatataacagtcagaacataaataaagtagttcaaacatgaaaacggtaaatgaaacaagctccacaggtaagtgggaagaaataaaactatagtgtcgtccatttttaccatgtcagcttaagtagatgactct

SEQ ID NO: 129299 - DNA, 279 bp, Zea Mays
atgagtaaaattttccatgaatcgcttttcaccttgcgtgccgtaacatatttgctcctgtccccctgcgaatgcaaatatgcaataaccttgaaaacatctgtcacaggcaaggtggaggaagctgatatgcagctgtctgaggatgggaaggatacggctcgtgtgcaagacctgacggagaagatggctgcgccggtgtccctggaggagcagaagactatcaagcgcatgcggaggcccaacgtgcgtgtgtgcggcccagagtggcaggtgtaa

SEQ ID NO: 129300 - DNA, 861 bp, Zea Mays
ctttcaccgtcccgtcccgtcccccgagagcgagagggcggcactggtgacgtcattcacctctcggtcgcgtgcgcttcacgcagcggctcagtcagtcctcacaccacgcatctgattctgatcgcaccgccgtcggcccaccgcttcagttggcagttgcgagtggctccaacaatccaccggcaccaacccagcgcggcgccaccggcgacccgtaccccctcccccggagagcgatggcgacggagctgacggcggcgcagctgcgcgcgtacgacggcaccgacccgtccaagcccatctacgtctccgtccggggcaaggtctacgacgtcacctccggccgcggcttctacggccccggcggcgcctacgccgtcttcgcgggccgcgaggccagccgcgccctcggcaagatgtccaaggacgaggccgacgtctccggggacctctccgggctcaccgacaaggagctcggcgtcctcgccgactgggagatcaagttccaggccaagtaccccgtcgtcgcccgactcgccgccgacgcctgaactcgtcagtctcggtctaaatttactctgtcctgcctcttgcggtgttcagtgctgtgcttgcttgcttgttgctagttgctttgctacccaataatctgaatggaaggacgtatgtgatgtgcctgctgaatagttcctagtccttgcatacactgctgtgctaccacatgacatgatgtactcgtgtgtgtgctttggttgttgtgtaattccatgaccatgatcagtaatctgaataaaaaatattggagatgtgcttgcttcctacataatgggaataaactctaccatattcttaatgata

SEQ ID NO: 129301 - DNA, 1839 bp, Zea Mays
ggcggccgaggaggcgctcgacggctcggcgctgtccagtaatcagtaggcgccgctgcgtcggcgacttcttctccccaccagcgtggccgcgtgcagggttcaggtgaggcgccgttgctgtggttggtggcttgggagcatcggagggcggttcgtgcggtgcccttgttcaggggatcgaagattcgagagtgacgttgattcgaatccctgctcgtggcatgtcagtttattcggattcaacagtgtatgtgattgatccatcgggcatttaaaattaggttgtatatttggtactgctttggagttcgcagtagggttgttcaggtcagtcattgaataggccgatgaagcggctttgcacaagtgttaagttccattttatgaccgaaagggaaccgatggtggagccaggccgatccctttatcgaaaccagtagtcgtatagcggcagcttcattcaagtgcttactaggctgtcacggaactcaagggtattagtgatatacaaaagtttgctttatggcaagtcagtgatgagtgaagggtgactaagaggcttctctaagtgtcaatatacaagacttcattgacgaggagatggtcccagttacattacatggttctgttggacacaatgaagccatccagatatgctattaaaatcctgctagttattatggatttaagttgtaccatgtctgttccatctacagctaggcagagcatgaactatcaaaggatcatgatacagacatctcacatcttagaaaattctgttcagtggttcttcaagggtaaagtttttactgtcttatgcactgaattgtcagtcgtagtgattttcagagcaacagggtgtccttttttaaaggttcagctttggcgttccagtaggtacatcaggcgcataccaaaaccagtctcagccttctttcctgatccatgatgcctctcagcctataacattgatgacagtgactagtgatactagtgatcatgctggcgaatgctagacgtcattaccatacagcaggccagcagccagtaaggagctccactttggcagcctgccactctgcttcttccactcctgaaaccgagcctgcaggtgcaggcaatgcggttgcttgctggagtccttatccaatcagtgaaggcactaaactcgcaaagccgttggaatctgcgagcaaggtcatgcacatcttgttggatgaagttaatacagcctgcactgcaactcccgcactctcgcgatcgtgtggaagacgtgggcgccgttgagggtcaaaatcttcttgtggcttgcctggcggagacggctctggaccgcagacaggcgacgacgtcacggactcgatgcgagaaccacttgctacctctgcaatacagcggaagaaacttgcgaccatctactggccacttgcagcttctcccttcgagtttgggatggcattttgtcgcaattggggcttcacagaccgtcgctaactgactgcagttcagtccttggttggtggcaaagagtgcgggagctgtggccaccgggcgccaggaagggcggtgattctctctttgcgttggtgacttgggaagtttggaaagagagaaatgcaaggtgcttccggagtgaggcatcctcagttgacgccgtagtttcttccgctcttggtgttgctagcgagtgggtgagagcgggcgcgaaagcccttggttgtattctgagcgagtagtcggctctgtgttgagctggttggccagctcttgtttttgtatttgtgttcgtactcttcttctattaacaaagatgcgcagctctcctgcgtattcgac

SEQ ID NO: 129302 - DNA, 1615 bp, Zea Mays
ggcggccgaggaggcgctcgacggctcggcgctgtccagtaatcagtaggcgccgctgcgtcggcgacttcttctccccaccagcgtggccgcgtgcagggttcaggtgaggcgccgttgctgtggttggtggcttgggagcatcggagggcggttcgtgcggtgcccttgttcaggggatcgaagattcgagagtgacgttgattcgaatccctgctcgtggcatgtcagtttattcggattcaacagtgctgtcacggaactcaagggtattagtgatatacaaaagtttgctttatggcaagtcagtgatgagtgaagggtgactaagaggcttctctaagtgtcaatatacaagacttcattgacgaggagatggtcccagttacattacatggttctgttggacacaatgaagccatccagatatgctattaaaatcctgctagttattatggatttaagttgtaccatgtctgttccatctacagctaggcagagcatgaactatcaaaggatcatgatacagacatctcacatcttagaaaattctgttcagtggttcttcaaggtaggtacatcaggcgcataccaaaaccagtctcagccttctttcctgatccatgatgcctctcagcctataacattgatgacagtgactagtgatactagtgatcatgctggcgaatgctagacgtcattaccatacagcaggccagcagccagtaaggtgatgtatgaatcatttgtatctgccgcgttttaccttttttttattgtacatgagagagataccctaccccttttcgtgtacacccaggagctccactttggcagcctgccactctgcttcttccactcctgaaaccgagcctgcaggtgcaggcaatgcggttgcttgctggagtccttatccaatcagtgaaggcactaaactcgcaaagccgttggaatctgcgagcaaggtcatgcacatcttgttggatgaagttaatacagcctgcactgcaactcccgcactctcgcgatcgtgtggaagacgtgggcgccgttgagggtcaaaatcttcttgtggcttgcctggcggagacggctctggaccgcagacaggcgacgacgtcacggactcgatgcgagaaccacttgctacctctgcaatacagcggaagaaacttgcgaccatctactggccacttgcagcttctcccttcgagtttgggatggcattttgtcgcaattggggcttcacagaccgtcgctaactgactgcagttcagtccttggttggtggcaaagagtgcgggagctgtggccaccgggcgccaggaagggcggtgattctctctttgcgttggtgacttgggaagtttggaaagagagaaatgcaaggtgcttccggagtgaggcatcctcagttgacgccgtagtttcttccgctcttggtgttgctagcgagtgggtgagagcgggcgcgaaagcccttggttgtattctgagcgagtagtcggctctgtgttgagctggttggccagctcttgtttttgtatttgtgttcgtactcttcttctattaacaaagatgcgcagctctcctgcgtattcgacaaaaaaaaaaa

SEQ ID NO: 129303 - DNA, 4222 bp, Zea Mays
atgccagcagcggcacctactactccaaggaggcacccgtcaccgaatgccggcggtcgggcgtcgtccccgacgccagctgggtcacaggcgaagaggtcccagtccaccgaacggcggccggtgactccgtcaaggccgtcttccggcggctcgcggccgagtactccgtccaggatctctgccccggcatcgccatcgtctgcgacttccagcccgtcctcattctctagctcgtcgacgccagtgggtgatgccgttccagaaacgcaaatcgctctgaggaggttgcctggtggccgggctcctgatgggctgtggccttcaatgcggagtctgtcttcttctttccagctcgaatcaaaggggaaaaagatttctagtagctcctctgcagatcaggccaagacgagggatgcagcacccgctgataggaagaggagcccattgagaggtagagctacccctgagcaatcggagaatccacatgccaaggtgattgatcatcatcgctggcctgctatgatggggggcagggtgtctgcaagcacaatgtccaagagcatggatctcactgataagatcagtaggtctgctcttccatcagttccgtcacgtggtgtttcaccgaagcgaacaacagtgtcctctgctgcaaataccttgtcaagaagtattgatcttgctgataaaattgatcggctggtctcttcgtcaatgtcatcacaaggggaatcaccaagaaagtcaccttgtaatggtgcagatgatgtgtccaaaaaggttggtgttcgtaaagatctcaaactctcatccttggcaatatcaagaagggtgtcaccagtaacaacagatgataaaattgatcggctggtctcttcgtcaatgtcatcacaagggggatcaccaagaaagtcaccttgtaacggtgcagatgatgtgtccaaaaaggtcggtgttcgtaaagatctcaaactctcatccttggcaatatcaagaagggtgtcaccaataacaacagctgcatcagatggcactagaaccttatcaggaagcatggatcttactgaaaaagataacagtacactctcgccagtttcatcacccagcatttcaccaagtgcatcattatcaagtgtgtctaatgccgcatcacagactactacaaagtcatccgagagattaattggacctgtttccaacctgtcctcatcgagaggactttcacctagaagaacaacttctggtggcattgttgatttaatgaaaagcattgatttccctgaaaaagataggagaccagcttcatcaagagggttttcgccaaggaggagactcgtgtctgatggtgttaatgatattgggaaaaatatggattttgctgaaaaggatagcagagtagtcagctcatcaattccatctcgaggggtttctccaaggagaagacttgcctctgatggtgttgatactatgtgcaggagctcggagttttctggaaaggataacaggccatccacctcatcttccacatcacgtggaatgtctccccgaagaaggcttgcttctgatggcataagtgctgtaaccaaaggcatggactttggtgataatgctaacagaccatcaacctctaaaggagtgtcacgagggatttcaccaagacttcaattagcctctgatggtgttggcaatgtatcaaaaggcacagatcttgctgatggactggacaggccatcaacctcatatgcaacaccgcgagctgcagctcgaggggtttcaccaagaagacggctcgcctcagatggtgtcaaagtgacatcaaagagcattgatcttgttgaaaacagtaacaaacccttaacagtgtcagctgcaacacgaggggcttcaccaagaagacggctcacctctgatggtctagcatttatatcaaagagcacaaatattactgaaaaaagtatcagaccttcaacaccgtcaatgtcatcacgagggatgtcaccaagaagacggctggcctctgatggtatcaatgctgtattggacacagaatttgctgacaaaaattgtagaccatcttcctcatcagctgctttacgaggggtttctcccagaagcaggtctgcctctaatgccatatcaacaggcatgactaatgctgaaaatgacagcagaccatccacaacatcaagtccgtcatgtcagactctgcagagcagcaggcttgaatctaatggtgttaacatcctatcaaaagatatggaaatctcatcaactgtatctggttgcacttcagacagtagacttgatggcgctggtgctctagtaaaaagcatagatgtcactgagaaacttactgtgtcaactgaagatggtggtggtgaagacgatcctggaagaatagattctagtgacgtagttactagtgcagtttcatcatcccttgcatctcaagaggtatcatcaagacatgttactgatgacgttaagaatgcgtcagagagtgttggtgcaacgcaaaaaggtaacagaccattatcagtgaaggttccatctcgagtagcttctccaagaagacgacttgcatccgatggcattgatactatatctaaaagcatggattttgctgagaaagataagaaacccatgacagtgtcagttccatcacgtggaatgtcaccaagaagaacagcaagatctgacagtgctgatataatgtcaaaaagtatggattttcctttacaagtgttttctacaagaagagtactaggacctgatggtgctaatgccatgtcaagaagcatggatctaactgataaaattagacagaaaatatcttcaactatgcaatcatccagagtctcaccaaggaaaatgcctcttgcttataacagaataaaaggccctgaaattttatcaggtgatgctgagagccctggttctgctgatggaaatgaaagtcaagaggagaatgccagttcaagtccagatgcaccttcaaatagttcagaaaaatctacacctccaaagcagctagctaggagatcaccttcgccatcacatattttaatatgcccttcatcatcatccaatgcttcatcgacaccatcatttgtctccaggagattaccaagcccatcaaggactagaccttcaacacctgtctcaccatgtagttctgccagatctgattcagcctcttcaattcttagctacattggtgatgctacaagagggaagaagagcccaactcacacggaagatgcccatcagttgcgcctcctgcataataggaacttacaatggtgttttaccacttcttatgttgatgaactgctgtcaattcagaagataagtgctgagactatgttgtatagtgtatgggatgctaactcaaggatgtgtgactctatggttataaaaaggaactatgtacaacagctaaggcaagaggtcaaattgggaattgtcttgaaggagcaaatggattaccttgatcactgggcagcgctgcaaacagagcattcttcttctttatccagcgcaactgaagctcttaaagcaagcacattgcgtcttccagtttcaggaggagctaaggccgatgtacttactgttaagaatgctgtcagttcagcagttgacattatgcaagcaatggggtcatccgtttgccatttgctatcaaagttacaggcttcacactctctggttacagaactttcagctgttgctgctaaagaaagtaccttactcaacgagtacagagaactcttggcaacagcagcagcactacaggtccaagagtcgagcctaaggacacagctcatacaagaaacagagtgaacaggttaaggtcctgtatttctaactaggaagatagaagtaaacaccattcgttagtttcagtgactgctgcatatgtgtacctttgatgtcgttttgtttttcctttgctcttccttttcccccccacttattagctagctcatatttctttacatttctactcccccccccccccctgttcttttctgttcgaacaacttacatggaagataagggaagcaacatggaaatggaatcatggatttactccatgacaaagctgccaatgtggtcttttattgcatcctagaccaatgagccaaaaactgaaagctttgttgtaagctgtaaatctgagcagttatgtgtccttcagtgtaatgcctttggatgt

SEQ ID NO: 129304 - DNA, 246 bp, Zea Mays
atggtaggctcttacacaaggtctcaaactcgcaataacatgtgcacttgtcaaatagacacgtctcaacttttctctacaaggagtcaaaaagaaaaacgattggaaatgaggcacaaaataaaaaagtccaccgtgctggacgatactagaaaaatgtctgtcctaacaattactttattattggtaccggatccaacctgtctcaatccatttatgcgaggggtggtgatttccagttcctag

SEQ ID NO: 129305 - DNA, 88 bp, Zea Mays
ctggtagcaaatgttccaaaggctactatgctttgccaagtggagaaagcaaatgaagacatgcttaaccagctatacagctcgataa

SEQ ID NO: 129306 - DNA, 411 bp, Zea Mays
aaagactttagagcttaaggtattataatattttttatttcacatttaagcagtgaaattaatcatgcatgtgtggtttcaattggtaatattgtcctttttatatagatggagaagaagtatatgcttgtagtgtatgttgctgctgctcatatgttgctttcaatgatggcttgtgttattgaatctagaaaaagaaaacgtcatggtcatgcagcagtaggacaaattagttatggtccaatttatgagcgagatagaaaaaggatggagtatcttgatgataaaatttggaagagtgatgtcacttgtgttaatatgcttagacttaatagatcatcattcttccgtttttgtcaacttattaggaatcgtggtctattacaagacaccatacatatgtgtgttgag

SEQ ID NO: 129307 - DNA, 570 bp, Zea Mays
ttttttttatttttgtctcccaaactttttgtggtatgttcctacactatgtagacctacatgtatcatttgtggacaattataacatagtttacatagttagtagatttagttcgtttatttggatttcttcggaaaattcaaatttgaactgcaggtcactcgaaacttggaaaaccgtgcatgaaaaaatgatattcatgttacttagcataagttacgaccgattgcagaagcgtaccgaaaacttcgaacaacatgctcactaaacatggccgtgaacttggcatccacatgtttaaaaattgtataaaacacaaacaaagtcagaaaatcatgaaacttgtccacgtgtcatgatatgatatgtacaggctgtgataaaaaatttagaatgtttggagaaagttgtgagacactatgtgtagaaacctaagagatccacatgaaatatctcttagatttcatgtttgtgatggatatttatgtttgtggtcacggttttatgtttgtgttggctatttatgtctgtgatgatatttgtgatgtatatatgtgatatatatgtga

SEQ ID NO: 129308 - DNA, 270 bp, Zea Mays
atgcaaagttgtttcatggtgcccattttaaatgagttttctgaatcactgcattaccctttcagaatgttctgggagccgtacattagaagtgaagatagctattccaaaggtacacaatgtttgctaacatcattatccttggtcttcacctccatctacacctaccgaacatcagctaccttgccgacgcatgaacgagaagacgagtcagactttgtcgaaaccctcttcgctagtggaggtatcgaccatcactcttcactgtaa

SEQ ID NO: 129309 - DNA, 220 bp, Zea Mays
ccgcagccgcagccagaaagggggagcgccgcgccgcgcgactgcgagccatttatggccttggtcatctcatccctacggccacgtaccaccagtgcagcagcaggcacaggcaggcgggggtgacggctcggcgcgcgcgcccttctccttctcaatctcggctcctcctccgcctcgcgcactctctctccttctgcggctctgctgccgactgcac

SEQ ID NO: 129310 - DNA, 1959 bp, Zea Mays
cactaccactagcaatacctgagcgcgcggccctccgctcgctctccaccctccaggccggcagccatccggccggccacgataaatacgcagcagcagctcgcgtactgcgtacacaccgtcgcgagctagctagctgctagccacaccacacctttctctgcccacgcacaaaagccatggcgacgacgcggcctcgcggtgagggtggggcggcgagcggcgcgctggtcatggcgatcgtcgtcgtcgtcgccatcgtcctgctgctgctgccatatggagccggcgcggaggagtgcgaggacggcatgagcacccgggcgcgcgcgggcgaccgcgtggaggcgctgccggggcagccggcggtggcgttcgcgcagtactccgggtacgtggcggtggaccgggaccgcggccgcgcgctcttctactggctgaccgaggccgtcggcgacgacgcggccgccaagcccctcgtgctctggctcaacggaggtcctggatgctcgtcggtggcgtatggagcgtcggaggagatcggcccgttccggatcaaaccaaacgggacaggcctgttcctcaacaagtactcatggaacagagaggcaaaccttctgttcctcgagtcgcccgcgggagtcggcttctcctacgccaacaccacctcggacctcaagacgtcgggcgacgagaggaccgctcaagacgcgctgcagttcctggtcagctggatgtcacggttcccgcagtaccggcaccgagatttctacatcgccggagaaagctacgcgggccactacgtcccccagttggcaaggaagatcgtcgagtacaacgaggcctcgcctcaccccttcatcaacctcaagggaatccttgtgggcaacgcggtgaccgacaactactacgacaacatcggcacggtcacctactggtggacgcacgccatgatctccgaccgcacctacaaggccatcctcaggtggtgcaacttcagcagcagcagcatctcgcgcccctgcaaccgcgccatgagctacgccatgaaccacgagttcggggacatcgaccagtacagcatctacacgccgtcgtgcgccgccgcggccagggccaacgccaccgtgctcaggttcaagaacaccctcgtccgccgccgccgctcctccggctacgacccctgcacggagacctacgccgagaggtactacaacaggatggacgtgcagagggcgatgcacgccaacaccacggggatcccctacagatggactgcctgcagtgatgtgctgatcaagacatggcaagattcagagttctccatgctgccgacgtacaagaagctgatgaaagcaggattgaggatatgggtgttcagcggcgacacagattcagtcgtcccggtgaccgcgacgaggttcgccatcagtcatcttggtctgaagatcaagacccgctggtatccatggtactcagctggacaggtacggaacttgccattgctgctgttgttgcttgtaacgtcttccgagtttggggcgcatgtgcaggtaggaggatggtctgaggtgtacgaagggctcacgtttgcgtcggtgagaggcgcagggcatgaggtgccgttgttccagcccaggagggcgttcaggatgttccggtcgttcttggccggggagccattgcccaagtcctgaaggttcctgacatgtgactgaggccatgcatgcctacctgatcatgtctagctacggtcctgacgggtgagaaggtgacgttccccaggtagagaatgacttgttgataggcgcgcagttcatagctgaggagtgattgattggtctcgggagaaggatgtagagaataataaggatggctatgttatgccatggaaacccatgagcattgcaatgattagcgaataattttcagtgatctcactctcaagtgcttatgtta

SEQ ID NO: 129311 - DNA, 1638 bp, Zea Mays
cactaccactagcaatacctgagcgcgcggccctccgctcgctctccaccctccaggccggcagccatccggccggccacgataaatacgcagcagcagctcgcgtactgcgtacacaccgtcgcgagctagctagctgctagccacaccacacctttctctggctcaacggaggtcctggatgctcgtcggtggcgtatggagcgtcggaggagatcggcccgttccggatcaaaccaaacgggacaggcctgttcctcaacaagtactcatggaacagagaggcaaaccttctgttcctcgagtcgcccgcgggagtcggcttctcctacgccaacaccacctcggacctcaagacgtcgggcgacgagaggaccgctcaagacgcgctgcagttcctggtcagctggatgtcacggttcccgcagtaccggcaccgagatttctacatcgccggagaaagctacgcgggccactacgtcccccagttggcaaggaagatcgtcgagtacaacgaggcctcgcctcaccccttcatcaacctcaagggaatccttgtgggcaacgcggtgaccgacaactactacgacaacatcggcacggtcacctactggtggacgcacgccatgatctccgaccgcacctacaaggccatcctcaggtggtgcaacttcagcagcagcagcatctcgcgcccctgcaaccgcgccatgagctacgccatgaaccacgagttcggggacatcgaccagtacagcatctacacgccgtcgtgcgccgccgcggccagggccaacgccaccgtgctcaggttcaagaacaccctcgtccgccgccgccgctcctccggctacgacccctgcacggagacctacgccgagaggtactacaacaggatggacgtgcagagggcgatgcacgccaacaccacggggatcccctacagatggactgcctgcagtgatgtgctgatcaagacatggcaagattcagagttctccatgctgccgacgtacaagaagctgatgaaagcaggattgaggatatgggtgttcagcggcgacacagattcagtcgtcccggtgaccgcgacgaggttcgccatcagtcatcttggtctgaagatcaagacccgctggtatccatggtactcagctggacaggtaggaggatggtctgaggtgtacgaagggctcacgtttgcgtcggtgagaggcgcagggcatgaggtgccgttgttccagcccaggagggcgttcaggatgttccggtcgttcttggccggggagccattgcccaagtcctgaaggttcctgacatgtgactgaggccatgcatgcctacctgatcatgtctagctacggtcctgacgggtgagaaggtgacgttccccaggtagagaatgacttgttgataggcgcgcagttcatagctgaggagtgattgattggtctcgggagaaggatgtagagaataataaggatggctatgttatgccatggaaacccatgagcattgcaatgattagcgaataattttcagtgatctcactctcaagtgcttatgttatgttatgttatgccatggaaacccatgagcaatgcgacgaataaatttgaaggatctcactcttgaacc

SEQ ID NO: 129312 - DNA, 109 bp, Zea Mays
gttaggtggataggtggactatcgggcttccagagccatgcgaactgctggacggccatggcgctcaattctgttgagagtgacgtgaaaactgttttagaaaaaaaaa

SEQ ID NO: 129313 - DNA, 587 bp, Zea Mays
cagttctcttccctctctgcgcaccaagaagaggtgtcttgccagaagggagccgcctcgccgcagccgaaggccacccatgcagccgagcggccgcgaaatgcagggcggaggcggggcccaggacgacttcttcgaccagatgctgtccacgctgccggccgcgtggtccgaccttggctccggcaagtcgccctgggagctccccgcggcggcgggggccgtgaccgaggacaccgccgcgctcgacgagcctgcgctcctcgcgtcgcgcctccgccaccaccagatcggcggcggggagaagcccctcatgctccacctcagcgacctgcacggcctcggcgccggcgccggcgacgacgcggggttcatgccgctaccgctgttcacccagcacctcgccagggacgacgtggatgccgccttcaagtcccccaatgccgccggaggcgaccgggagctgtacaacgggttcggagccgctgggaatatgcacaccgccgccgtgcatcagccgccgccgttcgggcagggcgggtcaatgccggcggcgccgcagagcttcgggggtggcgggccggcgc

SEQ ID NO: 129314 - DNA, 702 bp, Zea Mays
agatcactactgtcgctgaaacgatcatatggaactttgtttgcagaccgacaaggcatcgatgcttgacgagatcattgactacgtgaagttcctccagctccaagtcaaggttctcagcatgagccggctaggcggagcgacagccgtcggcactctagttgccggcatcgcatcagagggcaacgggagcggagatggcacgagcgacagcggaaaagggaacgccgccaacggcgagaacggcggtggtggcagcctgcaggtgacggagcagcaggtggccaggttgatggaggaggacatgggcaccgccatgcagtacctgcagggcaaggggctctgcctgatgcccatctctctcgcctccgccatctcctccgccacgtggccgtccctcctatcccgcccctccatgggcgcaatgggagacgctagaggtcccctgcacgacggcggcagccctgcgtcgccgccactggtgaattgtggtgatgattccagcaccgtcaaggatgccggtgccggcggtaagcggtgaaggcaatgatcttgtcttgagaggttgcgtgtgaaagatcaacatgtccaagtgaaaaatgaaatgaattgggctaaaagttctggcaacaattaaatcttatcaaattgtatatttcactctttattattcaataggctacttcacttcttatgtctaat

SEQ ID NO: 129315 - DNA, 1872 bp, Zea Mays
attcaagaattgttcggttacattttgcctgtttgctgtttttttcgtcggttcgcctcgtcttctccgcctggcccgagactcacactcaattcggtcgttttctgcattaacggagtcaggcccaggcctaacctcagtacatcagagcagccgaacacgcccgcggcaaccgccgccattctaccccaggtcggacggacccttgccggagacgagcacacgccacagcaggaattatcgggcgtagagcagcgcgaagcgagagatccaatggcggcggcggaggggcagtgggtgctcatggcaacggggcggacgccgaccaacattgcggtgatcaagtactgggggaagcgggacgaggcgctcatcctccccatcaacgacagcatcagcgtaacgctcgaccccgaccatctctccgccaccaccactgtcgccgtcagcccctcattcccttccgaccgcatgtggctcaatggcaaggagatctcgctattaggaggaaggtttcagagctgcctcagagaaatcagaaagcgtgctcgtgactttgaggacaaggagaagggcgtcaagatcaagaaagaggactgggacaagttgcatgttcacatagcctcgtacaacaacttccccactgctgctggtttggcctcttcagctgctggccttgcctgtttcgttttcacccttggaaagctgatgaatgcgaaagaagattatggagaactttcttcaatagcaaggcagggatctgggagtgcatgccgcagtatatatggtggttttgtgaaatggtgcatgggagaaaaagatgatggaagtgacagtattgccgtgcagcttgctgacgaaacacactggaatgatcttgtaattattattgcagtggtcagttcaaagcagaaggaaaccagtagcaccagtgggatgcgagatagtgttgaaacaagtcctctcttgcagtacagggcccagacagtggtgccaggtcgggtgttgaaaatggaagaagctatcaagaaccgtgactttgaatcctttgccaaattaacttgtgcggatagcaaccagtttcatgctgtatgcttagacacgagccctcctatcttctatatgaatgacacgtcacaccgaataattagccttgtggaaaaatggaaccactcagaaggaaccccacaggtcgcttacaccttcgatgctgggccaaacgctgttctaatcgcacaaaaccgtaaaactgcagcacatctcctccagaagctcctatactatttccctccacaggataatgatttgagcagctatctggttggcgataaatcgattctaggtgtcgccggattgcattccatgaaagacgtcgaggctcttccagcacctccagagacgaagataccggatcagaaattcaagggcgatgttagctacttcatctgcagcaggcttggcgctggtccaaaggttgtttctgacgaaggtcaagcattgatcgattcagtcaccggacttccaaaaggcgtgtagttctagatttaggttggaataatggtttaagctggggattaaagacaatggtatcatacaagcaacctgggccgggaagatacattaggctcgtgtcacgttggtttcgtgctgattgacttgacggtgtattggtcatgtattatgcatttgcgctggtgttcgttgctgtccaataaagatagaacacgttctcgccttttgtttttctccctcgcctagtatgtggctcaaatatttgtttcactattttattgagcacttcagctgagacaaaagcggagaataactttgtatggctgcttgtcacagtggatgaaaaaatctcgacccccc

SEQ ID NO: 129316 - DNA, 1766 bp, Zea Mays
attcaagaattgttcggttacattttgcctgtttgctgtttttttcgtcggttcgcctcgtcttctccgcctggcccgagactcacactcaattcggtcgttttctgcattaacggagtcaggcccaggcctaacctcagtacatcagagcagccgaacacgcccgcggcaaccgccgccattctaccccaggtcggacggacccttgccggagacgagcacacgccacagcagagcagcgcgaagcgagagatccaatggcggcggcggaggggcagtgggtgctcatggcaacggggcggacgccgaccaacattgcggtgatcaagtactgggggaagcgggacgaggcgctcatcctccccatcaacgacagcatcagcgagatctcgctattaggaggaaggtttcagagctgcctcagagaaatcagaaagcgtgctcgtgactttgaggacaaggagaagggcgtcaagatcaagaaagaggactgggacaagttgcatgttcacatagcctcgtacaacaacttccccactgctgctggtttggcctcttcagctgctggccttgcctgtttcgttttcacccttggaaagctgatgaatgcgaaagaagattatggagaactttcttcaatagcaaggcagggatctgggagtgcatgccgcagtatatatggtggttttgtgaaatggtgcatgggagaaaaagatgatggaagtgacagtattgccgtgcagcttgctgacgaaacacactggaatgatcttgtaattattattgcagtggtcagttcaaagcagaaggaaaccagtagcaccagtgggatgcgagatagtgttgaaacaagtcctctcttgcagtacagggcccagacagtggtgccaggtcgggtgttgaaaatggaagaagctatcaagaaccgtgactttgaatcctttgccaaattaacttgtgcggatagcaaccagtttcatgctgtatgcttagacacgagccctcctatcttctatatgaatgacacgtcacaccgaataattagccttgtggaaaaatggaaccactcagaaggaaccccacaggtcgcttacaccttcgatgctgggccaaacgctgttctaatcgcacaaaaccgtaaaactgcagcacatctcctccagaagctcctatactatttccctccacaggataatgatttgagcagctatctggttggcgataaatcgattctaggtgtcgccggattgcattccatgaaagacgtcgaggctcttccagcacctccagagacgaagataccggatcagaaattcaagggcgatgttagctacttcatctgcagcaggcttggcgctggtccaaaggttgtttctgacgaaggtcaagcattgatcgattcagtcaccggacttccaaaaggcgtgtagttctagatttaggttggaataatggtttaagctggggattaaagacaatggtatcatacaagcaacctgggccgggaagatacattaggctcgtgtcacgttggtttcgtgctgattgacttgacggtgtattggtcatgtattatgcatttgcgctggtgttcgttgctgtccaataaagatagaacacgttctcgccttttgtttttctccctcgcctagtatgtggctcaaatatttgtttcactattttattgagcacttcagctgagacaaaagcggagaataactttgtatggctgcttgtcacagtggatgaaaaaatctcgacccccc

SEQ ID NO: 129317 - DNA, 1868 bp, Zea Mays
attcaagaattgttcggttacattttgcctgtttgctgtttttttcgtcggttcgcctcgtcttctccgcctggcccgagactcacactcaattcggtcgttttctgcattaacggagtcaggcccaggcctaacctcagtacatcagagcagccgaacacgcccgcggcaaccgccgccattctaccccaggtcggacggacccttgccggagacgagcacacgccacagcaggaattatcgggcgtagagcagcgcgaagcgagagatccaatggcggcggcggaggggcagtgggtgctcatggcaacggggcggacgccgaccaacattgcggtgatcaagtactgggggaagcgggacgaggcgctcatcctccccatcaacgacagcatcagcgtaacgctcgaccccgaccatctctccgccaccaccactgtcgccgtcagcccctcattcccttccgaccgcatgtggctcaatggcaaggagatctcgctattaggaggaaggtttcagagctgcctcagagaaatcagaaagcgtgctcgtgactttgaggacaaggagaagggcgtcaagatcaagaaagaggactgggacaagttgcatgttcacatagcctcgtacaacaacttccccactgctgctggtttggcctcttcagctgctggccttgcctgtttcgttttcacccttggaaagctgatgaatgcgaaagaagattatggagaactttcttcaatagcaagggatctgggagtgcatgccgcagtatatatggtggttttgtgaaatggtgcatgggagaaaaagatgatggaagtgacagtattgccgtgcagcttgctgacgaaacacactggaatgatcttgtaattattattgcagtggtcagttcaaagcagaaggaaaccagtagcaccagtgggatgcgagatagtgttgaaacaagtcctctcttgcagtacagggcccagacagtggtgccaggtcgggtgttgaaaatggaagaagctatcaagaaccgtgactttgaatcctttgccaaattaacttgtgcggatagcaaccagtttcatgctgtatgcttagacacgagccctcctatcttctatatgaatgacacgtcacaccgaataattagccttgtggaaaaatggaaccactcagaaggaaccccacaggtcgcttacaccttcgatgctgggccaaacgctgttctaatcgcacaaaaccgtaaaactgcagcacatctcctccagaagctcctatactatttccctccacaggataatgatttgagcagctatctggttggcgataaatcgattctaggtgtcgccggattgcattccatgaaagacgtcgaggctcttccagcacctccagagacgaagataccggatcagaaattcaagggcgatgttagctacttcatctgcagcaggcttggcgctggtccaaaggttgtttctgacgaaggtcaagcattgatcgattcagtcaccggacttccaaaaggcgtgtagttctagatttaggttggaataatggtttaagctggggattaaagacaatggtatcatacaagcaacctgggccgggaagatacattaggctcgtgtcacgttggtttcgtgctgattgacttgacggtgtattggtcatgtattatgcatttgcgctggtgttcgttgctgtccaataaagatagaacacgttctcgccttttgtttttctccctcgcctagtatgtggctcaaatatttgtttcactattttattgagcacttcagctgagacaaaagcggagaataactttgtatggctgcttgtcacagtggatgaaaaaatctcgacccccc

SEQ ID NO: 129318 - DNA, 1367 bp, Zea Mays
gttgatctcagccgttgatgtgtgatggggtgtcgcagcatcgtctcctcttcctggctatccaggccacacctaccacccgctcctatccgtcctctaaaaaatccggaggcttcggccccccttctcgagcccttcgcccaattcctcaatcggaccaaaccctaggagccacatagatttcgattcgatcggaaatctggcatggcaatgtcagatctcacagccaccgtgatcccgaagccagacggggccgacgacgagtcggtggagatccgggaggtgtgggcggacaacctggaggaggagttcgcgctgatccgcgacatcgtcgacgagtacccgttcgtcgcgatggacacggagttcccgggcatcgtctgccgccccgtaggcgccttccgctcccccgccgactacaactacgccaccctcaaggccaacgtcgacatgctgcacctcatccagctcggcctcaccttctccgggccgcgcggcgagctgcccgcgctcggcgctggccgccgccgctgcgtctggcagttcaacttccgcgagttcgacgacgcgcgcgacatattcgcgtccgactccatcgagctgctccgccgcagcggcatcgacttccgccgcaacgccgagcgcggcgtcgacgcgcggcggttcgccgagctcctcatgtcctctggcgtcgtgctcaacgattccgtgtactgggtcaccttccacgcaggatacgacttcgggtacctactgaagattctcacctgcaacagcctcccagacacacaggccgggttttttaaactcatgaagatatacttcccgaccgtgtatgacatcaagcacctcatgaagttctgcaacagcttgcacggcgggctcaacaagctcgctgagctacttgatgtggagcgcgttggggagtctcatcaggctgggtccgatagcctggtcacgtcctgtgcgttctggaagcttaaggattcgttctttgcgggctcaacagagaaatatgcaggtgtgctgtacgggctcaatgcagagaatggcgttagtgcacattgaggggtgctacctgtttgaattttagctttgtgaatcgattgatttaggacagaaagggtggcaagtgcgcaagaaggctcactgaaagatcaagtatgtaggttaagtctgtctcactcacttgggtgtatttgggatgtagtgctcttcggctgctcagtattgaaatagctatttctccttcctccagctttgcttctgctctcagtttctcttttcttctagcaagatactaacacttgattaaacatagctaaaaatgacatctgagaattaaggcatgatacctgcattgccac

SEQ ID NO: 129319 - DNA, 89 bp, Zea Mays
ggagatatcatttgactggtgatcgcctgttccagttaaagactatccattgcatctgctatctatcctgccagcaattatgatcaacc

SEQ ID NO: 129320 - DNA, 654 bp, Zea Mays
gctcagcagtcactacagtccacgccaagctcggctcccctcccctcccctccgctccgcctcttccacagcgccactgctgctcagcatggattgacgagaggtctgtagcttttggttcctgtggcacgggcggtgcggtggcgagcatcctcccatggctggcagccatggatggtagatatacgtgggtcaaaatggcggtggtggcggcggcgggaaaagcgagtggaccccgcccatgtccaagcaaccactggtaactacagcgtgcgtgatcctctccgccgtgcaatgcaaccaagccattcgagaccactgctacctcctgtgaaactgtcaaagccctctctctatctctccgtaaatttgtactgctactccgcggtgtattctttttgttttatctgaatctcttaatactacgcccgtccagaacagaatacgatatgattccgattctaatcttgtcaaactaactaaactttgaacaaattttattaaaaagtgtcaataaatacgggtgtttggatcacacaattaaagtttagtacttgtcatatcgaatgtttgagcgataattacgaacattaaatataattctattataaaattaattacacagtaaaaactaaaattagaatacgagacaaa

SEQ ID NO: 129321 - DNA, 764 bp, Zea Mays
atataatcgtcaccgcccaccagtggtgtccattcacgcacctagggttttcgcgccgccgccgccgccgccgccgcagccgcaacaatgccgtcgcacaagaccttccggatcaagaagaagctggcgaagaagatgcgccagaaccgccccatcccctactggatccgcatgcgcactgacaataccatcaggtacaacgccaagcgcaggcactggcgccgcaccaagctcggcttctgagcgtcgggattggccggctgctgcgtcggaaggctagggtctaagagctatcttccttctgttttatcaatgtgtcagtttttctgtaagctagcaagtgttgctatgacgcttttattaagattctggtgagcggtgatgttaagagaaaattggcactactgtggtgtaccccaagattccttgcagcattgctatgctaagtaaagaaccctttatcttattatatatgtagtgttgcattgattgaggtccacagttgatcaacgtttcatggattgtggtatctttcttaaactattttgatgagtataactgcacaatgtttgttcaggatagaatgagtacatgagctatccatgcgcctttcacagaataaaatgttagtgtgggcgcctcaagtcaaatatgtgttttgatttagttatgaagcaaactgttagttatcaacctcggccattgtgacttctgtctttgctggtccaattcagttctgtatatctggatcccttcgttccttt

SEQ ID NO: 129322 - DNA, 1979 bp, Zea Mays
ccggtggctccacaccaaaagcatcaaggattaaagcaaaaggaaaagaaactcccagtttgtgcctctcaaaaaaggaaaaggaaacggaaaaactcccagttcgtgacggagacaccgaggccagcgccatccacccgctcccctccgcgcccggccgcaccgctcccctccgctcggccttcatctccccacagccgcaagcgacgggcgtcatatcccatcctgatctctcctcccttcttcagtgcagcagcaggccagcggcacgccacccgcctcactcccgcctccgatccgctgcttactcgccacccggagatggccaccgccgccgccttctctgtctcctcgccggcggcctccgccgtcgccgcgcgatccaaggtgtttggaggagttaaccaggcgagaactagaactggctgccgcgtcggcatcacgcggaagaactttggccgtgtcatgatggcccttgcagtggatgtttctcgttttgaaggagtgccaatggctcctccagacccaattcttggggtttctgaggcctttaaagcagataaaagcgagctgaagctcaatcttggtgttggtgcctataggacagaagagctgcagccctacgtgctcaatgtagtcaagaaggctgaaaatcttatgttggagaaaggagaaaacaaagagtatcttcccattgaaggtttagccgcgtttaacaaagcaacagcagagctattgcttggagctgataaccctgttattaatcaaggactggttgctacacttcagtctctctcgggcactggatcactgcgtctcgctgcagcattcatacaaagatactttcctgaagctaaagtgctgatatcgtcgcctacctggggtaaccacaagaatatcttcaatgatgctagggtaccttggtcagagtaccggtattatgaccccaagactgttgggttggattttgagggaatgatagctgacattgaggctgctcctgaaggttcttttgttctgctacatggttgtgctcacaacccaactggaatagacccaactcctgaacagtgggagaaaattgcagatgtcattcaagagaaaaagcatatgccattctttgatgttgcatatcagggttttgccagtggaagccttgatgaagatgcattttctgtcaggctttttgttaagcgtggcatggaagtgtttgttgcacaatcttacagcaagaaccttggtttatattctgaaagggttggtgcaataaatgtcgtgtgctcagcaccagaagttgcagatagggtaaagagccagctgaaacgattggcacgtcccatgtactcgaacccccctattcacggtgccaagatagttgccaacgttgttggtgatccaaccatgtttggtgaatggaaacaagagatggagctaatggctggacggatcaagaatgtaagacagaagctctacgacagtttgtctgccaaggacaagagcggcaaggactggtctttcattctgaggcagattggcatgttctcctacaccggcttgaacaaagcgcagagtgacaacatgacggataaatggcatatttacatgaccaaggatgggcggatctcgttagctgggctgtccctggctaagtgtgattatcttgccgacgccatcatcgattccttccataatgtgaactaggctgaggtacgatagttgagggtcaagctattgatgtttagttccgtggacgctaggctgggatttttgggtccttccagctatacagctcttccgttgtgctccatctggtgtaacttggataaataaaaattttgtcgctgaactaaaactcgtgtgcttttttacctgtaactgtaaggtcagcgcgtggctacagacttgtaaacacttgaatggaaaaaaaacaatgacattaccggatattaatggccaactggccggtatgcgcttaagaa

SEQ ID NO: 129323 - DNA, 2107 bp, Zea Mays
gtctcgtatttgctttgcttcctcttctctccctcctccgcgcccgcctcctctcccctaacgcttagggttagccaggcagcgacctccctcgcgaatcctccatagccgccatggccacggcggttctcagatcccacgatgcgctcaacaaccgcctgcatctcgacgcgtacaccccgtccccggcgaagccgcgccggcgccgtagccccaagccggcggccgcgtcttcgccgcccgcaagggccgcggcgcccatagcctcgacgtcgccgccgaagcctgctgcggcgcagaagacggcgacgcccgttaagggtcctgcagcgtctggacgccgttcgccggtggctaggccggctgcttcggcgcggaagcagctgtcccccgttaaggagaatcccaaccggcggcttgtcatggaggaggtccggatcttgaagcgcggcgaggaaccgcccgctccagctcccgcgccagcccctacgccggtgatagcagcgccccccgcggcgcaagccgcggcggttgaccagcgcgccctctgctccactggtcggatcgggccgcaggcgcccgccgtggtgccgacgaagaagatggtgtcgccccccgctgcatctccagccaacgcgaccgtgttcgcgcgccgggtgttttctgcctcggtgcccgccgtagtgccgacgaagaagacggtggcggtccccgctgcatcaccagccaaagcccccgtgtacgcgggcctggcgttttctaccgcagcgcctgagcccagctccctccccatgccctccttcttactccttcccgcggagtccgaggctactcgtggccttcggtgcctcctccgcatcggcgacctcgcctgacacggctgccgtctctcagtcacccttcggcctggtctctgctcccctctcttttctggttgttccctatggatggttggcgcctgaagggcggatggatccgatggaaagctagcttctccggatccggtcagatcatatctcccggtatcccgttccgatcaacctcttccggtattttttcagaggaaaggttggccaacggcgttccggtggttggatttgtatttggtggcggtggactccggttatgtccactgattgcttgctgttcggttcgcttaagtggtaaagctgatgtctttaggttagaagaataactaaggccgcgtttggttacaccagattatcagaatctgcatcattcacgtaatccaaaaaaatccaactcaagcttgatttttatggatagtctctggcagcacattatccaaggtaaaaaatctgctacgtttggttgagcctatagattctactagccagattctgactatccataggaaccaaacgctccctaagattgggtaggaaggaaggatggtggattggttagctagctgctggctgcttggttcaggagttggggttaaattagcgtctgaaatacttgtttggtttaggtattcctatgtagacgacctgattatgattcagggtggtttatcgtagcagtaatctgaagtttggtgtggtgtttgatctgtgtgagtcttgtgttaggtgagtcatgaacaaatttatgtggtctttattagtaggtcaaggtgaagttcttctctttatgtatctatatcagcttagctgtgatacgcgtgtgagtcgtaaatttcgatatatgaaagtctgttcttgcatctgatcaggaattgtgaacatctctttcttcatatgcctctctttcgtgaaactggggatatgtctttcgtctagatttacttctgttcggctgctccgctggcggctgctgctgttcatgctcatgcactatggatgtcatgaattataaaccaaagatttgggaattttttaactatggaagtcatgaattctatcctcattagggacacatgtttatattagaattcatggatcaaaagaataactaactagctgatagatatatggattaaatgatagatttaatcaaaccatcagattggatgtgaggtatggttttatttaattcagtgttttccttaaccgagcaaggcctaacactttgcgtggattta

SEQ ID NO: 129324 - DNA, 669 bp, Zea Mays
gcgcgcgcgcggggcaggtggcgtgttggcgccgtcatcgtactcgtacgtacgtctgttctctctctgcggatggtcatcatggccgggatgctccccggcgtggagttcgcgcggcgccggcggcgggcgtcgtccttgtgcctgtacgcaccttcttccaaggagtggagcagcgcgtgcatggagacgacggcgacggcgactgcgcgcgcgtggacgacgctggggctgggcagcggcgcccgggaggcgaaggagaggctggatcagaagctccgtgcccagagacaacctgtggtgctcaagagcggtggcctccaccgccaccactcgtcagcgtgcagcagcgacacgggcgtgctgctgcggcgggaagtggtgtcgtcgccgaaaccgaacaagaagggaggaggaggaggagggggccggttcggctggtgccggctactggcaggcgggcggcgcgggccgccggcggcagcggaggcggggtgcgcggtgtgcctggaggagctccgcgcgggggacgtggtggcgcgcctgccctgcgcgcaccgcttccactggtcctgcgccgtgccctgggtccaggccgcgtcgcggtgccccgtctgccgcgcccacgcccgcgtctagctgcctcatcggctgctgctggcctgcacc

SEQ ID NO: 129325 - DNA, 2379 bp, Zea Mays
agcgctcagttcatcggcagtccggcacggcgcagaagctctcctcgctcgcgccgccacacagcccacaaccttctatggattcgtcctcggccaccgccgctaccgttgcgccggtggtgacctcggccccgccgctcgaagactgcctccgcctcctccgcggcgagcgcgacgagcagaagctggcgggcctgctagtcgccgccaacgtctgccgcgcgggcgacgccgacgccgtcgccaacgtctaccgcgccgtcgggccccgcttcctccgacgcctcctcaacactgggttggggaaagtggagggcgggaaggaggaggagcgagaggcatacatgcggctcgccgtcaccgtgctcgcagggctcgcgcgcgtcccggaggttgcggccgacgagggtgtcgtttccaccgtgcccctagtcgccgaggttgtcgccaaatcgactgatccagcaatcactgaagaatgctttgaacttctgtcacttattgcaatagcgtctgaagatggggcatatgagttttgtgagcccggtgtaatagacatgatcttccttcaaatcttaagcttaacagatggttctaagtgcgtagaacttgccattaacctactgcagttactagttcataaactcaaagttgacactatgagttcggagaaactgcaaggaatgactagaatggtaacttgtcttgccaggatatttgctgttctccacactgcagttaaatttgatgccttgcacatgcttaccttcctcctgtcccaaaaagaatctccacttcatgattttttgagatcaatacctgcatcaatttgggaatctcacattcgagttggaatcactgccattctccaaaatcgtgttgtatcctctgaaaagttgcacgctcttcttttggcggagtgcatgatgtccatactgggcgaggattggttgtcagaagattttgaagtccaggataaccaaaatgtgttgtctgttgacaaatttgtattgcttgtgctggaatccgcaagggttgaagtggcagtcttgctaaatgagcttgcttatctgaagtacgagtcatcaaaaatttctcagacagatgaagccatcagtcagaaacagaggaacctggctatactattttcgttaatagaaagaataattaaaatgatatcaaatgccagtagtggtgaaggtgcaccaattcataccatccgtgaaagtaccataatgcaggccattacgggattaaatgagacaatcaatttagtcttagactttctgcaggacgcgaaggatcatggtcaatggaaaggtgacgatcttttagcagctgcaagaatagtaggaagttatctggcagaagcaccatatgcctgcaaggagaagactgggaatctattggaatttatcttttctatagaaggtcaagatgaatcaagttccttctattctatttgcttcatgcttccaatgctatcccaaataacaatggaggttgatggatgtagaactttggcatcatttggtggccataaggcagttatagattgccttgttaaaatgactgagcagggtggaatgacgattgataacggtagcatgtttttggcatgtgataccatcataaatttcatgtctaatatgaagagtgtccatattccagtggattattgtttcattcgcctcctaaaagcacttgttacatgggctgatgcctcatcagttaccatgacagcatcctgcttatgtgtaatgctgttggacatgacgtcagaaaagtttctattgagctgctctcattttgacgccaatatccttgggagtttgtctgagatcatcatcagaagtttgcagcaggatatccctgatgatgatagtgagcaattcaagcagaagcagatcattgtatcaggttataagcgatgggctgatcgatttccacgtgttaaagatgttgtggagcagcatgtatccgtgtgaatgtgatcaacccccaggagctgttctctatgaatgcaaacctgcaaacgtgacagtgcagctttgacaatgcctcggttctggtggttcattccttttacctggttagcgaaattctccagcggcaggccggcagctaacgaggtgcaccaacgtggatcagaaagatgtcgttgtttatccgggaaattctcagctgcgaagcaaatctgacattgtaatgtttatgctgcacgagaaagaacaaggcggtttggggactagattctcatctcgctttcaccatttctgaacgcatgtgtaacagaaccaagcccaagtttcaggcaaggggttttcatttatattgtttagcatgtatacatgcgagacgaacatatgaaaggataaa

SEQ ID NO: 129326 - DNA, 2455 bp, Zea Mays
agcgctcagttcatcggcagtccggcacggcgcagaagctctcctcgctcgcgccgccacacagcccacaaccttctatggattcgtcctcggccaccgccgctaccgttgcgccggtggtgacctcggccccgccgctcgaagactgcctccgcctcctccgcggcgagcgcgacgagcagaagctggcgggcctgctagtcgccgccaacgtctgccgcgcgggcgacgccgacgccgtcgccaacgtctaccgcgccgtcgggccccgcttcctccgacgcctcctcaacactgggttggggaaagtggagggcgggaaggaggaggagcgagaggcatacatgcggctcgccgtcaccgtgctcgcagggctcgcgcgcgtcccggaggttgcggccgacgagggtgtcgtttccaccgtgcccctagtcgccgaggttgtcgccaaatcgactgatccagcaatcactgaagaatgctttgaacttctgtcacttattgcaatagcgtctgaagatggggcatatgagttttgtgagcccggtgtaatagacatgatcttccttcaaatcttaagcttaacagatggttctaagtgcgtagaacttgccattaacctactgcagttactagttcataaactcaaagttgacactatgagttcggagaaactgcaaggaatgactagaatggtaacttgtcttgccaggatatttgctgttctccacactgcagttaaatttgatgccttgcacatgcttaccttcctcctgtcccaaaaagaatctccacttcatgattttttgagatcaatacctgcatcaatttgggaatctcacattcgagttggaatcactgccattctccaaaatcgtgttgtatcctctgaaaagttgcacgctcttcttttggcggagtgcatgatgtccatactgggcgaggattggttgtcagaagattttgaagtccaggataaccaaaatgtgttgtctgttgacaaatttgtattgcttgtgctggaatccgcaagggttgaagtggcagtcttgctaaatgagcttgcttatctgaagtacgagtcatcaaaaatttctcagacagatgaagccatcagtcagaaacagaggaacctggctatactattttcgttaatagaaagaataattaaaatgatatcaaatgccagtagtggtgaaggtgcaccaattcataccatccgtgaaagtaccataatgcaggccattacgggattaaatgagacaatcaatttagtcttagactttctgcaggacgcgaaggatcatggtcaatggaaaggtgacgatcttttagcagctgcaagaatagtaggaagttatctggcagaagcaccatatgcctgcaaggagaagactgggaatctattggaatttatcttttctatagaaggtcaagatgaatcaagttccttctattctatttgcttcatgcttccaatgctatcccaaataacaatggaggttgatggatgtagaactttggcatcatttggtggccataaggcagttatagattgccttgttaaaatgactgagcagggtggaatgacgattgataacggtagcatgtttttggcatgtgataccatcataaatttcatgtctaatatgaagagtgtccatattccagtggattattgtttcattcgcctcctaaaagcacttgttacatgggctggaaccacagatgcctcatcagttaccatgacagcatcctgcttatgtgtaatgctgttggacatgacgtcagaaaagtttctattgagctgctctcattttgacgccaatatccttgggagtttgtctgagatcatcatcagaagtttgcagcaggatatccctgatgatgatagtgagcaattcaagcagaagcagatcattgtatcaggttataagcgatgggctgatcgatttccacgtgttaaagatgttgtggagcagcatgtatccgtgtgaatgtgatcaacccccaggagctgttctctatgaatgcaaacctgcaaacgtgacagtgcagctttgacaatgcctcggttctggtggttcattccttttacctggttagcgaaattctccagcggcaggccggcagctaacgaggtgcaccaacgtggatcagaaagatgtcgttgtttatccgggaaattctcagctgcgaagcaaatctgacattgtaatgtttatgctgcacgagaaagaacaaggcggtttggggactagattctcatctcgctttcaccatttctgaacgcatgtgtaacagaaccaagcccaagtttcaggcaaggggttttcatttatattgtttagcatgtatacatgcgagacgaacatatgaaaggataaactcctacttaaatgtaagtagagatattgtagtggagtaaaaagcacacgtctagatttgagatggc

SEQ ID NO: 129327 - DNA, 2625 bp, Zea Mays
agcgctcagttcatcggcagtccggcacggcgcagaagctctcctcgctcgcgccgccacacagcccacaaccttctatggattcgtcctcggccaccgccgctaccgttgcgccggtggtgacctcggccccgccgctcgaagactgcctccgcctcctccgcggcgagcgcgacgagcagaagctggcgggcctgctagtcgccgccaacgtctgccgcgcgggcgacgccgacgccgtcgccaacgtctaccgcgccgtcgggccccgcttcctccgacgcctcctcaacactgggttggggaaagtggagggcgggaaggaggaggagcgagaggcatacatgcggctcgccgtcaccgtgctcgcagggctcgcgcgcgtcccggaggttgcggccgacgagggtgtcgtttccaccgtgcccctagtcgccgaggttgtcgccaaatcgactgatccagcaatcactgaagaatgctttgaacttctgtcacttattgcaatagcgtctgaagatggggcatatgagttttgtgagcccggtgtaatagacatgatcttccttcaaatcttaagcttaacagatggttctaagtgcgtagaacttgccattaacctactgcagttactagttcataaactcaaagttgacactatgagttcggagaaactgcaaggaatgactagaatggtaacttgtcttgccaggatatttgctgttctccacactgcagttaaatttgatgccttgcacatgcttaccttcctcctgtcccaaaaagaatctccacttcatgattttttgagatcaatacctgcatcaatttgggaatctcacattcgagttggaatcactgccattctccaaaatcgtgttgtatcctctgaaaagttgcacgctcttcttttggcggagtgcatgatgtccatactgggcgaggattggttgtcagaagattttgaagtccaggataaccaaaatgtgttgtctgttgacaaatttgtattgcttgtgctggaatccgcaagggttgaagtggcagtcttgctaaatgagcttgcttatctgaagtacgagtcatcaaaaatttctcagacagatgaagccatcagtcagaaacagaggaacctggctatactattttcgttaatagaaagaataattaaaatgatatcaaatgccagtagtggtgaaggtgcaccaattcataccatccgtgaaagtaccataatgcaggccattacgggattaaatgagacaatcaatttagtcttagactttctgcaggacgcgaaggatcatggtcaatggaaaggtgacgatcttttagcagctgcaagaatagtaggaagttatctggcagaagcaccatatgcctgcaaggagaagactgggaatctattggaatttatcttttctatagaaggtcaagatgaatcaagttccttctattctatttgcttcatgcttccaatgctatcccaaataacaatggaggttgatggatgtagaactttggcatcatttggtggccataaggcagttatagattgccttgttaaaatgactgagcagggtggaatgacgattgataacggtagcatgtttttggcatgtgataccatcataaatttcatgtctaatatgaagagtgtccatattccagtggattattgtttcattcgcctcctaaaagcacttgttacatgggctggaaccacagatgcctcatcagttaccatgacagcatcctgcttatgtgtaatgctgttggacatgacgtcagaaaagtttctattgagctgctctcattttgacgccaatatccttgggagtttgtctgagatcatcatcagaagtttgcagcaggatatccctgatgatgatagtgagcaattcaagcagaagcagatcattgtatcaggttataagcgatgggctgatcgatttccacgtgttaaagatgttgtggagcagcatgtatccgtgtgaatgtgatcaacccccaggagctgttctctatgaatgcaaacctgcaaacgtgacagtgcagctttgacaatgcctcggttctggtggttcattccttttacctggtacttccctgcgacctgtttctgatgcgattttggttagcggaccttggcttatgggaattctgcaatggggaatgttaggttagcgaaattctccagcggcaggccggcagctaacgaggtgcaccaacgtggatcagaaagatgtcgttgtttatccgggaaattctcagctgcgaagcaaatctgacattgtaatgtttatgctgcacgagaaagaacaaggcggtttggggactagattctcatctcgctttcaccatttctgaacgcatgtgtaacagaaccaagcccaagtttcaggcaaggggttttcatttatattgtttagcatgtatacatgcgagacgaacatatgaaaggataaactcctacttaaatgtaagtagagatattgtagtggagtaaaaagcacacgtctagatttgagatggctcctaaatcttaaaaagtgagtctgaactaatggaatgttgtttgggatagctcctaaaccttaacaaatgaatctgaatctagaattt

SEQ ID NO: 129328 - DNA, 835 bp, Zea Mays
gtcgaaatgttgtttttttttattgcttttcggagtacccaatttgccctgtacaaacaaaggagccggccggccctgagctcacagctaggaccgggtccacgcgccaaactccctatctactcgacggccggatcagccggacagcacgccgccggcgaggagctcgtacggcgcgtcccgccttgcgcgtgcggccgcgaccgtcgcgccggcgctggtccccgcgggcggcggcttggcgcgggcggggccatcctccccggcgtcggcttccctcggcggcagctcggcgcggcacatggggcaggtggggcggatcccgagccacggcgcgatgcagccgtggtggtaccagtgcgcgcagggcaggcgcgccacggggtccgccgccgcgatctcctccgtgcacaccgcgcacaccgtgccggccacccccgcgggcgcgcgcaccggcggcggcggctccgcgcggcggccgccggaggaagagggggacggcgcgggaggtggaggaaggtcgacggggaaggactcctcgtcgacgtagtccaccaccagcgggttccgcccgaggatcgacgagaggaggtacctcgccgtgatccagtcgccgtcgtccatgatcctgaatggatgcacgcccaacgtgtagcgctgctgtgctctgctctgctctgctcgccgtcgtaccagtactactagtagcagccagtattcattcgcttcgtttgcccccgtctccgtctgttaaataggagtcggagcagcagttgttctggctgacggtgcagtgacggggttgggcagataagagtaaagattgggttgccaa

SEQ ID NO: 129329 - DNA, 451 bp, Zea Mays
ggaactttgaactttatttcacaaaaccatagtttataataacatggtttaaagtatgtcataacataattatagtatactttacatcattccaatccaataactgtttagagacatagtattttagttatagtgtaggagagaaaaaagactgtagctgcgtgcaaaccaaagttttcttgatcctaaaaataccgtggtattggcaaaaccataatttaaaatatagagttcttgtatgtgctcccaaacgtcttttggtataaaatactatggtatgctcaaatattacggtataccgtgttcccaaacatgatgtcagtggcaggcccctgaacaccttccccggagatagtgagactactcaagcgcggggcaacgaaactcaccccagcacctgttatcctcttgcgatccaaaagcttgagcctctccaggaatggcgctgacg

SEQ ID NO: 129330 - DNA, 1762 bp, Zea Mays
aatcctttgcacgcgcgatattcccaagaatcttctcttcctctcgctatatcccccatccgcccacccccattgcgctgcactgctcccacacgctcggattcctgctcgctttctcctcccacgattccatcgccagccgccccttttcccttcctttttcccttgctcgcccgcccaggactcgtccttcgcgcttcttcgccagctcgtccttcgcgcttcgtagccagccgtcggcgagagagggtgagaggatcctacgtgccttgtacgctcgctcgggagccggccgggatcgcgccgcgccatcgtaccccgcccggacatgtgcgtggaggggctggacgacgcagcagggaggctcggcttcggagaccaggacaccgacaggcgcgccggtgatgcgatggagagagtttgtgagaacacagtggctgttgacttcaagcagactaagctgaacaactttgtgccattcatccggtcaggggaatggtctgatattggaggtcgcgattacatggaagatgcccatgtgtgcatctctgatctggcaaagaattttggctatgactcagtcgaagatgaagtaatttctttctatggggtgtttgatggccataatggcaaagatgctgctcattatgtccgtgataacttgccacgggtcatcgtggaagacgctgattttcctcttgagcttgaaaaggtggtaaagaggtcatttgtgcaaactgatagtaagtttgcagagaaattttctcatcacaggggactttcttctggaacgacagcacttacagcaatgatttttggaaggtcccttctggttgcgaatgccggtgactgcagagcggtgctctcgcggcgtggcactgccattgagatgtccaaggaccacaggccttgctgcatgaacgaaaggaagcgcgtagagtcacttggcggctacgttgacgacggttacctgaacggtcagctggcagtgaccagagcgctcggtgattggcatctggatggcatgaaagaggtgggcgagccaggagggcccctgagcgccgaaccagagctgaagatggtcacgctgaccaaggacgacgagttcctgataatcggcagcgacggcatctgggacttcttctcgagccagaacgccgtggacttcgcgcggcggaggctccaggaccacaacgacctgaggctgtgctgcagggagatggtcgacgaggcggtgcggcggggcgccagcgacaacctgacggctgtgatggtctcgttccacccggacgcccctcccccgagccgagccaacaagaggaccggcagggtcaccaggagcatttcggctgaggggcttcacagcctcagagtgctcctggaaggccagtgacgtcgccgggcggcgcggcgccattgctgcccgttcgtccctgatgctgtgctacgttgctgatgagtgttaactgtaagtagcggtttccggtatcttggtgcttgctcttcttcttccgctgagggcgggcgactattcttgtccttcctccgacaataaaccaacgggcctgagatctcactgtgagacgctgtaaataaggaaatatggaagttggagctcgtcattaaggacgagttagggcatgtacaatgtagataccacgacacggtcctccaagtataaaacacacctaagacacagttcagtacaaagggacgtatctaaagtcttacatcttaattaatgtttcaaattcatcgtatt

SEQ ID NO: 129331 - DNA, 1775 bp, Zea Mays
aatcctttgcacgcgcgatattcccaagaatcttctcttcctctcgctatatcccccatccgcccacccccattgcgctgcactgctcccacacgctcggattcctgctcgctttctcctcccacgattccatcgccagccgccccttttcccttcctttttcccttgctcgcccgcccaggactcgtccttcgcgcttcttcgccagctcgtccttcgcgcttcgtagccagccgtcggcgagagagggtgagaggatcctacgtgccttgtacgctcgctcgggagccggccgggatcgcgccgcgccatcgtaccccgcccggacatgtgcgtggaggggctggacgacgcagcagggaggctcggcttcggagaccaggacaccgacaggcgcgccggtgatgcgatggagagagtttgtgagaacacagtggctgttgacttcaagcagactaagctgaacaactttgtgccattcatccggtcaggggaatggtctgatattggaggtcgcgattacatggaagatgcccatgtgtgcatctctgatctggcaaagaattttggctatgactcagtcgaagatgaagtaatttctttctatggggtgtttgatggccataatggcaaagatgctgctcattatgtccgtgataacttgccacgggtcatcgtggaagacgctgattttcctcttgagcttgaaaaggtggtaaagaggtcatttgtgcaaactgatagtaagtttgcagagaaattttctcatcacaggggactttcttctggaacgacagcacttacagcaatgatttttggaaggtcccttctggttgcgaatgccggtgactgcagagcggtgctctcgcggcgtggcactgccattgagatgtccaaggaccacaggccttgctgcatgaacgaaaggaagcgcgtagagtcacttggcggctacgttgacgacggttacctgaacggtcagctggcagtgaccagagcgctcggtgattggcatctggatggcatgaaagaggtgggcgagccaggagggcccctgagcgccgaaccagagctgaagatggtcacgctgaccaaggacgacgagttcctgataatcggcagcgacggcatctgggacttcttctcgagccagaacgccgtggacttcgcgcggcggaggctccaggaccacaacgacctgaggctgtgctgcagggagatggtcgacgaggcggtgcggcggggcgccagcgacaacctgacggctgtgatggtctcgttccacccggacgcccctcccccgagccgagccaacaagaggaccggcagggtcaccaggagcatttcggctgaggggcttcacagcctcagagtgctcctggaaggccagtgacgtcgccgggcggcgcggcgccattgctgcccgttcgtccctgatgctgtgctacgttgctgatgagtgttaactgtaagtagcggtttccggtatcttggtgcttgctcttcttcttccgctgagggcgggcgactattcttgtccttcctccgacaataaaccaacgggcctgagatctcactgtgagacgctgtaaataaggaaatatggaagttggagctcgtcattaaggacgagttagcggtgtgcatccagggggcttttgtggctcagtatgtgatgccttttcgcccctcctgattttctgtaaataaaacgatgctgggagccatcggtgtgattgaactagtgttctgttatgcgtgctccccatcgattc

SEQ ID NO: 129332 - DNA, 1924 bp, Zea Mays
gggaattctagttcttggcagggtgggagtgcgggagtaggatttgtattcattgccttggacttggaattaacctgttcgttttcagagtttctcagggggtgtttggttagagggactaaacattagtctctagtttttagtcttgtttagtctcttttttgccaaacactaggactaaaatatagactaaaatgatttagtctttagtccttcacataggtgctaaaagagactaaaagcccataattattatgttgcccttacctttttgtatggataactaatattatgagtatattctaagggcatttgagtctttggacagtgtatttaatgattttagaatctgtttagtcctagaaccaaacatgtagggactaaagttcagtcctaggactaattgaaattgaaaccaaacatggcctcaaccgaatcttatatagtgcttgtgctttggttgagttgtttgtctttttcactgggctctgatcctctggataatgtgcagatggagagagtttgtgagaacacagtggctgttgacttcaagcagactaagctgaacaactttgtgccattcatccggtcaggggaatggtctgatattggaggtcgcgattacatggaagatgcccatgtgtgcatctctgatctggcaaagaattttggctatgactcagtcgaagatgaagtaatttctttctatggggtgtttgatggccataatggcaaagatgctgctcattatgtccgtgataacttgccacgggtcatcgtggaagacgctgattttcctcttgagcttgaaaaggtggtaaagaggtcatttgtgcaaactgatagtaagtttgcagagaaattttctcatcacaggggactttcttctggaacgacagcacttacagcaatgatttttggaaggtcccttctggttgcgaatgccggtgactgcagagcggtgctctcgcggcgtggcactgccattgagatgtccaaggaccacaggccttgctgcatgaacgaaaggaagcgcgtagagtcacttggcggctacgttgacgacggttacctgaacggtcagctggcagtgaccagagcgctcggtgattggcatctggatggcatgaaagaggtgggcgagccaggagggcccctgagcgccgaaccagagctgaagatggtcacgctgaccaaggacgacgagttcctgataatcggcagcgacggcatctgggacttcttctcgagccagaacgccgtggacttcgcgcggcggaggctccaggaccacaacgacctgaggctgtgctgcagggagatggtcgacgaggcggtgcggcggggcgccagcgacaacctgacggctgtgatggtctcgttccacccggacgcccctcccccgagccgagccaacaagaggaccggcagggtcaccaggagcatttcggctgaggggcttcacagcctcagagtgctcctggaaggccagtgacgtcgccgggcggcgcggcgccattgctgcccgttcgtccctgatgctgtgctacgttgctgatgagtgttaactgtaagtagcggtttccggtatcttggtgcttgctcttcttcttccgctgagggcgggcgactattcttgtccttcctccgacaataaaccaacgggcctgagatctcactgtgagacgctgtaaataaggaaatatggaagttggagctcgtcattaaggacgagttagcggtgtgcatccagggggcttttgtggctcagtatgtgatgccttttcgcccctcctgattttctgtaaataaaacgatgctgggagccatcggtgtgattgaactagtgttctgttatgcgtgctccccatcgattcaagatctacagtttttatttactaattactactagtacaagtcttta

SEQ ID NO: 129333 - DNA, 303 bp, Zea Mays
atgaggactaccacttccctgccgtcggctgctgctgccgccaccgtcttgatgcttctgttgctgactgcggccgtggaggtcgaagccatcaggcccctggaagccgtcaagccgcagcagcaagcgaacgttgccattaatgtagtaagcgggccccctgctgccttttcttcgccagcgaagagaagcgtctctgtcgatgggcaggaggtcgtcaaggcaacgttaacggcgcacaaactgcctgggttccatgaggactactatggcgccagcgtccatgaaccgaggcaccattga

SEQ ID NO: 129334 - DNA, 2318 bp, Zea Mays
cccgttagttgcccagacccagacccagagaggagggcgacgaacacacggtgacggagagccgagtggacaggacaggagcgcggagggaggaggaaacaaagcagaaaagcaacccccgtcttccatctttgcggagcgacgcgcatctgccctgcccatctctttcgtgctcctaccccccgccttcttccgcccgccgcctcagccctcaaggcttttccttctcatcttcttctcagaccggggacgggcccgacggggacagggacaaaaggtggtgcgatcttgttgggcacactccgcctccgcgcgcgggaagagagagagagagagagagagagagagagagagagaaggacggagggtggcagggccgccgcgccggtgagccgacccccagccatggcattgccggctccccccgtccgcctggcgctgctgctgctcgtcgcgctgccattctgcgccgcgcatcccgggccgggggccttcaacgctcctcgccacttccagacgcccgcgctccactctgatggatttggcttggtggcaagaaggtcgattgctgaagctcctgctgacatcaacgtcactacgaatagctcctttgtgctggcggcagataggacatatcgaagggaccctttgaatggcttcaggaaatacccgggcggctggaatatcagtgaagtgcactatttcgcttccgtcggatatacagccattccgctgttcgccattgctctcgtgtggtttgtgatctttttcctggttatgcttgggatttgctgccgtcattgctgttgcccgcatcacacctacaagtattcacgaacagcatatgctctatcattgatacttctaatactgttcacatgtgctgcaattgctggatgtgctatgttatacgatggccagggaaaattccacaagagcacaacaactactctgaagtttgttgttagccaggcaaactatactgttgacaaccttaggaacctatctgatagtttgtctgctgcaaagaaggtcgacatagcacagtcctttttgctgcctcctaatgtgcaaaatgagataaatgaaattcaaggaaagctgaactcatcagctactgatcttgctattaaaacaacagataatgccgcgaagatcaaaaaggtgctaaacagagtgcggcttgctttagttgtcattgcagctgtgatgcttcttctggcatttgttggcttcttgttatccatctttggtctggaattccttgtctctgtcttggttattattggatggatattggttactggaacgtttatcctgtgtggtgtatttcttcttctgcacaatgtcgtttcagatacttgcgttgcaatggaagagtgggttgctcatccgacagaacacacagccctggacgaggttatcccctgcgtggagcctgccacggcgaacgaatccctgtacagaagcaggcaggtgacgttcgagctggtgaacgtggtgaaccaggtgatcaccaacgtgtcgaacaggaacttccccccgcagctgacgcctttgtactacaaccagtcggggccactgatgcctctgctctgcaaccccttcacgcctgatctgagggaccgcaactgcagcagaggagaggttaccttggacaacgcaacccaggtgtggaagaagtacgagtgccagagcaccaccgtctcaggaggagccgagatctgcgcgacggtggggcgtgtgacccccagcatctacgggcagatgaccgcgggcgtgacggtgagccaggggctgtaccagtacgggcctttcctcatccagctgcaggactgcaccttcgtgcgcgacaccttcacgaccatcaaccagggctactgcccggggctggagcgctacagcaagtgggtgtacgtgggcctggtgatggtctcgttggcggtgatgctgtcgctcatcttctgggtgatctacgccagggagcggcggcaccgcgtgtacagcaagcagcaccagccgtacccggtggaggacaagccggcggcgacggtcccgggcgcttgaattgatatggcccgcccgttccagtgctccggcctactcccgtgccgctgtgcatactgtactccgcgcgctagttgggttttacgtggtggtgtaggtggatgatgtaccctggattgttgttcgtttgcttggtgttgctgtatgtttgctgattttaagttgttgtgcattctcgtactgacggtagctggacaatgaattgattgtgttgggattggttattattaggtgttcttcagttcgtttct

SEQ ID NO: 129335 - DNA, 1990 bp, Zea Mays
atggcctccgcaccctgctccaactcttcccccgccgccagagccccgagatccgccgctgccggcaacaagaagccgacgacgtgcctctgctcgccgacgagccacccggggtcgttccgctgcagccggcaccggaacggggccgccgcgccgggcggcgaggcggcgcacggcgccagcaggggcggcactgctggcagggcggccaaggggcgccggaaggttagaccaaaaacgagactacacgccgacgccgtctaccctgcctggagggtaaacccaggctacatatttgacgcgctccttgtgcaggctgcagcggaacgagcccgggtggttggtcggcgagcacatgcagctgatgatcctgcatctgcatccccgcaattgatcctgcacgttgtgtttgtgtatgcacctttgctcgatctgccgaatggactgatgatgatgacttgtgttgatccgatcctcgccaatgccagcaccaccgatatacgccggcacggtacggcaacagatccttttcgcgcctcccaggcagcccagttccttcgctggaaacttgagaaggcgtacatgagattgagaaggagagaacgctttgtttatagggccgcaatggatcagagcggaatcgtggtcgtggagctggccgaggcccacgccgtgccggtttcaggcgggcctagtgctcgcggcccatttaagaagcccaggacggatgaaacgaacggacaagagaagacggaactttcccagcccaacagagcccacccgcgcgtgcgctgtactctctactactcgcgagataacgaacttcagcacgctctccgcccgaagctgagcagtgactgtgagcaggcgtttcttcctccactggtctcggtctttgccgcaaatatccgctcgccccccttctcggcctcgggctctcactcaccctcgaccctcctcgcgcagcgcagccgcacgcgcgccatggcggcgctctgctccgcctccccggccatctccgcggcggcgtccctcgggtcgcccgcgcgcgtggtcgcgtccttcctccgcctgcgcctgcgcctgcgcgccgccaagcgctcctgctcccacgcgccggcgccgtcgtggcgggcgcgacggcgcttcgcggcggccgcggcggaggcggaggagtgctcgggtgtggagacgctgatcccgcccgacaatcgcatccccgccaccatcatcaccggcttcctcggctctggcaagacaactttactgaatcacatcttgactgcccaccatggaaagcgaattgctgttattgaaaatgagtttggagaagtagacattgatggctcactagtcgctgcacaaaccgctggagctgaggacataatgatgctaaataacggctgcctttgttgcactgtgcgtggtgatttagtccgtatgattggtgaattggtgaacaagaagaaggggaggtttgatcatattgttattgaaaccacaggtctagcgaatccagcacccattatacaaacattctatgcagaggatgtagtttttaatgatgtcaagctggacggtgttgttactttagttgacgcaaagcatgctagacagcatttggatgaagtaaagcccaagggtatagtcaatgaagcagttcagcaaattgcctatgctgacagaattatagttaacaagattgatcttgtcaaagaacctgaagtgttgtccttggttgagcgtataaggggtatcaaccacatggctaatttgaagcgagctgagtatggtaaagttgatttggactatgttcttggaattggaggatttgatctggagaggttcctttctttggtcttattttttttgtgttatttgtgttgacatattgtatccttgctaaataaacattttggaacgtgtgcccttccagtctaatcccagtcattttctttgacggggcgtttcgaccccttcattttagagg

SEQ ID NO: 129336 - DNA, 2610 bp, Zea Mays
atggcctccgcaccctgctccaactcttcccccgccgccagagccccgagatccgccgctgccggcaacaagaagccgacgacgtgcctctgctcgccgacgagccacccggggtcgttccgctgcagccggcaccggaacggggccgccgcgccgggcggcgaggcggcgcacggcgccagcaggggcggcactgctggcagggcggccaaggggcgccggaaggttagaccaaaaacgagactacacgccgacgccgtctaccctgcctggagggtaaacccaggctacatatttgacgcgctccttgtgcaggctgcagcggaacgagcccgggtggttggtcggcgagcacatgcagctgatgatcctgcatctgcatccccgcaattgatcctgcacgttgtgtttgtgtatgcacctttgctcgatctgccgaatggactgatgatgatgacttgtgttgatccgatcctcgccaatgccagcaccaccgatatacgccggcacggtacggcaacagatccttttcgcgcctcccaggcagcccagttccttcgctggaaacttgagaaggcgtacatgagattgagaaggagagaacgctttgtttatagggccgcaatggatcagagcggaatcgtggtcgtggagctggccgaggcccacgccgtgccggtttcaggcgggcctagtgctcgcggcccatttaagaagcccaggacggatgaaacgaacggacaagagaagacggaactttcccagcccaacagagcccacccgcgcgtgcgctgtactctctactactcgcgagataacgaacttcagcacgctctccgcccgaagctgagcagtgactgtgagcaggcgtttcttcctccactggtctcggtctttgccgcaaatatccgctcgccccccttctcggcctcgggctctcactcaccctcgaccctcctcgcgcagcgcagccgcacgcgcgccatggcggcgctctgctccgcctccccggccatctccgcggcggcgtccctcgggtcgcccgcgcgcgtggtcgcgtccttcctccgcctgcgcctgcgcctgcgcgccgccaagcgctcctgctcccacgcgccggcgccgtcgtggcgggcgcgacggcgcttcgcggcggccgcggcggaggcggaggagtgctcgggtgtggagacgctgatcccgcccgacaatcgcatccccgccaccatcatcaccggcttcctcggctctggcaagacaactttactgaatcacatcttgactgcccaccatggaaagcgaattgctgttattgaaaatgagtttggagaagtagacattgatggctcactagtcgctgcacaaaccgctggagctgaggacataatgatgctaaataacggctgcctttgttgcactgtgcgtggtgatttagtccgtatgattggtgaattggtgaacaagaagaaggggaggtttgatcatattgttattgaaaccacaggtctagcgaatccagcacccattatacaaacattctatgcagaggatgtagtttttaatgatgtcaagctggacggtgttgttactttagttgacgcaaagcatgctagacagcatttggatgaagtaaagcccaagggtatagtcaatgaagcagttcagcaaattgcctatgctgacagaattatagttaacaagattgatcttgtcaaagaacctgaagtgttgtccttggttgagcgtataaggggtatcaaccacatggctaatttgaagcgagctgagtatggtaaagttgatttggactatgttcttggaattggaggatttgatctggagaggattgagagtgctgttgctgaaaagtcacatgaagatcacgcagagcatgatcatgaacaccatgagcatgagaatgaacacgaccatgaccatcatcaccatcatgatcatgatcatgatcatcatgcacatgaccacactcatgatcctggtgtttcttctgtgagcattgtttgcgaaggggagatggatcttgaaaaggctgacatgtggttggggaacctactgctggaacacagcgaggatatatacaggatgaaaggtctgctttctgtcagtggaatgccgcagcgatttgtctttcaggaacctcaataaagaagagctggataaggggttcaaggattgcctactgaagaaatagagtgatttcagaatagtcgggatatagatctccagttttggccttcttcgaatgtagtcagattcacatcaattcatatctgttggagtggattgaagacagtgaagcttgaactaaattctaccccaattcatccgacatatgtagattaaggtgaatccgacaacatctaaacaaggccttcatgattttgagttttgtggccgcagaacttatcctcgatatctgacatgacatgtaacgagagatgtatcgaatcgatagcattattgcaaccttgcatcctcacgaaatagtctatcatagttttattgcacggtgttgcaatgtaaccaatagagattattataggatgtctttgtctctgtgatacgaggaaatcatattgcatggtataatat

SEQ ID NO: 129337 - DNA, 2730 bp, Zea Mays
atggcctccgcaccctgctccaactcttcccccgccgccagagccccgagatccgccgctgccggcaacaagaagccgacgacgtgcctctgctcgccgacgagccacccggggtcgttccgctgcagccggcaccggaacggggccgccgcgccgggcggcgaggcggcgcacggcgccagcaggggcggcactgctggcagggcggccaaggggcgccggaaggttagaccaaaaacgagactacacgccgacgccgtctaccctgcctggagggtaaacccaggctacatatttgacgcgctccttgtgcaggctgcagcggaacgagcccgggtggttggtcggcgagcacatgcagctgatgatcctgcatctgcatccccgcaattgatcctgcacgttgtgtttgtgtatgcacctttgctcgatctgccgaatggactgatgatgatgacttgtgttgatccgatcctcgccaatgccagcaccaccgatatacgccggcacggtacggcaacagatccttttcgcgcctcccaggcagcccagttccttcgctggaaacttgagaaggcgtacatgagattgagaaggagagaacgctttgtttatagggccgcaatggatcagagcggaatcgtggtcgtggagctggccgaggcccacgccgtgccggtttcaggcgggcctagtgctcgcggcccatttaagaagcccaggacggatgaaacgaacggacaagagaagacggaactttcccagcccaacagagcccacccgcgcgtgcgctgtactctctactactcgcgagataacgaacttcagcacgctctccgcccgaagctgagcagtgactgtgagcaggcgtttcttcctccactggtctcggtctttgccgcaaatatccgctcgccccccttctcggcctcgggctctcactcaccctcgaccctcctcgcgcagcgcagccgcacgcgcgccatggcggcgctctgctccgcctccccggccatctccgcggcggcgtccctcgggtcgcccgcgcgcgtggtcgcgtccttcctccgcctgcgcctgcgcctgcgcgccgccaagcgctcctgctcccacgcgccggcgccgtcgtggcgggcgcgacggcgcttcgcggcggccgcggcggaggcggaggagtgctcgggtgtggagacgctgatcccgcccgacaatcgcatccccgccaccatcatcaccggcttcctcggctctggcaagacaactttactgaatcacatcttgactgcccaccatggaaagcgaattgctgttattgaaaatgagtttggagaagtagacattgatggctcactagtcgctgcacaaaccgctggagctgaggacataatgatgctaaataacggctgcctttgttgcactgtgcgtggtgatttagtccgtatgattggtgaattggtgaacaagaagaaggggaggtttgatcatattgttattgaaaccacaggtctagcgaatccagcacccattatacaaacattctatgcagaggatgtagtttttaatgatgtcaagctggacggtgttgttactttagttgacgcaaagcatgctagacagcatttggatgaagtaaagcccaagggtatagtcaatgaagcagttcagcaaattgcctatgctgacagaattatagttaacaagattgatcttgtcaaagaacctgaagtgttgtccttggttgagcgtataaggggtatcaaccacatggctaatttgaagcgagctgagtatggtaaagttgatttggactatgttcttggaattggaggatttgatctggagaggattgagagtgctgttgctgaaaagtcacatgaagatcacgcagagcatgatcatgaacaccatgagcatgagaatgaacacgaccatgaccatcatcaccatcatgatcatgatcatgatcatcatgcacatgaccacactcatgatcctggtgtttcttctgtgagcattgtttgcgaaggggagatggatcttgaaaaggctgacatgtggttggggaacctactgctggaacacagcgaggatatatacaggatgaaaggtctgctttctgtcagtggaatgccgcagcgatttgtctttcagggagtccatgacattttccagggatctcctgagagaatgtgggagccaaatgagccgcgcatcaacaagattgtcttcatcggcaggaacctcaataaagaagagctggataaggggttcaaggattgcctactgaagaaatagagtgatttcagaatagtcgggatatagatctccagttttggccttcttcgaatgtagtcagattcacatcaattcatatctgttggagtggattgaagacagtgaagcttgaactaaattctaccccaattcatccgacatatgtagattaaggtgaatccgacaacatctaaacaaggccttcatgattttgagttttgtggccgcagaacttatcctcgatatctgacatgacatgtaacgagagatgtatcgaatcgatagcattattgcaaccttgcatcctcacgaaatagtctatcatagttttattgcacggtgttgcaatgtaaccaatagagattattataggatgtctttgtctctgtgatacgaggaaatcatattgcatggtataatatactattgaatgtgttagcaatcaggagttgttta

SEQ ID NO: 129338 - DNA, 858 bp, Zea Mays
atctgatatggaattatgattgtatatgattgcagtgcatcgtatcagaatatcctaatagttgaatatttttttaatatttaaaaaaatttagcttttcgctggcataatacatgcttaccggtccgagatgttctggatgcaatttcgatattccgatctggattggcagatcgcagttgggccggcccgacaaaacgacttaatagacctattcagtaagcccaaagagccagaccctgcgtttccttacttcctggtaaagaaagaagcgaagccaggtacttgttgttgagcgcggagagaggagaggcgcagagcatcgacgatggcgagcggcagcatgaagagggagatcagcgagacccacgacaccctccgcttcggcctcaatgccggcgtcaaggccgacctcgcgccgccgcacccgctccagtccagcatccaatcggaggccaagttctgggcggacaagaagaagtttgggacagaggccatctacggatccgccttgaacatccgcaaggatctcgatgcccaaatcctctcaaggtactaaacttcccccttttgcggttcttacaggaaaaataaaatttacttccatcaattcgttcgaatttcgagccaggagtagctagtggttgatgttagtatacctatgctatacatatggataagcctctgaatcatgaaattttgtcaaatgtttatatcgtttttgtcgtgctgtaaggatgatgaatcagttgtgtatctgcagaatcgccatttttactgataagattctttacacagtttcagcatttggcggtaaagttgttagccattttcatacctgcaatctgaaatggcctt

SEQ ID NO: 129339 - DNA, 1234 bp, Zea Mays
atctgatatggaattatgattgtatatgattgcagtgcatcgtatcagaatatcctaatagttgaatatttttttaatatttaaaaaaatttagcttttcgctggcataatacatgcttaccggtccgagatgttctggatgcaatttcgatattccgatctggattggcagatcgcagttgggccggcccgacaaaacgacttaatagacctattcagtaagcccaaagagccagaccctgcgtttccttacttcctggtaaagaaagaagcgaagccaggtacttgttgttgagcgcggagagaggagaggcgcagagcatcgacgatggcgagcggcagcatgaagagggagatcagcgagacccacgacaccctccgcttcggcctcaatgccggcgtcaaggccgacctcgcgccgccgcacccgctccagtccagcatccaatcggaggccaagttctgggcggacaagaagaagtttgggacagaggccatctacggatccgccttgaacatccgcaaggatctcgatgcccaaatcctctcaaggttccaaaggccccctggtgctttgccatcatctctgcttggatatgaggcactgacaggttccctagatgattttggttttgaagattatcttaacatgcctcaagattctgaaggtttccgtcaacctgacatgcaccacggaatggaggttcgccttggtttgtccaagggacctatctgccctagcttcagttgaggcagtgaatgtagttctgcggttctgccgcacgttgatgcaccttagtccagtacactcgggtcaataaaagaccacattaggatggtgaaacggtgaaaactgatggcttgcatatgttcagagtgttatgttgtaatgaacagtgttatgttgtaatgaacgcatatatcgcatgattgatagcttggctagctgtgcgcaggcttagtggaagcattgactggggtgcaggtcggcgcgagcccggctcttatgggtgtaggaaccaatcacgccgattgtgaagcatcgcagttgagcttcaggatctctgcagctgcaggtggcttcttccgtactcgaattagaggtggctgtgaattgcaatccttttgttatttttctctaacttgtacggaggaaagcaatccataggaatttttaaagaaaattgatgagattaaatcctgtgtttcgaaatttctgtaggaatgaatcttt

SEQ ID NO: 129340 - DNA, 111 bp, Zea Mays
gttttaagattcaaaataaatgcacagtcaaaaactccaatatgagttcaaaagtaaaattttagttatttatttattatccctttttagcatatgttctcaacatacaag

SEQ ID NO: 129341 - DNA, 178 bp, Zea Mays
ctcatgatccttttgagaatctagctgcggtgagaatttagttacgaagtggttcctaatgcgagagcgtattggtgaagtggttcctgatgcaagagtcgaagttactcaaggactggtaccgacatcaatggaaggaatgaagtggtgactggacaatatttatttctaagaaact

SEQ ID NO: 129342 - DNA, 2288 bp, Zea Mays
gcctgcttcagctccctccctggcctctccctctcgttgccataaaagattccaagcttgcccggcccgccgatcctactgccattaaagtcggcaagcggcgtcggcggcagcagcctgaaaccaggggaaaccgaaccaccacggtcaactatctatctatctgcaatctccatccatctcctcccacacccactgaccaaccacagcacagcagcctcaagatgctttacatggtgtagccggcaagaaccttccctcccgggcgcaaaggggctctctctcctttaatttccttcaagaggggatagatagcccctctttcccccacctgcatcttccctccggttgcgcgctgtccctcttgttggttcttggcatcgatcgtcggttttcgcgccgcctgcggaaatggcggcggggctgctgctcaagatggtcggcttctgcttctgggcgctcttctggctcgccggctccgccaccgtgagcacgaccacccccgccctcgccggcggcggcgaggcggtggtcgtggacgcccggtcagccatcgccgtcacggacgacgacttcgtctgcgccacattggactggtggccgccggagaaatgcgactacggcacctgcagctggggcctcgcctccctcctcaacctgaatctctctaacaaaatcctggtgaatgccgtcaaagcgttctctcctctgaagctccggctgggcggctctctgcaagacatgctgatatacggcaccggcgacactcgccagcaggcgccctgcgccccgtttgtgaagaacgcgtcagccatgttcggtttctcgcagggctgcctgccgctgcgtagatgggacgagctcaacgcgttcttccagaaaaccgggccaaggatcgtttttgggctgaatgcgctgaatggccgggtcccgatgcctgatggttctttaggggggccgtggaattacacgaacgcagcttctttcattcgctacaccgtgagcaagggatacgatgtacatggatgggagctcggaaatgagctcagtggcagcggagtcggggctcgaatcgacgcggaccagtacgcagcagacgtgatcgctctgaaacacatcgtcgacagcgcctaccaaggcaagccatcgaagcctctcgtgcttgcgccaggaggcttcttcgacgcaacctggttcaccgaactcgtcagcaagacaaagcccgaccagatggacgcgatcacgcaccatatctacaatctaggccccggggttgacgaccatctggttcagaaaatccttgacccttcttacctcgacggcgaggcgagcacgttcagcaaccttcaggggatactcaagtccgcaggcacgtccgctgtcgcctgggttggcgaggctggaggcgcgtacaacagtggccaccaccttgtcactgatgcgtttgtgttcagcttctggtatctggatcagcttgggatgtcgtcgaagtacgacacgaagagctactgcagacagaccttggttggaggcaactatggcctgctcaacacaagtacatttgaaccaaaccctgactattacagtgctttgctgtggcaccgcctcatgggcaccaaggtcctctcgacggcattcaacggcacgaacaagatccgtggctacgcacactgcgcgaaaaactcggaagggatcactctgctcctgatcaacctggacggcagcagcacgaaccgcatctacgtgacgagccaaggcgcgcacgcccagagcggaaggaagaaggggagcgaagggctcggcgaagcagcagcagccgcgctcacgagacaggagtaccatctgactcccaaggacgggaacctgcagagccagcaggtgctgctgaacggcaacgccctggcaaccgacgccgacggggagatcccggagctggagcccgtgcaggtggaggggacgcagcccataaccgtgggcccttactccatcgtgtttgctcacgtccccagcttctacgctcctgcgtgcctgtagctagagttttcgtctggattttttttttccagcctttctcggtgtgcatctcgtaggttaggtaagtctgtccggggtgaacggcgaagcttgttcatctctgctcatagtccgtgaagtgtgtaagctgcgaggctggaaggtttgtggtttatgattgtttgggaaaggagtggtcagatatataatgtgtgagcaaaagaaggaaggaagctggaaatgagataataaaagaaagggtttggagtttattt

SEQ ID NO: 129343 - DNA, 405 bp, Zea Mays
atggcgggtatctcagagatggagcaacatctggtagagaagttcgacgccaccatcaaactgttggcagatactacgctcaaagaactttcagagaagttgactcgattggatgatgtctccaccaagttgatcgacatcgagaagaaacaagatgaacacgacaaatccatgagttgcattcaggccaagttcgacatctcaatgaagttgttggcgtacatgcagcaagagcagaccaaactgtcagaggaagctaaggatgggggtgttattctgtctgatgagatcttagactcattagagactgagaaaagcagtcaagcattcttgtcattgcatgccatgactggttcagaatcttccaaagtcatcagactgagagctctaattcagaaccaaacg

SEQ ID NO: 129344 - DNA, 2190 bp, Zea Mays
caaatgcttttatccccgggaaaaacaagcaagtcaagcaacaaacaacagcgcaggcgagcatccgagcaccacccgcctcccaattccagttgtcttccttccccgtccccggacgtgccagctcagctcgaggccccgcctcctccgccgttctctccgatccccaattttaaacgcccccccttctctctcctgcccactcgcctccctcccggtcccggtcccggcctcccccctccccctccgctccccccaaccccagaacatccggcgctttcaccccccttcccctcccctcccctcgtcctccgcgatggcggcgtccatggcgtcgccgcgggggcggtcgatccgggagacggtgctggagaccgtggcggcgtaccaccagcagcagcgggccaaggggaagctgcgcaagagcctcacctacgccggaggcgagctctcgtccgcgggccgggcccgcggggacggccccgcctccacctccgtctcctcgctctgcgggcccgacgacgacgacgagcccttctgggaggaggaggagggcaccgtcgagctcgtccagctcggggccaaccgcgctaagaacgtcctcatcctcatgagcgacaccggcggaggccaccgcgcctccgccgaggccatcaaggacgccttccgcatcgagtttggcgacgagtaccgggtcttcgtcaaggatctgtgcaaggaccacgccggctggccgctcaacaacatggagagctcctacaagttcatggtcaagcacgtgcagctctggaaggtggcattccacagcacctcgcctagatgggtccataacttctacctcgccgctctcgcctcattctacgccaagaaggtggaggctggactgaagaagtacaagccagacatcataattagtgtccatcccctcatgcaacacattcctctgtgggttctcaaatggcaaggcctacagaacagggtagtctttgtaactgtgatcacagacctcaacacatgccaccctacatggtttcatgctgatgtgaatagatgttactgcccttcagaagaagttgccaagcgggcagcactggatgatctacaaccatctcaaatccgcgtgttcggtcttccgattcgaccatctttctgccgtgcagttcttgttaaggatgatttgaggagggaacttgaattggatcctgagcttcctgcagtactgctcatgggaggtggagagggcatgggtcctgtcaaaaagactgccagagccctaggagaatcattgtttgacaaagagcttggaaaaccaattgggcagcttattgtcatttgtggccggaacaaaacgctaagctcctcactgcaggcagttgaatggaaaataccagtaaaggttaggggatttgaaacccaaatggagaagtggatgggagcttgtgattgcattataacaaaggctggaccaggtaccattgctgaagccttgataaggggtcttcctataatccttaatgacttcatacctggacaggaagttggcaacgtaccttatgttgtggacaatggtgcaggtgtgttctcgaaaagccccaaggaaactgctagtcttgttgcccgctggtttggtccagattcagaggaattgaaaaaaatgtcagaaaaggcactgaaattggcccaaccagaagctgtctttgacattgtcaaagacatgcatgagctctcccaggagcaaggtgtcatatcacagatatctagttccttgacttcatccttcttcttaccatcgcctgaaagcacccctctccaacttatctgaaaccatcaagctaggattgatattgttgacatcgtgaacttggcattgtccctacagtgtgggcgtgctttcggctgatccgctcacatggtagttatgggcagggtcgtttgactgacaggttctcgcgtgtgatgatgtttgccttcatgttaacttttgtaaaaaaaacattcattcatattatgtttctggctcccttcgtcatcaaaggggaattggtggtggtggtggcttgtaaaatacactcaaattttgtgcatggacatgtcagacccttatcatgtatactagctgatgtgatccgttcatgtaagtggaagatgtgtataatatgattacagattgttggagtggaaatttatctc

SEQ ID NO: 129345 - DNA, 1440 bp, Zea Mays
ggcgcaccggtcaaacaggctcaggaggaggttctctcttgtcctacctcttcgctcccggctcccctccatctctttcgccacacgcgcgagaggggggagaggaaacagctagcagcgagcgaggaacgaagagggtgcttcgcacgtgcatgtgagatcgggcgatcccgatcgtcggccggcgcgaactaacgacgacgtacgtgcgaccgggccgggcgttgtaggacggcgcgcgcgatgggcaagatcgagtacggcgtggtggcgcgcggcgcggtggtgctggcggagcactacggcgcggcggcggcgggcggcaacgcgggcgccgtggcgcggcaggtcctggagcgcctccctggcggcggcgacgacgactgcaacgtgtcgtacacgcaggacctccacgtgttccacgtcaagcgcaccgacggcctcacggcgctctgcatggccgacgacgccgccgggcggcgtgtccccttcgcgttcctggaggacatccacgggaggttcgtcaaggcgtacggccgcgcggcgctcaccgcgctggcgtacgccatgaacgacgagttctcccgcgttctggcccagcagatggactactactccaacgacgccagcgcggacaggataaatcgcatgaggggagagatggaccaggtccggagcgtgatgatggacaacatcgacagggtgctggagaggggtgaccgtctggaggtgctggtggacaagacggcaaccatgcaggggaacacgatgcgcttcaagcgccaagctcgccgcttcaggaacaccatgtggtggaggaacgtcaagctcacagctgcagtgatattcatcctcaccgtaattgtgtacgtcctgctcgcctacatgtgtcgcggcttcaccataccgtcatgctttccgtaatctccatccgtcccggtgccagtgcggaccaccagccctagctctagctgcatcacaacttggttttccgggttctgtaacagcagcagcggtgctgcagttctttctctcttgtacgagggaaacaacagctcattctgaagttctgcaacaaccagatctgattttttttttaaaaaaaagatggtagtcaaatgggaaagctttcccacctgattttttatcattaaacacacgaacttctgaaaacagagcaaatgtgcagtcgtggaaggccgagctcctctccgtgaggagaaagaaaccaatacggcaggcagacttggttaatatttcataaatgatactctcatacggagtaagactcaaaagcaacagcttgcttatagtacaaatagtaagttagcctgcccagacaatggcagtgtcacaaacaactgaatgatcaccaagtacggggcgttccccccttagggcttgttcggttatttccaatccatatggattgaaggggat

SEQ ID NO: 129346 - DNA, 1613 bp, Zea Mays
ggcgcaccggtcaaacaggctcaggaggaggttctctcttgtcctacctcttcgctcccggctcccctccatctctttcgccacacgcgcgagaggggggagaggaaacagctagcagcgagcgaggaacgaagagggtgcttcgcacgtgcatgtgagatcgggcgatcccgatcgtcggccggcgcgaactaacgacgacgtacgtgcgaccgggccgggcgttgtaggacggcgcgcgcgatgggcaagatcgagtacggcgtggtggcgcgcggcgcggtggtgctggcggagcactacggcgcggcggcggcgggcggcaacgcgggcgccgtggcgcggcaggtcctggagcgcctccctggcggcggcgacgacgactgcaacgtgtcgtacacgcaggacctccacgtgttccacgtcaagcgcaccgacggcctcacggcgctctgcatggccgacgacgccgccgggcggcgtgtccccttcgcgttcctggaggacatccacgggaggttcgtcaaggcgtacggccgcgcggcgctcaccgcgctggcgtacgccatgaacgacgagttctcccgcgttctggcccagcagatggactactactccaacgacgccagcgcggacaggataaatcgcatgaggggagagatggaccaggtccggagcgtgatgatggacaacatcgacagggtgctggagaggggtgaccgtctggaggtgctggtggacaagacggcaaccatgcaggggaacacgatgcgcttcaagcgccaagctcgccgcttcaggaacaccatgtggtggaggaacgtcaagctcacagctgcagtgatattcatcctcaccgtaattgtgtacgtcctgctcgcctacatgtgtcgcggcttcaccataccgtcatgctttccgtaatctccatccgtcccggtgccagtgcggaccaccagccctagctctagctgcatcacaacttggttttccgggttctgtaacagcagcagcggtgctgcagttctttctctcttgtacgagggaaacaacagctcattctgaagttctgcaacaaccagatctgattttttttttaaaaaaaagatggtagtcaaatgggaaagctttcccacctgattttttatcattaaacacacgaacttctgaaaacagagcaaatgtgcagtcgtggaaggccgagctcctctccgtgaggagaaagaaaccaatacggcaggcagacttggttaatatttcataaatgatactctcatacggagtaagactcaaaagcaacagcttgcttatagtacaaatagtaagttagcctgcccagacaatggcagtgtcacaaacaactgaatgatcaccaagtacggggcgttccccccttacgcgtagtaattcaagctggacttcttctttgcctgcacttggatgatcccctcgttgaaatcctcgtgggtaacctctgtagcatctcggcgtagagcgagcatgccagcctctacgcaaacagcctttagctgagcgccattgaaatcatcggttgaacgcgccaactcttcaaagttgacatctggattcacattcattttcctcgagtggat

SEQ ID NO: 129347 - DNA, 2054 bp, Zea Mays
atcaagcagcaggacaatttgaaacagaatagaccggcatttagactcaatcatgttaccagtttcaaaacaaaacgaacacagcacgacacaaacatgtttccaacattccagacaaactaaaaggatcaccaccacaggcaacttgatcaactaaacgatgcatatatcctacttaacagtattgcagtaacatcgatacagataatagcataagtcttcagcaagttgccatcagtgaggaaactagtggggaataaaacacaaagccatagctagatctacttctccgatgagttggggccgcgcttcttgccgaatccaacaacggcggtgacgaagcggcggttgtattgcatgcgcttgtgagcgcggccgcggggcttcttcttcttgtcctgctttgcaaccttgggcgtctgcccgcgcaccttcccagcgcgggccagcgatccgtgaaccttacctgcgccagaagcagatagatcaatctgagtaaacggctattggaaggatgcacgcaaagtagagatagagacgaggacaaggatatcgttacccatggcggcggcggcgaaggtgctgtgttgctggaggatctgacgagcgactcgggatgttgcggcggcggggctgtccgaacggtgccctagacgggtgggagaatttataaacgccacgctttactgggccggctgttttgaggcacatgcacatgtaaaatgcccaggccccgctaacagcccagtaactactaactagccatatccgcgagagaaacccctcgatagcccgcagcattgcggcgcgcgagcacaccgaaccacccacctcggcggcggcggcggcttttctgcctgcgaagagagaaaccaaggagaggggcaactcggaagagggcgaggatgcctcggccggagttccaggcgccgccggatgtgttctacaacgagtcggaggcccgcaagtacaccacctcctcccgtatcatcgaaatccagtctaggatttccgagagggcgctggagttgcttgctctccccaacgatggcgtccccaagctacttctcgacataggatgtggttctggacttagtggtgagacattgacggagcatggccaccactggattggctacgatatttcaaagtctatgctcgatgttgccttggagcgtgaaacggaaggagacctcctacttgcagatatggggcagggcttgggcttgcggccaggagttattgatggtgcaattagtatttcagcaattcagtggttatgcaatgctgacaagtcttctcacgatccaagattgcggttaaaggctttcttcggttcattatatagatgcctagcaaggggagcaagagctgttctacagttttatgctgataatgtgaagcagagtgaaatgattgtgacttttgccatgcgtgctggttttgctggtggagtggttgttgactggcctcatagttcaaaagcgaagaagtcctaccttgtcctcacttgtggaccaccttcagttactacatcacttccaaagggtaaaggtgaaaatggtgaggggtgcagcgacgatgacgataatgagagcagtggcgaagatggtgacagaacagtgggaatatatgaaaggaataggccgaagaagcggcagaaaacgaaaaagaatggcaaaggcaaggattggctcctgaggaaaaaggagcagatgagaagaagaggacatgatgtgcccgccgacacgaagtacaccgggcgtaagcggaaaggctatttctagctctgtgcaatgcccccttgcctgcaatgctggctgttcagttatgatgctagttcatttagcagaagcagaaggatttttgtaaagggtgaagcgaggagttgtactggtattcgggagtcattgcatttttagacaacgatgtgaaactgtcatttttgtagaacgtggatgttgagatgaatacagttggtttgcgtgaatctgtatcagatcgctggtgacgcccagactttggctaaaagaaacgcagttcatgtgtcaagt

SEQ ID NO: 129348 - DNA, 796 bp, Zea Mays
accgccaggcgccagcagccatcgcatccgaatcccaagctttctcccctccgtgcaggtgcaggtgcagcagccagcgcgcgcgtctctacaggaaacagagagcatccgagtccccaagctcgcagctttgccagcaaagcaagaagacagttgcggcatggagctggagcttgggctggcgccgccgagcgcgcgccgtcccacccccatgacgatcgaccagcagcagcagcagcaacgccacctcgccgaggacgagctgagcagcacctcgtcggaccaccacccttgcgctgcgcgctccgggaagagagggttcgcggaagcgttccaggagacggcggccgcggcgacgacgacgacgctgccgctcttcgacgacggctcgtcgtgcggcgggagaagcggcggcggaaagaggccgctggtcgggtggccgcccttgagctccgcgcgcagcagggcgtgcggcggcggcgccgccaagtacgtgaaggtgaagaaggaaggcgacgccatcggcaggaaagtggacctgtcgctccacgcctcctacgacgagctcctcgccacgctcgcccgcatgttcccgaccaacaacggcagccaagacgacaaggaaatcagcagcaagtccaccgccgccgccaccaccaccaccagccatagggacgtggtggtcacctacgaggacggagagggggactggatgctgctcggagatgtgccgtgggagtaagttcgctacgaccaatgatgcacacatgtggtgttccatcttatccttccgaat

SEQ ID NO: 129349 - DNA, 1035 bp, Zea Mays
accgccaggcgccagcagccatcgcatccgaatcccaagctttctcccctccgtgcaggtgcaggtgcagcagccagcgcgcgcgtctctacaggaaacagagagcatccgagtccccaagctcgcagctttgccagcaaagcaagaagacagttgcggcatggagctggagcttgggctggcgccgccgagcgcgcgccgtcccacccccatgacgatcgaccagcagcagcagcagcaacgccacctcgccgaggacgagctgagcagcacctcgtcggaccaccacccttgcgctgcgcgctccgggaagagagggttcgcggaagcgttccaggagacggcggccgcggcgacgacgacgacgctgccgctcttcgacgacggctcgtcgtgcggcgggagaagcggcggcggaaagaggccgctggtcgggtggccgcccttgagctccgcgcgcagcagggcgtgcggcggcggcgccgccaagtacgtgaaggtgaagaaggaaggcgacgccatcggcaggaaagtggacctgtcgctccacgcctcctacgacgagctcctcgccacgctcgcccgcatgttcccgaccaacaacggcagccaagacgacaaggaaatcagcagcaagtccaccgccgccgccaccaccaccaccagccatagggacgtggtggtcacctacgaggacggagagggggactggatgctgctcggagatgtgccgtgggatgattttgcaaggtccgtcaaacggctcaagctactgggatgattggagtactgatactacatgttcttaattggagtataagcttcttttttgctgatgttttttaagagcacttggtgttaagaatcaaggcaatagtttggtggtgtacctgggccgggttacctcttgtgacaatacttatacgaacaggttttctggtcttttgcatgtgagaacgtttatcttggagatttgccgatgtgtttttgcgcagtttatgctgcaactacaatacaatacatgttcattaattc

SEQ ID NO: 129350 - DNA, 1447 bp, Zea Mays
gaaatttctccctcccttttacgctccgcttcccccaaacgactccctattaatcccccacgttccccttccctttctctcccgccgccgcacgcccctctcaaacctccgcgctcccgcccagctagggtttccccgatctcccctccttctcaaccgccgccgtcgccgagagcgccgccacgatgttggagctgcggcttgtgcaggggagcctcctcaagaaggtcctggaggcgatccgcgagctggtcaacgacgccaacttcgactgctccggcaccgggttctcgctgcaggccatggactcgagccacgtcgccctcgtcgcgctgctcctacgcgccgaggggttcgagcactaccgctgcgaccgcaacctctccatgggcatgaacctcaacaacatggccaagatgctccggtgcgccggtaacgacgacatcatcaccataaaggccgatgacggttccgacaccgtcaccttcatgttcgagtcgcccaagcaagataagattgcggatttcgagatgaaactgatggatattgatagcgagcacctcggaatcccggattccgagtaccaggccatcgtccgcatgccttcttctgagtttatgaggatctgcaaggatcttagcagcatcggagacactgtcgttatctcggtaaccaaggagggcgtgaagttctccacatctggagaaattgggagtgcgaacattgtttgcaggcagaaccaaactattgacaagccagaagaggctaccattatagagatgcaagagccggtttccctgacttttgccctaaggtacatgaactcgttcacgaaggcgtcttcactgtccgaacaagtcacgatcagcctgtcgtccgagctaccagtggtggtcgagtataagatcgctgagatgggttacattagattttacctggcgccaaagattgaggacgatgaggagatgaagccatgattgccatcagtgctcatgctgccgacttttcgtcgtcttccatccatggtttgcttattagctattgtttgcactcaaagggaaaaaaggatgttatgttttatctcttaggccagactgctttagctacttatttgtgactgctgtgtgtccatggatttatagtgaatctagattagtgggcttgtgctttgtgcatgccgctgctgtctgcccataagctacttatttctattcagacatgaaattctttgttgggaacttgataagctgcatgataagaagccctttttaagtattgactagttagatattcttttggttatgtgatgtgaagttagaaccagcaactaagttctgtagacaattttacttttttttttgcataaagtgaaaagagtgatgtataagagtatctcgactagctaaataacttgccaaaccaaattttgactactcaatagtaaaat

SEQ ID NO: 129351 - DNA, 876 bp, Zea Mays
ctaattgcaattggtaccataagagcaaggatctttagtacctgtactaaacgaaacatctcaacattactgagatgttctaaatttattattggatgcttcattgtaccattctgaaaaagatactctagcatatgaaatatggccggactggctaaaatggacactgttttgatgaatgcagccagaagaggctaccattatagagatgcaagagccggtttccctgacttttgccctaaggtacatgaactcgttcacgaaggcgtcttcactgtccgaacaagtcacgatcagcctgtcgtccgagctaccagtggtggtcgagtataagatcgctgagatgggttacattagattttacctggcgccaaagattgaggacgatgaggagatgaagccatgattgccatcagtgctcatgctgccgacttttcgtcgtcttccatccatggtttgcttattagctattgtttgcactcaaagggaaaaaaggatgttatgttttatctcttaggccagactgctttagctacttatttgtgactgctgtgtgtccatggatttatagtgaatctagattagtgggcttgtgctttgtgcatgccgctgctgtctgcccataagctacttatttctattcagacatgaaattctttgttgggaacttgataagctgcatgataagaagccctttttaagtattgactagttagatattcttttggttatgtgatgtgaagttagaaccagcaactaagttctgtagacaattttacttttttttttgcataaagtgaaaagagtgatgtataagagtatctcgactagctaaataacttgccaaaccaaattttgactactcaatagtaaaat

SEQ ID NO: 129352 - DNA, 1524 bp, Zea Mays
ataagcagcaagcagctcgtgcctggttagtttagagagccatgggctccctgtactgcgacgtcgccccctcgccgtcgccgtccttctccagcaccggaagcagcaacggcaatgccatcgccggcggcgtcagtatatacgcgtgcttcgccctcggcagctccaacagcctggagtgctacgagcctggcgccaacacgtggcgccgcgtgggcgcgctcccgggcgtccccgacggccacatactgaaggggttcgccgtggcggcgctgggcgagtccgtgtacgtcatcggcggccggctctgccggagggagcgtggcgccgcggccggcgagtgccaggacaccgacgtcgccgtgcgggcggacgtgctgcggtacgacgcgcgccggggcgagtggcaccactgcgcgccgctcctggtcccgcggttcgacttcgcgtgcgcgccgtgccggggccggatctgcgtggccggcgggcagtgctcgctgtccggcgcccggggcacggcggcggccgaggtgtacgacgcggagaaggggcagtggtcggcgctccccgacatgagcacgctgcgctacaggtgcgtcggcgtcacgtggcagggcagcttccacgtcgtggggggcttcgcggagaccacgctgacggccgccagcagcgacgccagcgtcgccaccaccgtgctgcagtcgtcggcgctggagcggagctcggccgaggtgttccactgcgccaggggcacgtgggagatcctcccggggatgtggcagctcgacgtgcccccgaaccagatcgtggcggtggccgacaggctgttcagctccggcgactgcctcaactgctggaagggacacgtcgaggtctacgacggcgagctcaacatctggagcatcatggaccactccgccctgcccgacctgtcgctgctcgccagcctcccatcttcagcccagcggctctacctcaccatggccgccgtcggcacgcagctctacttcctcgccgggtaccaggtgccgtcggccgatgacagcttcagaacagtctcgctggtgcacagcttcgacaccggcgctgcaccggggctggtgccggcgtggaggagcttccggcccgagatgagtcaggaggacgccgaggtcggcggcaaggagctcttcagccagtgctgctcggtgcagctctccagctgatcacatttacagtctcagtcctccaatccaatccaatcacagcatatgcatcatggtcctgaacttttctgatcagagcatcatgcattgcgtctcgtctacagacttgctatcaatctcgtacttgtgctcctgcggtgaatctgtttgatccatacaacacaatctgcatgagaagatgtgccctgtcttctttacttctttctgatctgaaatggactggtaattcatatgtaggaagccatttataataataaacgctagtttggcaacccggatttctattttcaaaaaaaaacatgaactgattttccttgat

SEQ ID NO: 129353 - DNA, 1330 bp, Zea Mays
attaaatctcattcaatccactaggattgagagcaaatatagggtggggcaagcaaggcaggcggagcgggcaagggcaagcgagggatgagaatgagggccgtggtgatcacgtgcgccggcgggccggaggtgctggaggcgcgggaggtggaggaccatcccgcgctaggcgaaggagaggtgctcctcgaggtcgccgccgcgggcgtcaatcgcgcggacaccgtgcagcggatgggccggtacccgccgcctgccggcgcgtccccttacccggggctcgagtgctccggcaccatcctcgcgctcggccccaacgtcccctcccgctgggccgtgggcgataaggtttgcgcgctcctcagcggcggcgggtacgcggataaggtggtggcgccggcggggcagctgctgccgatacccgagggggtgtcgctgacgcacgcagccggcttgcccgaggtggcctgcaccgtctggtcaaccgtattcatgaccagtcacctctcccccggtgaatcattccttatccatggaggatccagtggaattggtacattcgctatacagattgctaagcacctcggaattaaggtttttgtcactgcaggaagtgaagaaaaactagcagcctgcaaagctttgggtgccgatgtatgcattaactacagaactgaagacttcgttgaacgtatcaaacaggaaaccaacggaaagggtgttgatgtgattctggataacattggaggatcatatctccagcgcaacctgaatagcttaggtgttgatggtagacttttcatcattggcttccaagggggcatagcagctgaagtgaacctgcaagctgtgcttgcacgccgtttgaccatacaagctgctggactgcgcaacagaagccttgctaataaggcagagattgttagtgaggtggaaaagaacgtgtggcctgctgtcgctgctggcaaagtgaagccggtgatttacaagacgtttccgttatgtgaagctgctgaggctcataggttgatggaagctagcacccacatcggcaagatactgctgctcccatgactgcacctgtggcgtttgcgctcttgctctcggaggagtcagttcaaaaacatatgcaattcctgagactgtgacaacctgcacggatgttgtactggtgtcgcatgtcttttttatatatatcttgtagtactagattggatcttttaccccgagaaattatcttgtcaattggatccttaaagtgctgatgacatttttctgtgagctatgatataataaatctggcagatagagccactacagcacgtca

SEQ ID NO: 129354 - DNA, 1431 bp, Zea Mays
attaaatctcattcaatccactaggattgagagcaaatatagggtggggcaagcaaggcaggcggagcgggcaagggcaagcgagggatgagaatgagggccgtggtgatcacgtgcgccggcgggccggaggtgctggaggcgcgggaggtggaggaccatcccgcgctaggcgaaggagaggtgctcctcgaggtcgccgccgcgggcgtcaatcgcgcggacaccgtgcagcggatgggccggtacccgccgcctgccggcgcgtccccttacccggggctcgagtgctccggcaccatcctcgcgctcggccccaacgtcccctcccgctgggccgtgggcgataaggtttgcgcgctcctcagcggcggcgggtacgcggataaggtggtggcgccggcggggcagctgctgccgatacccgagggggtgtcgctgacgcacgcagccggcttgcccgaggtggcctgcaccgtctggtcaaccgtattcatgaccagtcacctctcccccggtgaatcattccttatccatggaggatccagtggaattggtacattcgctatacagattgctaagcacctcggaattaaggtttttgtcactgcaggaagtgaagaaaaactagcagcctgcaaagctttgggtgccgatgtatgcattaactacagaactgaagacttcgttgaacgtatcaaacaggaaaccaacggaaagggaactacttcgatgctctcttttttggcagctagtatgtatcgagcattatcatcaaatagcgcaacatccctgactgtaatctgaaactcactaccaggtgttgatgtgattctggataacattggaggatcatatctccagcgcaacctgaatagcttaggtgttgatggtagacttttcatcattggcttccaagggggcatagcagctgaagtgaacctgcaagctgtgcttgcacgccgtttgaccatacaagctgctggactgcgcaacagaagccttgctaataaggcagagattgttagtgaggtggaaaagaacgtgtggcctgctgtcgctgctggcaaagtgaagccggtgatttacaagacgtttccgttatgtgaagctgctgaggctcataggttgatggaagctagcacccacatcggcaagatactgctgctcccatgactgcacctgtggcgtttgcgctcttgctctcggaggagtcagttcaaaaacatatgcaattcctgagactgtgacaacctgcacggatgttgtactggtgtcgcatgtcttttttatatatatcttgtagtactagattggatcttttaccccgagaaattatcttgtcaattggatccttaaagtgctgatgacatttttctgtgagctatgatataataaatctggcagatagagccactacagcacgtcagt

SEQ ID NO: 129355 - DNA, 1420 bp, Zea Mays
taaatctcattcaatccactaggattgagagcaaatatagggtggggcaagcaaggcaggcggagcgggcaagggcaagcgagggatgagaatgagggccgtggtgatcacgtgcgccggcgggccggaggtgctggaggcgcgggaggtggaggaccatcccgcgctaggcgaaggagaggtgctcctcgaggtcgccgccgcgggcgtcaatcgcgcggacaccgtgcagcggatgggccggtacccgccgcctgccggcgcgtccccttacccggggctcgagtgctccggcaccatcctcgcgctcggccccaacgtcccctcccgctgggccgtgggcgataaggtgaaactgagtccaccacctgccacctacggtggattgattggggtttgctgctgatgttccggttgttggttccgtgcttttgcttcacaggtttgcgcgctcctcagcggcggcgggtacgcggataaggtggtggcgccggcggggcagctgctgccgatacccgagggggtgtcgctgacgcacgcagccggcttgcccgaggtggcctgcaccgtctggtcaaccgtattcatgaccagtcacctctcccccggtgaatcattccttatccatggaggatccagtggaattggtacattcgctatacagattgctaagcacctcggaattaaggtttttgtcactgcaggaagtgaagaaaaactagcagcctgcaaagctttgggtgccgatgtatgcattaactacagaactgaagacttcgttgaacgtatcaaacaggaaaccaacggaaagggtgttgatgtgattctggataacattggaggatcatatctccagcgcaacctgaatagcttaggtgttgatggtagacttttcatcattggcttccaagggggcatagcagctgaagtgaacctgcaagctgtgcttgcacgccgtttgaccatacaagctgctggactgcgcaacagaagccttgctaataaggcagagattgttagtgaggtggaaaagaacgtgtggcctgctgtcgctgctggcaaagtgaagccggtgatttacaagacgtttccgttatgtgaagctgctgaggctcataggttgatggaagctagcacccacatcggcaagatactgctgctcccatgactgcacctgtggcgtttgcgctcttgctctcggaggagtcagttcaaaaacatatgcaattcctgagactgtgacaacctgcacggatgttgtactggtgtcgcatgtcttttttatatatatcttgtagtactagattggatcttttaccccgagaaattatcttgtcaattggatccttaaagtgctgatgacatttttctgtgagctatgatataataaatctggcagatagagccactacagcacgtc

SEQ ID NO: 129356 - DNA, 97 bp, Zea Mays
aattcgccgtcgcggcggagcacacctagcacctggtccagcgcgacgccgccgccgcccgcgcctcctcgcgccccgctcccgcccgactggcgcg

SEQ ID NO: 129357 - DNA, 2636 bp, Zea Mays
gtccggaggaagaagggacaggaggagacacagacagagagagaggggcaggaattcaattccaccgacccacgcacctctaggtcaccccgctcccacccctttcctccatttacctccacctatatagctccccataattccccgggcctcccctctcttgttaggagtacacacttctccttagaattggagctgtacgagccacccagcaactttcttcatcatcttcttcagccctcgctctgtccgtcgacacagcagctttgcttgccaccaagctagccatgcaggaggagtaagagtacaaccgtaggagagagagagagagagagagagagagagagagctaacaccaccccgattccacccaccactgtccctagctagcttatttacaggcgttcgtgatcgccaacagcttctcgtcagaaagagtgcaacgggccggccgggcagaagaggtagctgggagctagagagaaaaaaaaaaggtgcaccgagcaacccaggccagggaggaagggaggagtgagccgtcagtcgaccgtttccggcgaactcacagcaggcagatggcaggcggcggattcgtggaggacatgatgagggagcagagcctgctggaggcgacgtgcggcgacctcttcgaccacatcgacgacctcctcgacttccccaacgaggactccgccgccgccgtgctcctcctggacgcgccggcgcccgggagcccgctgtcggcgcgcatcatcgacgtcggccgcgccggcaatgcgctcgccccgcctgctgcccccgcgcagcacgacgcttccgctagcgccttcttcgccgccgcggggaacgatgtgttcgacaccaaggacgtcgtcggcgcacacatcggctcgtgcgacgacattgacatggacatggcgcagctggagtggctgtcggggctcttcgacgacgcctccatcccgcacgagccggtgttccctggcgcgacggcgggcggcgcggcgcccatcatgaagagctccgcgctggcggccggcgcgctgctgccgcaggacaaaatggaggacgcgctgctgttccgcagctccagccccatctcggtgctggagcacggcagcggtggcagcggcagcgccagcgccaccggctccgcgtcctcgtcctcctcctcggcgtcgtcctcctcggagtccttctccgggagtgggagtgggagtggcggagggcatgtttggtcggcgccagtgtcgccgcgcccggcgccgccgccggcgctcgtcataccggcgcgcgcacggagcaagcgctcccgttcgtccgcgttcaccggagccgccgcgcgcgccggggcggagacgcccaccatcctcgtgccgacgcccatgtactcctccgggtcggcccactcggaccccgagagcatcgccgagtccagcccgcacccggcgccgcccatgaagaagaagaagaaggccaagaagcctgtggtccccgcgccagctgcctcttctgacgacaacgatggcgacgccgactacgaggaaggcggcgagcaaacggagccgcagggcggcgccgtcaggaggtgcacacattgccagatcgagaagacgccgcagtggcgcgcggggccgctggggcccaagacgctctgcaacgcctgcggcgtgcgctacaagtccggtcgtctgttcccggagtaccgccccgcggcgagccccaccttcgtgccgtccatccactccaactcgcacaagagggtggtggagatgcgccagaaggctgtccggagcggcgacccgtcgtgcgaccttctccatttcatccgccgccgggattgacgtcccggcatggcgtcgccggactgtcggtcggtctcgtcccccatatagctatatatgtatgcatgcatggttgcttcatcagtcgtcgtcgcccatcatggtcatcatcaccgcttcaccggtcaccgccatggatcgtctcccgcccatcatcacatgcattggtttgtgtcagcatccatccaatcccaatccatcgccgggcgtcccgacgttgttagttcattaggtcttttttttcctcatcgggggctagtgttattttacctttgatccttttgtctattggttaattggttccccctggatgttttttgtttgtatagagagtgaaaaagagagaagaaatagatgagtcagagtggttgctgcattgcaattgcagttgcttgcaagctaggtaggtgagaaggagagctaaaccagcagcagagggagacagatttagagaggaaactttgcagctagtcagtcagtcacttagaaaaaaaacaaggagagtgcttgaagcaggtgaaagggcaatttgttggtttgctaattagaagagaggttctgtcaggtcaggtcaggtagttgctatcattattcatgaggattttcaaacttaatagggggacagccatcatccatcatagtttgtatttggaacttggtatactgaactctgaaaattctttttgcagttcatctatgcttagggattgataagtgttgtctggtttcttctatattgatagtgctaccttttagccaataattagttatgtaagagttgctcttggtctt

SEQ ID NO: 129358 - DNA, 2247 bp, Zea Mays
cagacagagagagaggggcaggaattcaattccaccgacccacgcacctctaggtcaccccgctcccacccctttcctccatttacctccacctatatagctccccataattccccgggcctcccctctcttgttaggagtacacacttctccttagaattggagctgtacgagccacccagcaactttcttcatcatcttcttcagccctcgctctgtccgtcgacacagcagctttgcttgccaccaagctagccatgcaggaggagtaagagtacaaccgtaggagagagagagagagagagagagagagagagagctaacaccaccccgattccacccaccactgtccctagctagcttatttacaggcgttcgtgatcgccaacagcttctcgtcagaaagagtgcaacgggccggccgggcagaagaggtagctgggagctagagagaaaaaaaaaaggtgcaccgagcaacccaggccagggaggaagggaggagtgagccgtcagtcgaccgtttccggcgaactcacaggcagatggcaggcggcggattcgtggaggacatgatgagggagcagagcctgctggaggcgacgtgcggcgacctcttcgaccacatcgacgacctcctcgacttccccaacgaggactccgccgccgccgtgctcctcctggacgcgccggcgcccgggagcccgctgtcggcgcgcatcatcgacgtcggccgcgccggcaatgcgctcgccccgcctgctgcccccgcgcagcacgacgcttccgctagcgccttcttcgccgccgcggggaacgatgtgttcgacaccaaggacgtcgtcggcgcacacatcggctcgtgcgacgacattgacatggacatggcgcagctggagtggctgtcggggctcttcgacgacgcctccatcccgcacgagccggtgttccctggcgcgacggcgggcggcgcggcgcccatcatgaagagctccgcgctggcggccggcgcgctgctgccgcaggacaaaatggaggacgcgctgctgttccgcagctccagccccatctcggtgctggagcacggcagcggtggcagcggcagcgccagcgccaccggctccgcgtcctcgtcctcctcctcggcgtcgtcctcctcggagtccttctccgggagtgggagtgggagtggcggagggcatgtttggtcggcgccagtgtcgccgcgcccggcgccgccgccggcgctcgtcataccggcgcgcgcacggagcaagcgctcccgttcgtccgcgttcaccggagccgccgcgcgcgccggggcggagacgcccaccatcctcgtgccgacgcccatgtactcctccgggtcggcccactcggaccccgagagcatcgccgagtccagcccgcacccggcgccgcccatgaagaagaagaagaaggccaagaagcctgtggtccccgcgccagctgcctcttctgacgacaacgatggcgacgccgactacgaggaaggcggcgagcaaacggagccgcagggcggcgccgtcaggaggtgcacacattgccagatcgagaagacgccgcagtggcgcgcggggccgctggggcccaagacgctctgcaacgcctgcggcgtgcgctacaagtccggtcgtctgttcccggagtaccgccccgcggcgagccccaccttcgtgccgtccatccactccaactcgcacaagagggtggtggagatgcgccagaaggctgtccggagcggcgacccgtcgtgcgaccttctccatttcatccgccgccgggattgacgtcccggcatggcgtcgccggactgtcggtcggtctcgtcccccatatagctatatatgtatgcatgcatggttgcttcatcagtcgtcgtcgcccatcatggtcatcatcaccgcttcaccggtcaccgccatggatcgtctcccgcccatcatcacatgcattggtttgtgtcagcatccatccaatcccaatccatcgccgggcgtcccgacgttgttagttcattaggtcttttttttcctcatcgggggctagtgttattttacctttgatccttttgtctattggttaattggttccccctggatgttttttgtttgtatagagagtgaaaaagagagaagaaatagatgagtcagagtggttgctgcattgcaataaaaaaaacaaggagaaaaaaaataaactaatttcccttgaaaaaaataaaaa

SEQ ID NO: 129359 - DNA, 2344 bp, Zea Mays
agttgaaattgggggatatataaaatctccccctccgaccctcctgtcccgctcctcttctatttgttcgtttacagccccccagctcatcaaagatcacattttgagcactgctatataaacaaagttggcaggagtcgtagattagcaggccgcccgtctatttttttgttcatgttttgaaagtgaaggaggatttgggtgggcaacgtctacctctgccaaaaataatcggcgtccatatgcaggcgtcgtatctttggaataagtgaatagcaggcagatggcaggcggcggattcgtggaggacatgatgagggagcagagcctgctggaggcgacgtgcggcgacctcttcgaccacatcgacgacctcctcgacttccccaacgaggactccgccgccgccgtgctcctcctggacgcgccggcgcccgggagcccgctgtcggcgcgcatcatcgacgtcggccgcgccggcaatgcgctcgccccgcctgctgcccccgcgcagcacgacgcttccgctagcgccttcttcgccgccgcggggaacgatgtgttcgacaccaaggacgtcgtcggcgcacacatcggctcgtgcgacgacattgacatggacatggcgcagctggagtggctgtcggggctcttcgacgacgcctccatcccgcacgagccggtgttccctggcgcgacggcgggcggcgcggcgcccatcatgaagagctccgcgctggcggccggcgcgctgctgccgcaggacaaaatggaggacgcgctgctgttccgcagctccagccccatctcggtgctggagcacggcagcggtggcagcggcagcgccagcgccaccggctccgcgtcctcgtcctcctcctcggcgtcgtcctcctcggagtccttctccgggagtgggagtgggagtggcggagggcatgtttggtcggcgccagtgtcgccgcgcccggcgccgccgccggcgctcgtcataccggcgcgcgcacggagcaagcgctcccgttcgtccgcgttcaccggagccgccgcgcgcgccggggcggagacgcccaccatcctcgtgccgacgcccatgtactcctccgggtcggcccactcggaccccgagagcatcgccgagtccagcccgcacccggcgccgcccatgaagaagaagaagaaggccaagaagcctgtggtccccgcgccagctgcctcttctgacgacaacgatggcgacgccgactacgaggaaggcggcgagcaaacggagccgcagggcggcgccgtcaggaggtgcacacattgccagatcgagaagacgccgcagtggcgcgcggggccgctggggcccaagacgctctgcaacgcctgcggcgtgcgctacaagtccggtcgtctgttcccggagtaccgccccgcggcgagccccaccttcgtgccgtccatccactccaactcgcacaagagggtggtggagatgcgccagaaggctgtccggagcggcgacccgtcgtgcgaccttctccatttcatccgccgccgggattgacgtcccggcatggcgtcgccggactgtcggtcggtctcgtcccccatatagctatatatgtatgcatgcatggttgcttcatcagtcgtcgtcgcccatcatggtcatcatcaccgcttcaccggtcaccgccatggatcgtctcccgcccatcatcacatgcattggtttgtgtcagcatccatccaatcccaatccatcgccgggcgtcccgacgttgttagttcattaggtcttttttttcctcatcgggggctagtgttattttacctttgatccttttgtctattggttaattggttccccctggatgttttttgtttgtatagagagtgaaaaagagagaagaaatagatgagtcagagtggttgctgcattgcaattgcagttgcttgcaagctaggtaggtgagaaggagagctaaaccagcagcagagggagacagatttagagaggaaactttgcagctagtcagtcagtcacttagaaaaaaaacaaggagagtgcttgaagcaggtgaaagggcaatttgttggtttgctaattagaagagaggttctgtcaggtcaggtcaggtagttgctatcattattcatgaggattttcaaacttaatagggggacagccatcatccatcatagtttgtatttggaacttggtatactgaactctgaaaattctttttgcagttcatctatgcttagggattgataagtgttgtctggtttcttctatattgatagtgctaccttttagccaataattagttatgtaagagttgctcttggtctt

SEQ ID NO: 129360 - DNA, 2380 bp, Zea Mays
cgcattaatatcttattccgcgtcgggggttcccccttcaatttttactatttaaattatacagatacatatccagccggcgcagccaggaggcgactgaccgaattgtattgtttgttcgatcgaagcaggcagatggcaggcggcggattcgtggaggacatgatgagggagcagagcctgctggaggcgacgtgcggcgacctcttcgaccacatcgacgacctcctcgacttccccaacgaggactccgccgccgccgtgctcctcctggacgcgccggcgcccgggagcccgctgtcggcgcgcatcatcgacgtcggccgcgccggcaatgcgctcgccccgcctgctgcccccgcgcagcacgacgcttccgctagcgccttcttcgccgccgcggggaacgatgtgttcgacaccaaggacgtcgtcggcgcacacatcggctcgtgcgacgacattgacatggacatggcgcagctggagtggctgtcggggctcttcgacgacgcctccatcccgcacgagccggtgttccctggcgcgacggcgggcggcgcggcgcccatcatgaagagctccgcgctggcggccggcgcgctgctgccgcaggacaaaatggaggacgcgctgctgttccgcagctccagccccatctcggtgctggagcacggcagcggtggcagcggcagcgccagcgccaccggctccgcgtcctcgtcctcctcctcggcgtcgtcctcctcggagtccttctccgggagtgggagtgggagtggcggagggcatgtttggtcggcgccagtgtcgccgcgcccggcgccgccgccggcgctcgtcataccggcgcgcgcacggagcaagcgctcccgttcgtccgcgttcaccggagccgccgcgcgcgccggggcggagacgcccaccatcctcgtgccgacgcccatgtactcctccgggtcggcccactcggaccccgagagcatcgccgagtccagcccgcacccggcgccgcccatgaagaagaagaagaaggccaagaagcctgtggtccccgcgccagctgcctcttctgacgacaacgatggcgacgccgactacgaggaaggcggcgagcaaacggagccgcagggcggcgccgtcaggaggtgcacacattgccagatcgagaagacgccgcagtggcgcgcggggccgctggggcccaagacgctctgcaacgcctgcggcgtgcgctacaagtccggtcgtctgttcccggagtaccgccccgcggcgagccccaccttcgtgccgtccatccactccaactcgcacaagagggtggtggagatgcgccagaaggctgtccggagcggcgacccgtcgtgcgaccttctccatttcatccgccgccgggattgacgtcccggcatggcgtcgccggactgtcggtcggtctcgtcccccatatagctatatatgtatgcatgcatggttgcttcatcagtcgtcgtcgcccatcatggtcatcatcaccgcttcaccggtcaccgccatggatcgtctcccgcccatcatcacatgcattggtttgtgtcagcatccatccaatcccaatccatcgccgggcgtcccgacgttgttagttcattaggtcttttttttcctcatcgggggctagtgttattttacctttgatccttttgtctattggttaattggttccccctggatgttttttgtttgtatagagagtgaaaaagagagaagaaatagatgagtcagagtggttgctgcattgcaattgcagttgcttgcaagctaggtaggtgagaaggagagctaaaccagcagcagagggagacagatttagagaggaaactttgcagctagtcagtcagtcacttagaaaaaaaacaaggagagtgcttgaagcaggtgaaagggcaatttgttggtttgctaattagaagagaggttctgtcaggtcaggtcaggtagttgctatcattattcatgaggattttcaaacttaatagggggacagccatcatccatcatagtttgtatttggaacttggtatactgaactctgaaaattctttttgcagttcatctatgcttagggattgataagtgttgtctggtttcttctatattgatagtgctaccttttagccaataattagttatgtaagagttgctcttggtcttgcctccatctactccctctgttcctgcaatacagggcattctaacaaagaattaacgcaacactcaaatgacgcttgtactcatgaattatatcttattagggctagtttggaaactccattttcccattgaatttctatttttaagaaaaaaataaactaatttcccttgaaaaaaataaaaa

SEQ ID NO: 129361 - DNA, 753 bp, Zea Mays
atgaagttccaacgtctcctgcagttgctctatttggccaagtctgaaaagatgtttcaacgtttaaatgttgaaaaggtggttcctaacgttttatcgttttaccgctttaataagcatgcttccttcctctcctcacgctctctttgttggtcccagcaatggcgttgtggtgccctccggcgtgcccggcaagatccgccccatggggggcccagatctgctctccccgacctttgtgcgccggggatctatggtggtggtaggggcctgctatggcgacgcgtgctgcgtggctgctccggatccgatgcgcagcgggcttccctcctcctttcgacggtgatcccctgttgtggcgacgtggcccacagtcggtggtcgtggcgacgatcgcggcgagtgactgcgcccatggccagggccagggcggtggcgacggcggaggctgcatgctttgacctggggttctggcctaacgatgtgctggagggcatcttgggcgaaatcctcagcgacggtgacgcctgtgggtgccacttacccctgttgagggcgtcacattgctctgtcttccatgggcgaaagaccggtctatctcgtacatgtgacggtggcgtccttaacgtcactccattcctaaaggcgtcacgtttgaagttcatctcggcctcgacgttgcctgcggttgatgctttcgcttcttggcgtctggattgcgggtggaggtttaagtcatctttcaatgtttaa

SEQ ID NO: 129362 - DNA, 504 bp, Zea Mays
agtggatatttgaagcacacggtcttgtctcgctcacccgggcaatccgcgcgaggtgcggcgcacatagccaggacccagaggcgattaggcgaacgggcggcgcggcacgagtcgagttttgaccgtgcggcgcgccgcgcgcgtatcaggcaacaatggagacgccgcgccttgtagtcgggcggcgtcgcggggccactcctcggttccggcggcggcgcctgccgcatccgcgcggcggggcacattgcttccccttcgcccgcgctcgaccacccgtgcttataacccggtgcttctacttcccctcttccagttgcgttcgaatcccacacccagcaccactccgtgcggccacgctctcacaattgctgcgcacgcgcgtgcgtgtatgcgtggctgttcctcagctgttccggtcctcccattcgtgtttcagggtggggaacacggcgattctcgaagctccagtaacgtcaggtaccaggtttgcttgatgag

SEQ ID NO: 129363 - DNA, 297 bp, Zea Mays
tctctttgtgtgcagatgaaggcaataaagtatggatctgtgccagtacagataagctttcccagcgatgaatcaagggagtcggaggagcatgattggcacaatacagcactgtctcagtacatcatctcaacctatggagatccgtctctttctcaagtacttgatgactttaacaatgacccattgcattgtcagacctcgccggagaagcaacctcctgttgccggcgagctcaccctgctggtcacagaaaagactcacgcacacacacgaacacaagtgggcacactctga

SEQ ID NO: 129364 - DNA, 1672 bp, Zea Mays
aaaatccccccactccaccaccacttctctcgctttcgctttatcacctgtcgcccccgcccccgagcctggtcgccgcttcacccgccgtcgccgtcgtcggtcgggacgcctccgggcggccgcgccctcgacggaggaatgtcttctgttgctcccgccctcgtccaccaccgcggggtctcaggcagagcaatcttacctttgcatcatggagaatgcagagtccctccaggtgcttgtttcatgggcacatcacctacgttggggccaatgagggtatccttggtatgtaatgcaagccccaaccaccataggccaaggaattcggatatatcgcgacaacaaaaaggggggtcctccagaggaaaaggcaagtcgtaccaggataaagatgactctgagaacattgatgaatttgatagtgatatcatgttctccaagaatgggccaccaatctctttggcaagcaattcccgtcctcaagccacatcggctcctggggaaagagagaaggagatcgtggaactctttaaaagggttcaagcacagctgcgagctagggggaaaagcagggaagacaagaagcctgaacatgcaaaagtgcagggtgaaaggggcagtgttgattcacttcttcagttgctcaggaaacactctgtggaccagagaagaaagaatggtgacgacaaagagcagaattccgatgtattgaggagaggcaacgattctggaaatagacaaggttcaaccgtctttggcacaaaaagtgacatccaggaagagaagaagaagccacctccggcacccttcataaggccagcctcaaatttcaggcgaaggtctcctgttcctggagtgaagttccagcctgttatcaatgcggatctggacactgatgacgatcgcaagtccatcggcagtaatgccgtggatgctgtacagaaagctaagacagctcttgatgagaggactgctacagatgagcctgactccatgtctccatatgaggcggattctgtaatagaaccaggaaacatttctttgaatgacctcgatgacattttacatgacgatgaagaattcgatgcggatgaaccagacgacgagtatccagaaccttctttgggtatctctgatgtcacagatacggatgagtcgcacgagaacgactccacccccacgggaagtgcggatctaagctctctgaaggttgcggagctgagagagctcgcaaagtctcgaggaatcaaagggtactcgaagaagaagaaaaacgagctggttgaagtgttgagcagcagcatggattgatgataaagtgggtgacctggcgctctgtttgaagtttgaacccactttgcttggccccctctagaaaattgtaaatgagcaaggctaactctgttccggtctgtgctgatcttttgctggttcattttgtacgcctagcttggtagccgtttagctgaattctgtggtgagtggagtaaggtagctgagagccttagctgtttgtgtactaaatcaatgcactgcatccgttctagggtgttgctcgtctgttttccgatattgtcttgttctgaaacatttgtggttttttttttgttacctgggtggcaactggcaactcccctgaacgaaatgttgccacatggtgttgcattgc

SEQ ID NO: 129365 - DNA, 226 bp, Zea Mays
cttctgtaacctcctcctctttctccaatggagtggaggctcatttctctctcttctttttcctcctcatttctcctataccctatacctctttccttaatggagtttcatagatgtagcggggctagagccaccaacccccttcagatccgcctctgtccaagactgacgtcacggtggcagaagaggtcgacgatgatgtactcatgtccatggcgaccgcatt

SEQ ID NO: 129366 - DNA, 1741 bp, Zea Mays
cctcctttccagcatccactgccaccatcaactgttcatccacctcgccagagcttcatgctgactcccaaggatgacttgaccacctgagatgctgagagcgtcagagagcatagcatagcatagcatttcttggtgtcgctggatggatggggatgactggatcactcacccggaggcggatcagaaagagtactagctaaccactgccaagattccgccgcgcgcacggatgcatctgtgagcgagcttacacgccgcagagaatactagatcacggcgctgcacattccgggagcgcagctggaaccaagcggctaaggatcgatggatcaccaccaccatcatcaccaccaccatcaccatcacatgatcccgggacaagagccgtcggcgacggacggcgcagcccctgacagcttcttcctgggccccgccgcagccgtcatcttctccggaggcgccggggccggttcgtcgtcgtcgggcgccgcggccctcggatcctccgccgggggaggcggtgggccatctccgtccagctcgtcgccgtcgctgagccggtacgagtcccagaagcgccgggactggaacactttcgggcagtatctgcgcaaccaccggccgccgctgtcgttgtcgcggtgcagcggcgcgcacgtgctggagttcctcaagtacatggatcagttcggcaagaccaaggtgcacacgccggtgtgccccttctacgggcaccccaacccgcccgcgccatgcccgtgcccgctgcgccaggcatggggctccctcgacgcgctcatcggccgcctccgcgccgcctacgaggagaacggcggcacgcccgagatgaaccccttcggcgcgcgggccgtgcggctctacctgcgcgaggtgcgcgagacgcaggcgcgggccagggggatcagctacgagaagaagaagcgcaagaagccgtcggcggcttcggccgcggccgcggggccgtcgtccgagggaagcccaccaccggggccgtccagcggcggtggaggacccgacacgtcgtcgccgcagttcatcatgccgtgagttttttgttcctagctagctagttaagtgatccatcgccatttgccatctacaatccttcccttgatcgtccatctgatgagctagccaacacacagcagcgcgagttggagttcgttccggtgctgctggtctaggccgttgttctttgtcttcttctccagtggcttgcattttgcaaaagatttctcgacctcccccacacccacaccccccaccttcttttctctgtttcattcacttgaatcatcactgtgcgcgtgcgtgagtactggtttaatcgtcgtcgctgttttgtttagctttcatcaacccattggcagcaggcagagtttatgttagttttgcttggtttgttattctcctcccgaggtacgacatgatgcaaacttgcaagaacagtttgagattccctaccaatgcagctgttgtgtgcttatgcatgtcatggcatggtgtgggagaagttttagtttgcagctagcaacaacagtgacaaaagctgtagctgtatagctagctagtagcatctttcagaatttgttcttgtatgcaacttgcaagcaactagtagtttggttctgctgcagaagccagcagccaaactagcttgctgtgctattcattatattggcagaacagaaatataatccttctacatcacactata

SEQ ID NO: 129367 - DNA, 1517 bp, Zea Mays
aagaaatgatgcttattcttcttcctcgtgttgtgttgccttgctaatgagtgagagtcacatatagcagggagcgcagctggaaccaagcggctaaggatcgatggatcaccaccaccatcatcaccaccaccatcaccatcacatgatcccgggacaagagccgtcggcgacggacggcgcagcccctgacagcttcttcctgggccccgccgcagccgtcatcttctccggaggcgccggggccggttcgtcgtcgtcgggcgccgcggccctcggatcctccgccgggggaggcggtgggccatctccgtccagctcgtcgccgtcgctgagccggtacgagtcccagaagcgccgggactggaacactttcgggcagtatctgcgcaaccaccggccgccgctgtcgttgtcgcggtgcagcggcgcgcacgtgctggagttcctcaagtacatggatcagttcggcaagaccaaggtgcacacgccggtgtgccccttctacgggcaccccaacccgcccgcgccatgcccgtgcccgctgcgccaggcatggggctccctcgacgcgctcatcggccgcctccgcgccgcctacgaggagaacggcggcacgcccgagatgaaccccttcggcgcgcgggccgtgcggctctacctgcgcgaggtgcgcgagacgcaggcgcgggccagggggatcagctacgagaagaagaagcgcaagaagccgtcggcggcttcggccgcggccgcggggccgtcgtccgagggaagcccaccaccggggccgtccagcggcggtggaggacccgacacgtcgtcgccgcagttcatcatgccgtgagttttttgttcctagctagctagttaagtgatccatcgccatttgccatctacaatccttcccttgatcgtccatctgatgagctagccaacacacagcagcgcgagttggagttcgttccggtgctgctggtctaggccgttgttctttgtcttcttctccagtggcttgcattttgcaaaagatttctcgacctcccccacacccacaccccccaccttcttttctctgtttcattcacttgaatcatcactgtgcgcgtgcgtgagtactggtttaatcgtcgtcgctgttttgtttagctttcatcaacccattggcagcaggcagagtttatgttagttttgcttggtttgttattctcctcccgaggtacgacatgatgcaaacttgcaagaacagtttgagattccctaccaatgcagctgttgtgtgcttatgcatgtcatggcatggtgtgggagaagttttagtttgcagctagcaacaacagtgacaaaagctgtagctgtatagctagctagtagcatctttcagaatttgttcttgtatgcaacttgcaagcaactagtagtttggttctgctgcagaagccagcagccaaactagcttgctgtgctattcattatattggcagaacagaaatataatccttctacatcacactata

SEQ ID NO: 129368 - DNA, 2640 bp, Zea Mays
gtcttcgtcccgatcgggcgtccgggccagcgcgcgcgcgagagagaagagacacagacagcgagagaaagggtggaagggaaaaaataacagccgagccgacccagaataggaggaccacttcccttccctccccctccggccactacgcccctcttccccaccgctcgcccgcaccacgccggcgccggcgccgtcaccggagcgagcggccgcgacccggaggagcctccgcacccccgccgcgccagatctggccccgcccgcagcccccatgctccagatccgcctggcctagccacgaccggccgtccgctccccgcgcccccgcgtgccatggacgacgtgtccaggtacgcgcacagcccggcgcacctggccgtcctgcggcgcgaccacgcggcgctgcggcggctggtcgccgcgctcccgcgcctgccgcgcgccggggaggtggcgaccgaggaggagtccatcgcgggggaggccttggcggacgccgtctcggccgtcgtcgaccgccgcgacgtgcctcggagggagaccccgctccacctcgccgtgcgcctccgggaccccgtcgccgccgacgtcctcatgtccgccggcgccgactggtcgctgcagaacgccgacggctggtccgcgctccaggaggccgtctgcacccgcgaggaggccatcgccaccatcatcgcgcgccactaccagccgctcgcctgggccaagtggtgccgccgcctcccgcgcatcctcgcctccatctcccgcatccgcgacttctacatggagatcaccttccacttcgagtcctccgtcatccccttcatcagccgcatcgcgccctccgacacctaccgcatctggaagcgcggcgccgcgctccgggccgacatgacactcgcggggttcgacggcttccgcatccagcgctccgaccagacgttcctcttcctcggggacggcgccaggcctgaggacgccgggggcaaggagctgcacccgggctcgctcatagtgctggcgcacaaggacaaggagatcacggatgcgctggagggggcgggcgtgcagcccaccgagtccgaggtggcgcatgaggtggcgttgatgtccaagaccaacatgtaccgtccggggattgacgtcacgcaggcggagctcgtgccacacttgaattggcgccgccaggagagggcagaagccgttgggcaatggaaagccaaggtgtatgacatgttgaatgtcctcgtcacagtgaagtctcggcgcgtacctggggcgatgacggacgaggagctgtttgccatggatggggaggagaagaacgggaggggcgcggagcttgatgctgagttagacgaagtgttgacagccgaggagaggaagcagcttgattctgcgcttaggatggggaacaatgaagaggaatctgagcagaggtgcgacgaaggtgacactggtgctggtcatatggatgagcatgccgccgccaaagataagaagggatggttcggttggggtggcaagaaaggtgccaagggcgatgacaagccatcaaagatggggagtaaggatgaaacgagtgacccagggaagcaaaaggagaagggcagcgggaagaagaagaagggtggctcacctgctgagtctctaaaacatgaaagcgagtacaagaaggggttaagaccagtgttgtggctgacaccggatttccctctgaagacagatgaactcatccctctgcttgatgtcctagcaaacaaagtcaaggctgtaaggaggcttagggaactcttgacaaccaaacttcctacaggcacatttccagtcaagattgccatccctattgttccaacgatacgagtcatcgtcacattcacaaagtttgaagaactacagcctctagatgagtttgccaccccaccttccagcccgacacagtttcaagacgcgaaaaccaaagaatcagaaggatcaggctcatggtattcatgggtaaagggtggccgaggcacgcagtccagcgacagcggtgatagccggagctggaaagatgaggtggatccgttccacataccgtcggactacacctgggttgatgccaccgagaagaagcggaggatgaaggcaaagaaagccaagagcaggcggggcccagcccgaaaacagtcctcaaagaacactgcggaaggagcccaccgcccaatgatggatggcttcgaggagtaaaccatgctctcaccggcgttgtaagttgcctctgcattcattcttaagatgttagttgttgatggcagcttcacgccgaggcaggttgaaagttgtgccttggagcaccccctgtggtgttggtgtggcaatggatgggagtcgaatctcattgagaacgtacagatggcttataccccactaatctgtaattcagtcagcgctatttttgtccccacctccgattttcatcttgctggatgtatgcttgacagatgatgatacggccctgttgttgttgaaaaagatgtgttgaggggactgtagtgttcctctcccccctgttgtatggaagattaccaatatgcagcgattttctcgcaaagaggaagctcaatgcacatgcttgtttgttcacattcctttttc

SEQ ID NO: 129369 - DNA, 2952 bp, Zea Mays
atgtcctcccgcctcaaggataccggcggcggtggcggcagggccacggccgcggcaacccgcccgctcaccccgaagcccttctctgtctcgtcatcagcccggcggacgaccgccgtcgccgccgccgggaaggagaacaccgcgtccaagccgtccaagcccacctccgccgtgcggtggtccacatcgtcgcttccgcgggccagcaggatccaaagctcggtggagtcctcgaagctcgtctccaccctcagggctcccgtgctgcccgggaggccttccgtcggtaaggataacgtggtggaggcaggcttgcggcggagcgtcaatggtgggatcagggcttcttctgtagagaaagggaggaggtcggttagtgttgttggatccagggcctccgaggctaggagagggagtgctggcgctggtggtgatggcactagcagaagggagaggcttgatgcgaaggccaaggggttggatgagatcagcaggagaagagatgatcttgatgccaaggggaagcagactgatgagattggcaggaaaagggagagctttgatgcaaagcccaagcagatcggtgggaaaagacagggctttggtgtgaatgtgtccaagcaatgtgatgagatcaaggggaaaactgacgcattcgtgagtaatatgaagaagcaaagcgaagatgttggtgggcgaagagtgggctctgattcgaaggcaaaggcaggtgaagaaatcaatatgaggaaagaggggctcaataaattggtgaaggagatgcatacccaaaaggctgatccaggagaagtttcttccaaatccgtggaatgttgtgccacccagaaggatgatgagataggcaacacttctgtcatccctgttttcactgttcatgtggtggattcaatggatgcccctgatccaataaggaaacagcaaaagaataatgaagagggtaggaagccggaagaaaagggaaaattgtcagacaggataagagtttttgagaaagtggctgcaggtggggagggagcgtcagcaaaacctgtgtctgctgtgaacaggtacccaagcaaacttcatgagaaactagctgtgttggaagggagggttcagaagattgctaccgatatcaagaaaaccaaagaaatgcttgatgagaacaacccggacgagccaaagcagatcttgtcaaatatccagaaggaaatcactgccattgagaaggcaatttctcatgtcaaagatgataataagatacagctgggtactgcagagaacagtgaatgtgagaactctcaccctgaaacagctgaaaaatgtaccattgcaaagccaggtgacctgaagcaagctggaaaaggcttgaatgctgatgagctggaggcaaggttccttccacaccacaaattattgaggggccacatatcttcaacttctactcaacaggagtcatctgttggtatgaggaaagattgtaatggaaaaacaagatctgcagcatctaaccctgacgatgatgaaaacagtatagccatggagtttctggcttctttagatggtgaagaaaatgatttcttcaaggagcgaaaagctaataaattggaaaagaataagacatgtgaagtagcagatgctaccagcaagacatcaagtcaaggtagctcaaagaatccagttgttcccaatcataaggaggaaactgaattgcttgctacggaggagctagaagaatttgatgatcgggaaaacaagtcctccatgatgttacaggaagaaactgatgagtcatgcaatagtcaattatcaggtataggaaacaagtcttcaaccggtggatggtttgtttcagagggagaagctgttcttcttgctcatggagatggcacatgctcctattatgacattgcaaaccacgagttcaaatctgagtacaagcctcccagcatggtatcaaataacatgtggggcgattgctggttgattcgtgccccaggcgttgatggatgttctggtagatatgttgttgctgcgtcagctggcaatgcactggatcctgggttttgcagctgggattactataccagagaagtaaaatcatttcatgtcgaggaggaagcttctcaagcctttgctccaacatcaagggctattcttggtgctctctctaatgtaggttcatcaagatctagctctgcactgtcaaatgcagaaagacagcaatggtggtatagaccgtgcggacctctcctgctttccactgctagcaagcaaaagatggtcacagcttatgatatacgtgacggcgatgttgtaatgaaatgggaagttagcaatccagtaatgggaatggagtactccagcccgttacagtggcgtagcaagggaaaggtagtaatcgctgggagtgagtcaatagggttgtgggatgtgaattcacttaacccacaacccttgttgtctgttgcttctggtaagaaattgtactgccttcatgtcaataacactgatgctgaggtcggcggcggagtgcgtcaaagggttagttcatccgaggtggaaggaaacgatggtgttttcagcacacaggaaagcgtaaatgtatttgatttccgtgtacccgctggcatcgggcttaaaatagcgagacatggcggcacagcgaactcaatcttctcacgcggagactcggtatttataggtagcacagaaggaaggctgcaaataaaaggagggtcgaggtcacgagtccagcattactcgctgagaaaggggaaacttgtcgccacctatgagctaccagaattctgcaacgtgtgtcatgtaatatatgtacttcgtttatgcttcacatgtgatgccatctgccgtgtcaagcatcttgctttcactgtagtacttgctagcagatgttatctagttcttacccctggaatgataaattag

SEQ ID NO: 129370 - DNA, 1386 bp, Zea Mays
cttcaaaaaaaattatgaaacgagctccgtggttgcaatggcgtcctgttacgaatgatatgcatgcgcagaagagtcacgaggaaggaaagacatgcagcgccactgcaacggaagcccagccgagtgcatagcagatagcgctgtggactgtggagtgtggagtgaagtgaacgagctctcagtctctcacacactctagctgctcctgcttgcttggctgctgctctctcccactgtctcgccgtcttgctcgcacgcatgggcgttggccggggttcctgctccagccactgaagacgcggcggcggcggcggctcctgctcatggcaggagctcaatgcggcacaggaccgcgcgccgggccgctcctcctcgtcctcgtcctgtgcggcttccttgtgctgctcgtgcctgcggctcggcgcggggacgacgacgagacggaggagttccccgtcgcgtcttccgcttcgtcgtcgtcgtggcactggcacgccgctgatgggcgccgccgtgccctgccgcggccggccgccgcgacgtggccgtggcgccccgcccagccccgggcgcgcgggaggtggaactccgcggggcaggacggcaagcacgaggtccccagtggccccaacccggactccaatcggtagccgtagccagagaggtgggtggtcgtgaactccgatccgccgtctgtgtttgtttcggcgaacggcgaccaagctccctccctgtcccctgctcctgctcctggaggccggtcgtctagctaggcctggccgtcgtatcgctcctccatgcttcttgctgctccgtgctggagccagtacgtgcgtcgtttgcttgctgtgttgtatcttcttcttcgccgttctcttcgttagagaatgaacatgaccatcatctgacgcatgcattgctcaattctcgtccaaccgacgattgattggtgacctggaatcaggagcagattttgcatctgctcgatcgtcggtctcgtactgtacactaccaggcgcagacccacgcaccctgtgcagctcatcaatcaatgatatggtagtatatggtaccacaccacgcgtcgcgtgtctgcttctgcgtggtcgcgcatcacctgagctgccgggtcccctcgcccctgcatgcagctctgtgttgtgcgtgagggtcatgcatggccgaccgggcaggtgatgaggtcgctcgcaattgacttgactgacgccgtgactgtccgtaggctactacagcatattcgatgcgatgctcatgtatagtgctgggcaattgagtcgagctgggcggctgggccaacccggttcaaaatcaagccaatcgtgcttcgtgccaaacagtttcagatcagaaaagctcaaaaaa

SEQ ID NO: 129371 - DNA, 2282 bp, Zea Mays
tactcgcaggccaggcattccccacctacccttaacacgcccccaccccagcgcctccctcctcctttttccgatcccaaatcctcccatccccagacggccagacctagcgcccgcgccgccgccatggccgaaaccggcgagtcgtccccgaaccccgccgcagccccggaggacacgcaccacgaggggtcggaggtgcctgctgctgctgtggcggcggtgcatgcgcagccgcagctgcagccccagccgcgcccgccgccgcagccatccaaggtgcgtctgatggtcagctacgggggccgcatccagccgcggccgcacgacaaccagctcgcgtacgtcaacggcgagaccaagatcctgtcgctcgagaggccggtcctcttcgccgacttcgccgcgcgcctcaccacgctcgtggggaacgcccgggacgtctgcgtcaagtaccagctgcccggggaggacctggacgcgctcatctccgtcaccaacgacgaggatctggagcacctcgtcgtcgagtacgaccgcgcccacaacaacggccccgccgccggttccggctccggccgcggcggagccacgcccaggctcagggtcttcctcttccccgtccagccgccgcctcccccgccgccggccgggctcctcgagcccaaggcggaccagcgcctctatatcgtcgaggcgctcaacaccgtctcgctgccctcctccaagctggacccgccgcccgtgccctcgcaccagtcgtccccgccgcagcagcagaagcgggagtcggtgttcgcgcaacagtcgtcgtcgccgccgccgccgcctccgcaggccaagcacgaggcggtgttcgtccagcaggctccgcctcagccgcagacggcgtttcagatgccgccgccgccgcagccgtcgcacgtggtgctcacggcggccggccccgactacctgttcggcctcgacaacggcttcgttcctcccccggcggtgaaggtcaaggacccggcgggcgatcctccgacggtcagggagaatgtgcccgtggaaatacctgccaaaaacgacgaccgccatcccaaccccgcgggcgaccacgtggctgtctcccctgtcgtctctcctgcggagtaccagcgccagatccaggagctcgagaagctgcaggtcgccgacaacgccacccaccaaccaccacctcctgcgacggctccggcacctacccacggccccgtccccgccgccctcccgaggaacggcagcgacgactcccttgcccgcgcctaccctcccgtgaccgccaccccaacctccaacgctgagtactacattccaaagttcccggagaagccgcccgtgccgccgctgtcatccgctccgcctccgacgacctacgtgcaggtgcagggcaggtacgcatccgtcgctcctggctccggcgcagaccatgcccccgtgttcttcatcccggcgccccacggctactttgcggccgccgcctccccaggcgcgacctcctaccccgccgtgtacgccgtcgcgccacccagtgccaccgccaacggctccgccccgtcagccgtggtgtcgaacgccacggcctacgcccccgcccccacacaggtcgcgtacgacagcaatggccgcgccatctactacaccagcatgctcccccagtacccctcggctgtcaatggcatgtcggcaccgggcggcgtgctcgggacagagcccgcgaagcaggtggccgtgaagccgaccgtctcgtgagcacaccaaccagcctacaacacctcgcctcacagcacagcccctcatcgccaatgaatggatcaaaggagttttcccatctttctttcatcctcacccgcccgccacccactcgtcaatatgcgttcgttaatactgtgtcggttggattcgtcaacatgcgttcgttaatactgtgtcagttggattcgttatcgtctctagtatgcacctaagtatatgttttcccttataattgcctagagttttcattggttgtctagagttttcttttggcttggcgtttcttggttccgtgatatgatgatgatgcaactattagttctttggtgtgcttagatgtagataagagtctggacatgatggataagcactatatatatattagcctattggagagttgagttgggcaaatcttgatggtgtcatcacacttctgctagtagcatttgttaattctttggtttgctgtatggatgaattccagaaatccaatggccatgtgatct

SEQ ID NO: 129372 - DNA, 2634 bp, Zea Mays
atgtcgcagaagaaatcccgcagccggggcgggggaggcggcgccgccgcctccggcgacggccacgaggatctcgcccgcccgccacccctccaggcggtcctcctcgctgacagcttcacgctgaaattccgccccatcaccctcgagcgccccaaggtgctgctaccgctggtgcacatgccgatgatcgagtacacgctcacatggctggagtctgccggggtggaggaggccttcgtcttctgctgcgcgcactcgcaccaggtcaaggagtacttggagaaggccgggtggtccggtaagtccgggcccgggagcatggccgtcacggccgtcgagtcccacgatgcgattagcgctggcgacgcgctccgcgtcatctacgaccgcggcgtgatacacggagattttgttctcatcagtggtgatacagtcagtaacatgagcttgaaggacgctctccaggaacatatggatcggaagaaaaaggacccacttgctgttatgactatggttataaagcattcaaaaccttctatcttgacgcaccaaacccgtcttggtaatgatgaaattgttatggcgatagatcctgagacaaaggagttactttattatgaagacagggcagataactcacacttgcatgttacaattgataaggatatactgaccaataatcctactctccagctgcataatgatatggaggactgctacattgatatctgctctccagaagtcctaagtctttttacagataacttcgattatcagcatcttcgccgtcattttgtgaagggcttactagttgatgatattatggggtacaaaatctatactcatgaattacgctctggatatgctgcaaggattgataattttaggagctatgataccgtgagcaaagatgtaattcaaaggtggacatatcctatggtgcctgatgtagtatccagtcgtgattcctcggagagtagacttcataggcagggaatatacaaggcatcagatgtaacattgtcaccttctgcacaaatcggtgcaaattctgttgttggtagtgtgactagtattgcaggtcactgcaaagttttaaattcagttattggacaaggctgcaagattgggaaaaatgttctgattaacggctcatttatatgggacaatgtcataattgaagatggatgcaaagttagtaactctttagtctgtgatggtgtccatctaagagctggtgctgttgttgaacctggttgtgtactgtcatttaaggttgaagttggaaagaatgttgttgttcctgcccactcaaaagtttcattacttcctcagccttcaaatgaagatagcgatgaagaacttgagtatgctgacactaactctggaattgcagatagtccaccattttccagtatgaggagtaatggtgatcaagcaactgttccttcagaagaagatgagttgggaacatccgagactggcacctgtggtgttgtcggttacatatggacaagtgttgatagtgggatcatggaagaatggagacaatcaattgcccctattcctaaagaaaagcttgaagagctgcagcatgctgtgcctgatgatgataggtcagaagatgaatccaacaatccaactctaccagataaagatgattcttcagacagtctggttgaggatgatgatcatatttctaagtttgagaaagaggtggaagagacattccaacgagctctgggtggcggcgttaatcgagataatttgatactagagattaatggcctaaggttagcctacagccttcaacatgcagattgtgctggagctgtgttctattctgtcatgaagagtgcattactggctgcacaatctagtaatgatactcttttgaagacaactgctgatgcacttggcaagtggaaggatcttttgcgcaattacaccaagacagttgatgaagagatggagatacttttaaagtttgaggaaatgtgtcaagagaccacaaaagatttttctccgctgtttccaaagatcttgccatacctctatgatacggaggtagtaagtgaagatgcaattttgagatgggcggaagagaaagaacatgctgatgagtctgataaagtttttgttaaacagtcagaggcttttattcagtggctcaaggaagcggaagaggaggatgacgaagaagaggaataaccctggagttgagctggcactcgaattctttcatgcattgtgagcgcaggatctgatttgagtgggtctctcggtgagttctcgcgagcagcaagttttgcaacctgtaattgcctgtacatcaacacaacacaattttgtccctaaccgcaactggtggagagtagcaaggagcgatttggcgtgaatgaaccaaaatgatcccagtgtagatgacatgctataactgtgctatctttgcttggttgacgcttgggcgaagtcttcgccacatttgtttaactggccatcacctgtttcttggcacccagccggcactcgcacagatctttaataaaagcttgtttagatatggcccccctttttttatcttctttctggtgagaaatgtagtgggaaagaaacaatggaggcttcttc

SEQ ID NO: 129373 - DNA, 1343 bp, Zea Mays
cgacgtgatcatcacacacacacaccggcgacgcggacgtacgtacgagtactctgcgtgcatggcgacggaatcggcggcggagatcgtctgccggctgccggagcagtgcgtggcgcacgccatctcgctgacgacgctcggcgacgcgtgccactcgtccgcggtgtcgccggcgcccttcaggcccgctgcggactccgacgccgcctgggcgcggttcctgccgccggaccacgcggacgacgtcctggcgcgcgccgacgagcggccggtcgccgccggctgctgcgcgtccaaggaagaccccttctcgcgcctctgcgactgtagccccgtcctcctggaggacggggccaccatggcattggttcgtaacgtagcaccagtacggtcgatccggagcggcgccagatgcttcgtgctgtcggcgagggccctcagcattgcgtggggagacgacccttcgtgctggacgtgggccgctagcccgccagggtccaggttcccagaggtggcggagctcgtggacgtgtgctggctggagatcagcgggaagctcagcctgtcgctgctgtccccggggaccacctacgcggcctacctcgtcttcaccatggccgacgactcgtacggcctcgagtgccacgtcgggatgccgccgcccaaggccacggtcaccgtctcctccggcggcgctagtgggacgacgacgactacgagcagcggcagcaaggcggtgacgtcaacgacgacggcggagcacgccatctgcctgcaccacatgcagggggaggaggaggaggccgcgcaccggcggaagcagcagtacgtgcgcctccgcaggggctacggcggtggccggaagacgacggtgctgacgacgacgcgggaggccgaccctgacatcaggtgcccccgccggaggggcgacgggtgggccgaggtcgagatgggcgagttccacgtggcgggcgacgagggcgacgcggcggtggtggaggtcagggtgcaggaggtggattgccgccgttggaagagaggactcgtcgtgctgggcgtcgagatcaggcccaagcagcacacgccgtgctagcgctatagctggagtggacttcatctttcttttcttcgttcttttattcagtgattaattaacaaatgccgatcaattatgcttagacaggagcagctagccgatccatgtgcataatcagcatcagggtagctttcgaacctgtttcttttctggacagacagcgtgcatgcaagggcagtttttaaaatgaccgtccatatagcttgcgcatgctgtattatctattttcgggtcagttgcttgc

SEQ ID NO: 129374 - DNA, 1696 bp, Zea Mays
cgccactgggcatccgcatatccctcacgcggtcacagttactccgggacccacatgtcatcacgtcaaccttcgccatgcccaaagcttagcctcgaagcgtctgtactgtgtgcgtcctctcctcgacctcaacccccaccccgccctacctacaaccctattaaattccgccttccgacccgtagacctgattgatccccgcatcgaatccggcggatcgggagcgggagagaccactcccaaatcgcgtcgcgtcgagagcgagagcggaagaggtgcgcgcgggggaaccgaccgaaccgactgatggagtcgacggcggcgcccgccgcctgcgagatcgcgcgcctgccggatgacctcctgtcggcggcgctcggccggacggggccgctggacgcctgccgcgccgccgcggtctcgccggcctttcgcgccgcggccgacgccgacgccgtctggtccagcttcctgccgcccgacctgcccccgctcgccgatggggagctccccgccgacgcgacggccaccaagaagcagctcttcatgcgcctctccgaccccgccagacccgtcctcctcgccgacggcctcacgagcatgtggctggacagggccaccgtggccaagtgttacatgctgtccgccaggaagctgaccatcatttggggcgatacgccgcagtactggcgctggatccccctcaccgactccaggtctgtgaaatcaaacaaataacccctctggctctatttatccatccatccatccatccatcgtcggctctgatgcgaatgtgtggtgtgggctctacatccagtttgacggtatctctagtctagtctggatacacggccgggccaatagttgcgcgtctgtgcagatgtccagtggagattattgtttcgaagcagtctggtagtgttaatttgtactaaagaagaaccgtgcccctgttcatgcttcttccaacatgcacaattccaatgccgtgttttgttttttgtgtgccaggttctcagaatgcgcagaactccagcacgtttgctggctggaaatccgcggcaagataccctgcgacatgctgtcccggaacaccacttacgccgcctacatggtgttcaagatgtccgacgaatcctatgggctggactatccgctccaggaggctgaagttagcatcggggcaaccaggtccactcgtcaggtctgcctagggtacgtcgacgacgacgaggacggggaagaggtgcctcagaactaccggtcgttcggggcggtgggaactgtatttagaccaaggatcgggaggcggaaccgtcgccagcctcctggagtgcacgtcctgcaccctcagacaagagccggcggctggatggagatggagatgggtgagttcaggaacgaggaaggtgaagatggcgaggtgtccgtcagcctcatggagaccaggggcggcaactggaagagaggtcttactgtgcagggcattgagatcagggtgaagaagtaaggatgtgaaggttgtggggatcgggctttgcgcatcaaaacaaataaaaggatcttagttagatttgtagtgcgtgttctactgcactgcagcacttgcgtatgtgtgtgtcttgcctatgcccagcaaaaaaaaaaaacaaaaagttcttcttgaggcaaaagaactgcagttttgtac

SEQ ID NO: 129375 - DNA, 1788 bp, Zea Mays
cgccactgggcatccgcatatccctcacgcggtcacagttactccgggacccacatgtcatcacgtcaaccttcgccatgcccaaagcttagcctcgaagcgtctgtactgtgtgcgtcctctcctcgacctcaacccccaccccgccctacctacaaccctattaaattccgccttccgacccgtagacctgattgatccccgcatcgaatccggcggatcgggagcgggagagaccactcccaaatcgcgtcgcgtcgagagcgagagcggaagaggtgcgcgcgggggaaccgaccgaaccgactgatggagtcgacggcggcgcccgccgcctgcgagatcgcgcgcctgccggatgacctcctgtcggcggcgctcggccggacggggccgctggacgcctgccgcgccgccgcggtctcgccggcctttcgcgccgcggccgacgccgacgccgtctggtccagcttcctgccgcccgacctgcccccgctcgccgatggggagctccccgccgacgcgacggccaccaagaagcagctcttcatgcgcctctccgaccccgccagacccgtcctcctcgccgacggcctcacggtacgggacctcgtcgccatcgatgcatcggctcttgtgttgtgatgtgctgtgcctgtgatgtcccgcactgatgtggttgctccccccagagcatgtggctggacagggccaccgtggccaagtgttacatgctgtccgccaggaagctgaccatcatttggggcgatacgccgcagtactggcgctggatccccctcaccgactccaggtctgtgaaatcaaacaaataacccctctggctctatttatccatccatccatccatccatcgtcggctctgatgcgaatgtgtggtgtgggctctacatccagtttgacggtatctctagtctagtctggatacacggccgggccaatagttgcgcgtctgtgcagatgtccagtggagattattgtttcgaagcagtctggtagtgttaatttgtactaaagaagaaccgtgcccctgttcatgcttcttccaacatgcacaattccaatgccgtgttttgttttttgtgtgccaggttctcagaatgcgcagaactccagcacgtttgctggctggaaatccgcggcaagataccctgcgacatgctgtcccggaacaccacttacgccgcctacatggtgttcaagatgtccgacgaatcctatgggctggactatccgctccaggaggctgaagttagcatcggggcaaccaggtccactcgtcaggtctgcctagggtacgtcgacgacgacgaggacggggaagaggtgcctcagaactaccggtcgttcggggcggtgggaactgtatttagaccaaggatcgggaggcggaaccgtcgccagcctcctggagtgcacgtcctgcaccctcagacaagagccggcggctggatggagatggagatgggtgagttcaggaacgaggaaggtgaagatggcgaggtgtccgtcagcctcatggagaccaggggcggcaactggaagagaggtcttactgtgcagggcattgagatcagggtgaagaagtaaggatgtgaaggttgtggggatcgggctttgcgcatcaaaacaaataaaaggatcttagttagatttgtagtgcgtgttctactgcactgcagcacttgcgtatgtgtgtgtcttgcctatgcccagcaaaaaaaaaaaacaaaaagttcttcttgaggcaaaagaactgcagttttgtac

SEQ ID NO: 129376 - DNA, 1485 bp, Zea Mays
cgccactgggcatccgcatatccctcacgcggtcacagttactccgggacccacatgtcatcacgtcaaccttcgccatgcccaaagcttagcctcgaagcgtctgtactgtgtgcgtcctctcctcgacctcaacccccaccccgccctacctacaaccctattaaattccgccttccgacccgtagacctgattgatccccgcatcgaatccggcggatcgggagcgggagagaccactcccaaatcgcgtcgcgtcgagagcgagagcggaagaggtgcgcgcgggggaaccgaccgaaccgactgatggagtcgacggcggcgcccgccgcctgcgagatcgcgcgcctgccggatgacctcctgtcggcggcgctcggccggacggggccgctggacgcctgccgcgccgccgcggtctcgccggcctttcgcgccgcggccgacgccgacgccgtctggtccagcttcctgccgcccgacctgcccccgctcgccgatggggagctccccgccgacgcgacggccaccaagaagcagctcttcatgcgcctctccgaccccgccagacccgtcctcctcgccgacggcctcacgcatgtggctggacagggccaccgtggccaagtgttacatgctgtccgccaggaagctgaccatcatttggggcgatacgccgcagtactggcgctggatccccctcaccgactccaggttctcagaatgcgcagaactccagcacgtttgctggctggaaatccgcggcaagataccctgcgacatgctgtcccggaacaccacttacgccgcctacatggtgttcaagatgtccgacgaatcctatgggctggactatccgctccaggaggctgaagttagcatcggggcaaccaggtccactcgtcaggtctgcctagggtacgtcgacgacgacgaggacggggaagaggtgcctcagaactaccggtcgttcggggcggtgggaactgtatttagaccaaggatcgggaggcggaaccgtcgccagcctcctggagtgcacgtcctgcaccctcagacaagagccggcggctggatggagatggagatgggtgagttcaggaacgaggaaggtgaagatggcgaggtgtccgtcagcctcatggagaccaggggcggcaactggaagagaggtcttactgtgcagggcattgagatcagggtgaagaagtaaggatgtgaaggttgtggggatcgggctttgcgcatcaaaacaaataaaaggatcttagttagatttgtagtgcgtgttctactgcactgcagcacttgcgtatgtgtgtgtcttgcctatgcccagcaaaaaaaaaaaacaaaaagttcttcttgaggcaaaagaactgcagttttgtacacaatattgttgtgtcccagatcactcggtgctcgatgactggccatgtttgcttttgaaagtgtaaactaggtgtgcttgttacgatc

SEQ ID NO: 129377 - DNA, 1487 bp, Zea Mays
cgccactgggcatccgcatatccctcacgcggtcacagttactccgggacccacatgtcatcacgtcaaccttcgccatgcccaaagcttagcctcgaagcgtctgtactgtgtgcgtcctctcctcgacctcaacccccaccccgccctacctacaaccctattaaattccgccttccgacccgtagacctgattgatccccgcatcgaatccggcggatcgggagcgggagagaccactcccaaatcgcgtcgcgtcgagagcgagagcggaagaggtgcgcgcgggggaaccgaccgaaccgactgatggagtcgacggcggcgcccgccgcctgcgagatcgcgcgcctgccggatgacctcctgtcggcggcgctcggccggacggggccgctggacgcctgccgcgccgccgcggtctcgccggcctttcgcgccgcggccgacgccgacgccgtctggtccagcttcctgccgcccgacctgcccccgctcgccgatggggagctccccgccgacgcgacggccaccaagaagcagctcttcatgcgcctctccgaccccgccagacccgtcctcctcgccgacggcctcacgagcatgtggctggacagggccaccgtggccaagtgttacatgctgtccgccaggaagctgaccatcatttggggcgatacgccgcagtactggcgctggatccccctcaccgactccaggttctcagaatgcgcagaactccagcacgtttgctggctggaaatccgcggcaagataccctgcgacatgctgtcccggaacaccacttacgccgcctacatggtgttcaagatgtccgacgaatcctatgggctggactatccgctccaggaggctgaagttagcatcggggcaaccaggtccactcgtcaggtctgcctagggtacgtcgacgacgacgaggacggggaagaggtgcctcagaactaccggtcgttcggggcggtgggaactgtatttagaccaaggatcgggaggcggaaccgtcgccagcctcctggagtgcacgtcctgcaccctcagacaagagccggcggctggatggagatggagatgggtgagttcaggaacgaggaaggtgaagatggcgaggtgtccgtcagcctcatggagaccaggggcggcaactggaagagaggtcttactgtgcagggcattgagatcagggtgaagaagtaaggatgtgaaggttgtggggatcgggctttgcgcatcaaaacaaataaaaggatcttagttagatttgtagtgcgtgttctactgcactgcagcacttgcgtatgtgtgtgtcttgcctatgcccagcaaaaaaaaaaaacaaaaagttcttcttgaggcaaaagaactgcagttttgtacacaatattgttgtgtcccagatcactcggtgctcgatgactggccatgtttgcttttgaaagtgtaaactaggtgtgcttgttacgatc

SEQ ID NO: 129378 - DNA, 1974 bp, Zea Mays
ggggcagagctggcaagtggcaaggctgcgcagagggactttttgtgtaaaatgcggtgggaaggtgcgctgcacctgcaagcagaggtgtgctctactgacagagtttgaactcaagaggaggcgaggcagaaccgcaatcgcgaccgcgacccgcaggtgacatacatacggtgcgagcgccggaagccggaagcaccggtgacgaagccttccgtgtcatcactcatcaggatctcagggttttgtttcgtttcgcgggcgttgggaatccatccatggcgaggaagatgctcatcgacggggaggtggcggccgtcgcggatggtgggcactatgactacgatctcttcgtcatcggggcgggcagcggcggcgttcgcggctctcgcaccgccgcctccttcggagctaaggttgcgatttgtgagctcccattccaccccatcagctcagagtggctaggaggacatggtgggacttgcgtgatacgtggttgcgtacctaaaaagatactcgtgtatggtgcatcattccgtggagaatttgaggattcgaagaattttgggtgggagattaacggagatattaacttcaattggaaaacgctattggaaaataagactaaagaaattgttagattaaatggtgtgtatcagaggatccttaccagtgccggtgtgacaatgattgaaggggcaggcagtctagttgatgctcatactgttgaagttagccagcctgatggttcaaagcaaaggtatacagcgaagcacattttgatcgcgactggtagccgtgctcaacgtgtcaacatacctggaaaggatctggctattacttctgatgaggccttgagcttggaggagcttccaaagcgcgctgtaatcctgggtggcggatatattgctgttgaatttgcttctatctggagggggatgggtgctgaagtagatttgttttatcgaagagatcttcctctaagaggttttgatgatgagatgagagctattgttgcaagcaaccttgagggaaggggaatcaagttgcatccagggacaaatctctctgagttgagtaaaacggctgacggaataaaagttgtaactgataaaggagaagagctcattgcagatgttgtcctatttgcgacagggcgcacaccaaactcccagagactgaacttgcaagctgcaggcgttgagattgaccgggttggagccatcaaggttgacgaatattctcgtacttctgctcctagtgtatgggctgtgggtgatgtaacaaaccggattaatttaacacctgttgcattgatggaggcaacttgctttgctaaaactgtgtttggtggccagcaagttaagcctgatcacagagatgttccttgtgctgttttctccattccaccactatctgtagtgggcctcagcgaagaacaggccttggaggaagctaatggtgatattcttgttttcatctcatcattcaacccaatgaagaacagcatatccaagcgccaggagaagactatcatgaaactggtagttgatgctgaaactgacaaagtacttggtgcatccatgtgtggaccagacgcacctgaaattatccagggcatcgctattgcggttaaatgtggagccaccaaagcagacttcgacagcactgtcggaatccacccttccgctgctgaagagttcgtgaccatgcgcaccgtgacgaggcgcttgagcccgacatccaagccaaagacgaacttgtaagcaagaaattggtattctggggaaatgttacaccggacaaatactctggtttcatcacgttggtaatttttacgtcattggaactggaaccatgtatattgaaggaataagttgtttttttcatggcaacacaccgaaaataatgagaccgtggactttcttgatacaaataatgagctcaagcagagaacgtttatggttggttctc

SEQ ID NO: 129379 - DNA, 1807 bp, Zea Mays
ctggctcgtttgtccccgcggttctgctgaggccagatttcctcctgcggcgttgaattgcgcgctcgacctagggttttgtttcgtttcgcgggcgttgggaatccatccatggcgaggaagatgctcatcgacggggaggtggcggccgtcgcggatggtgggcactatgactacgatctcttcgtcatcggggcgggcagcggcggcgttcgcggctctcgcaccgccgcctccttcggagctaaggttgcgatttgtgagctcccattccaccccatcagctcagagtggctaggaggacatggtgggacttgcgtgatacgtggttgcgtacctaaaaagatactcgtgtatggtgcatcattccgtggagaatttgaggattcgaagaattttgggtgggagattaacggagatattaacttcaattggaaaacgctattggaaaataagactaaagaaattgttagattaaatggtgtgtatcagaggatccttaccagtgccggtgtgacaatgattgaaggggcaggcagtctagttgatgctcatactgttgaagttagccagcctgatggttcaaagcaaaggtatacagcgaagcacattttgatcgcgactggtagccgtgctcaacgtgtcaacatacctggaaaggatctggctattacttctgatgaggccttgagcttggaggagcttccaaagcgcgctgtaatcctgggtggcggatatattgctgttgaatttgcttctatctggagggggatgggtgctgaagtagatttgttttatcgaagagatcttcctctaagaggttttgatgatgagatgagagctattgttgcaagcaaccttgagggaaggggaatcaagttgcatccagggacaaatctctctgagttgagtaaaacggctgacggaataaaagttgtaactgataaaggagaagagctcattgcagatgttgtcctatttgcgacagggcgcacaccaaactcccagagactgaacttgcaagctgcaggcgttgagattgaccgggttggagccatcaaggttgacgaatattctcgtacttctgctcctagtgtatgggctgtgggtgatgtaacaaaccggattaatttaacacctgttgcattgatggaggcaacttgctttgctaaaactgtgtttggtggccagcaagttaagcctgatcacagagatgttccttgtgctgttttctccattccaccactatctgtagtgggcctcagcgaagaacaggccttggaggaagctaatggtgatattcttgttttcatctcatcattcaacccaatgaagaacagcatatccaagcgccaggagaagactatcatgaaactggtagttgatgctgaaactgacaaagtacttggtgcatccatgtgtggaccagacgcacctgaaattatccagggcatcgctattgcggttaaatgtggagccaccaaagcagacttcgacagcactgtcggaatccacccttccgctgctgaagagttcgtgaccatgcgcaccgtgacgaggcgcttgagcccgacatccaagccaaagacgaacttgtaagcaagaaattggtattctggggaaatgttacaccggacaaatactctggtttcatcacgttggtaatttttacgtcattggaactggaaccatgtatattgaaggaataagttgtttttttcatggcaacacaccgaaaataatgagaccgtggactttcttgatacaaataatgagctcaagcagagaacgtttatggttggttctc

SEQ ID NO: 129380 - DNA, 1097 bp, Zea Mays
aagacgacgtcgctctgccaaattcgaagccagcaggcagcagctcccacgaccacatgttgtgccctcttatcacaaatcgtcgagctccaccaaccacaggcggcactcaccactagagttggtgccgcgactgcgaatccggcgcaatggccgcggcggcgatgggcctcgtgcgtgagctcctgcagccacagggaaccacgagcacccgccggctctgcagcacaggtgtgggcgtgggcgtggcggcgggcttcctcagcgccgggaccgtcgcgtcggcatccagcgcatgcccggcttacccgtggtcacaggacggggcgcggggcgggcacaaggtgttcatgcagcacgactgcgcggcgtgccactcgggcctgccgtacgctggcctcgccgacgaggccctggcggccggaggcgaggtggaagccaaggcggccgagatcgtggttgtccatgaccacgaggaggaggcagcgctgacgacggcgacgacgctccacggcggcgcctgcccgccggacctctccgccgtcaccaaagtaagctgcttctagctcccaactctgctaccataattcgttgctgatacgaggtgctccaccgtccatggcaaaaccggccagatgctggaagggctgcgccgcggcaacctgtacagcgcggacgagatcaagacgacgatgtcgctggcttctcctgtctggctgcagtttcttcagtcgtacgtgaggattccccaggcaccctgaaatgccagccagattcgtcactagaacatcccagtcccagctctagtgacgtgagtattctgctgcagtgtgcctgtgtgtctgtttcttctttcttggaagctgccatgtccgtgtgcgggaacaacatttggatcctcctcctcctccatttgtactgaaataaatcaatcctatcctacaatgtactgtggttgttggcagtactcaaagtgagacaaaaaaaaagatgatgttgagcagaaacaggtcaacgctgtgttgactctgaatcgaatcgatgaaccatatgaattgcagtctcactgacacaaaaacgtagtttcagagtaatgc

SEQ ID NO: 129381 - DNA, 923 bp, Zea Mays
acgaccacatgttgtgccctcttatcacaaatcgtcgagctccaccaaccacaggcggcactcaccactagagttggtgccgcgactgcgaatccggcgcaatggccgcggcggcgatgggcctcgtgcgtgagctcctgcagccacagggaaccacgagcacccgccggctctgcagcacaggtgtgggcgtgggcgtggcggcgggcttcctcagcgccgggaccgtcgcgtcggcatccagcgcatgcccggcttacccgtggtcacaggacggggcgcggggcgggcacaaggtgttcatgcagcacgactgcgcggcgtgccactcgggcctgccgtacgctggcctcgccgacgaggccctggcggccggaggcgaggtggaagccaaggcggccgagatcgtggttgtccatgaccacgaggaggaggcagcgctgacgacggcgacgacgctccacggcggcgcctgcccgccggacctctccgccgtcaccaaaatgctggaagggctgcgccgcggcaacctgtacagcgcggacgagatcaagacgacgatgtcgctggcttctcctgtctggctgcagtttcttcagtcgtacgtgaggattccccaggcaccctgaaatgccagccagattcgtcactagaacatcccagtcccagctctagtgacgtgagtattctgctgcagtgtgcctgtgtgtctgtttcttctttcttggaagctgccatgtccgtgtgcgggaacaacatttggatcctcctcctcctccatttgtactgaaataaatcaatcctatcctacaatgtactgtggttgttggcagtactcaaagtgagacaaaaaaaaagatgatgttgagcagaaacaggtcaacgctgtgttgactctgaatcgaatcgatgaaccatatgaa

SEQ ID NO: 129382 - DNA, 570 bp, Zea Mays
cttgaacaatgcaggaaagttggtgtcatttcattaaaacagaggaatacaaagatgtacaacatctccccgaccctaccaacacacgcacgcacacacacataccagtgacacacaactagttcatgatcatctcatgctacatgaaaagtgaaagatacaaccaaggaagctggagtcgatcagtcactcatttagaagacaaaagtgaaatgtcagaatcagcgtgcaacttgctaatactcagcacgaacttgaactataactatgtcatcatggaaccattagatgaattttctgaatatggaatgcgtcgaagacattgaatcctttcagtaatctcacctggaaggaagaaaaacaaggtttagctgaagaattagaattctgagcgcttatctcatttgaaatttgagaaaggaatcagctgcaattacgaataacttacaattacgatgctgatctatttcatcgtaaacattaacacataataactttatgtagaagccatagtaaggatggtttactctatagtgactgtcttgcatagtcaagaatatccttttcctg

SEQ ID NO: 129383 - DNA, 1107 bp, Zea Mays
ctcaaggagtgacgcgtcgagctctcttgatgaatcctcgtattggcccgagccacgcaggtcctttaaaatctgaacagaatgcaggcacaatcgagcatctcaggagacacgtctcgaaagcactgagcagcattacttacaaccaatttgttgcaaaaattcgcaaatgtcaagcagaagaaagtggcacagagaagacattatggagtcgaaggggaggaccgcaggagcgagagggaccgccgctggcctcctcgaagaagagcgtccaccggagggccttattgatatattcggagatccaagtagcagcggcgccggacgaggtgcggccgccggcgaggacaaggacgtcgacgaaaccccgcaccagacggcgctcctcctccatggccaccaccggcgggtgtgcccaccccattttccgagcctgcttctcacaatcctgacttctgcagggactacccggaaaacaatcctgcacttatcactttgcactcagaaccctatatttatgcatttccttttctatcactcttttgtttggttcgcacctcgcacagacgcacgcaagcctgaggtcctgaaatgaaaatttgcaactataacaaggtggtacttgaatagcagccacaaaaccctaacctcgcgaccgtataaacgagccaacccgcccacctcccgcgccgccgccactcagcgccgcgcttgcgtttccttctctccgcttccaagatgtcgaagcgagggcgtggaggttcggctggtaacaagttccggatgtcactgggtctaccagtggcagctactggaatcaagggtcgccttaacaggcttccttctgcctgtgttggtgacatggttatggcaaccgtgaagaagggaaagcctgaccttagaaagaaggtgatgccagctgttattgtgaggcagcgcaagccatggcgccgaaaggatggtgtctacatgtactttgaagacaatgctggagtgattgtgaacccaaagggagagatgaaaggttctgccatcactgggcccatcggaaaggagtgcgctgatctctggcccaggattgctagcgcggcaaatgcgatcgtctaa

SEQ ID NO: 129384 - DNA, 2261 bp, Zea Mays
ctcaaggagtgacgcgtcgagctctcttgatgaatcctcgtattggcccgagccacgcaggtcctttaaaatctgaacagaatgcaggcacaatcgagcatctcaggagacacgtctcgaaagcactgagcagcattacttacaaccaatttgttgcaaaaattcgcaaatgtcaagcagaagaaagtggcacagagaagacattatggagtcgaaggggaggaccgcaggagcgagagggaccgccgctggcctcctcgaagaagagcgtccaccggagggccttattgatatattcggagatccaagtagcagcggcgccggacgaggtgcggccgccggcgaggacaaggacgtcgacgaaaccccgcaccagacggcgctcctcctccatggccaccaccggcgggtgtgcccaccccattttccgagcctgcttctcacaatcctgacttctgcagggactacccggaaaacaatcctgcacttatcactttgcactcagaaccctatatttatgcatttccttttctatcactcttttgtttggttcgcacctcgcacagacgcacgcaagcctgaggtcctgaaatgaaaatttgcaactataacaaggtggtacttgaatagcagccacaaaaccctaacctcgcgaccgtataaacgagccaacccgcccacctcccgcgccgccgccactcagcgccgcgcttgcgtttccttctctccgcttccaagatgtcgtctaccagtggcagctactgtgaactgtgccgataacactggagccaagaacctgtacatcatttctgtgaagggaatcaagggtcgccttaacaggcttccttctgcctgtgttggtgacatggttatggcaaccgtgaagaagggaaagcctgaccttagaaagaaggtgatgccagctgttattgtgaggcagcgcaagccatggcgccgaaaggatggtgtctacatgtactttgaagacaatgctggagtgattgtgaacccaaagggagagatgaaaggttctgccatcactgggcccatcggaaaggagtgcgctgatctctggcccaggattgctagcgcggcaaatgcgatcgtctaaaggaagcagtttgtcgaagtttcatttaaaatggggacttgagaagggagttcttagttagacgagcttttgattgccctgaatatgtttccccggctaatgcttgtgctgctggaccgtttcctgatagctttgctttgatgacatcctccccgttatcgataaagttgcgtagcctgacattttgcagagtttaagttggcttgttttggagcaagggtagttgctattttagctcctccaatccccttgcgcctaacactatctaagggctagtttgagagccataaaatctgagtggatttgaggtgctaaaattccttccttactcaattttaataagaaggggattttagtccctcctgttcttcggttttgtttggaagctacaaaaccggagaggattagaggggctagaatccactttttatttaaatttgaataattaggggattctaacaactccaattcccttcggttttatgtctcccaagctatctttaagggctggtttgatgataggggaatttgagggggtccattggcgaggaattcctttgctatttgaaattgaatagcactggaatttttcccacatcagttttggaaccttattttcctggaggaattctatttttccaaaaaaaaatgaactaaattcccttgtgaaaatgaaaattacttgagaaaatgtggttcccaaactagttctaaatgtcatatgtaggggagtcattagcaattttgtcattatcatttgtggatttcgctaatatgatatcgggttcgtaaattatagatatacatggttttatttgtcatagacatgagatgacataataataggaagcgaacactgagagtggcaaaattataaatttctccagggtgtcacgccggaacttctgaaactgtaaaaagtggtttctacaagacactgatgcttcagcatcacaggatcaaatcgcatcagcaatatggcgcatgcagcatgctcaaggcatgaaggagacggcatgtaaaattgcctcgaagcgacacttattttttacaacgttgtatcaacaacgccttcagtttccgtaaacagcttgtgttctctaatgtatccaattacttcatcactggtaagataggcatctccttatgc

SEQ ID NO: 129385 - DNA, 2561 bp, Zea Mays
ctcaaggagtgacgcgtcgagctctcttgatgaatcctcgtattggcccgagccacgcaggtcctttaaaatctgaacagaatgcaggcacaatcgagcatctcaggagacacgtctcgaaagcactgagcagcattacttacaaccaatttgttgcaaaaattcgcaaatgtcaagcagaagaaagtggcacagagaagacattatggagtcgaaggggaggaccgcaggagcgagagggaccgccgctggcctcctcgaagaagagcgtccaccggagggccttattgatatattcggagatccaagtagcagcggcgccggacgaggtgcggccgccggcgaggacaaggacgtcgacgaaaccccgcaccagacggcgctcctcctccatggccaccaccggcgggtgtgcccaccccattttccgagcctgcttctcacaatcctgacttctgcagggactacccggaaaacaatcctgcacttatcactttgcactcagaaccctatatttatgcatttccttttctatcactcttttgtttggttcgcacctcgcacagacgcacgcaagcctgaggtcctgaaatgaaaatttgcaactataacaaggtggtacttgaatagcagccacaaaaccctaacctcgcgaccgtataaacgagccaacccgcccacctcccgcgccgccgccactcagcgccgcgcttgcgtttccttctctccgcttccaagatgtcgaagcgagggcgtggaggttcggctggtaacaagttccggatgtcactgggtctaccagtggcagctactgtgaactgtgccgataacactggagccaagaacctgtacatcatttctgtgaagggaatcaagggtcgccttaacaggcttccttctgcctgtgttggtgacatggttatggcaaccgtgaagaagggaaagcctgaccttagaaagaaggtgatgccagctgttattgtgaggcagcgcaagccatggcgccgaaaggatggtgtctacatgtactttgaagacaatgctggagtgattgtgaacccaaagggagagatgaaaggttctgccatcactgggcccatcggaaaggagtgcgctgatctctggcccaggattgctagcgcggcaaatgcgatcgtctaaaggaagcagtttgtcgaagtttcatttaaaatggggacttgagaagggagttcttagttagacgagcttttgattgccctgaatatgtttccccggctaatgcttgtgctgctggaccgtttcctgatagctttgctttgatgacatcctccccgttatcgataaagttgcgtagcctgacattttgcagagtttaagttggcttgttttggagcaagggtagttgctattttagctcctccaatccccttgcgcctaacactatctaagggctagtttgagagccataaaatctgagtggatttgaggtgctaaaattccttccttactcaattttaataagaaggggattttagtccctcctgttcttcggttttgtttggaagctacaaaaccggagaggattagaggggctagaatccactttttatttaaatttgaataattaggggattctaacaactccaattcccttcggttttatgtctcccaagctatctttaagggctggtttgatgataggggaatttgagggggtccattggcgaggaattcctttgctatttgaaattgaatagcactggaatttttcccacatcagttttggaaccttattttcctggaggaattctatttttccaaaaaaaaatgaactaaattcccttgtgaaaatgaaaattacttgagaaaatgtggttcccaaactagttctaaatgtcatatgtaggggagtcattagcaattttgtcattatcatttgtggatttcgctaatatgatatcgggttcgtaaattatagatatacatggttttatttgtcatagacatgagatgacataataataggaagcgaacactgagagtggcaaaattataaatttctccagggtgtcacgccggaacttctgaaactgtaaaaagtggtttctacaagacactgatgcttcagcatcacaggatcaaatcgcatcagcaatatggcgcatgcagcatgctcaaggcatgaaggagacggcatgtaaaattgcctcgaagcgacacttattttttacaacgttgtatcaacaacgccttcagtttccgtaaacagcttgtgttctctaatgtatccaattacttcatcactggtgcccataagaactataccgatgaactgatctgattcggcacgaccgagatgatgttatcctggaaacgagctcagaacatcagtaaggaaacttaaccatcagacagcaagttgcatcactgctggctatcaacttcccggcatcctttcctttccttgcatatggttttgacctggaagcaaaagcaggtgcggaagtttattattagcaaagttattacctgatcttgtatccaaacatctgaatgactcgagcaagtcagaaccacat

SEQ ID NO: 129386 - DNA, 1341 bp, Zea Mays
caccgcccaggcgtcagctgcttcattgcgtggccgtggccgtggccgtcgacgcctcgcgggaaacatggccagttcctgcctctccaccgccgcggcgcagctccagctgcagctgcagctccatctcgcgtcgtcaccagtgttcccgcgcccagcgcgcgcgcaccaccggctcgtcgccgcgcacgccgttgcggtgcccgtacatcggaggcgcgcgctcgcggtcaccgcgagcgcgtcgcaggaggaggccgaggccacggttgtcgaggaggaattggaggaggtcgcggagcgaggcagagaggtacagttgcaagaacaagacgaagttcaggaggaaggtgcagccgtcggggctagctcggacgacagcggcccgtcggtggccgcgagcaccacgaccaccaagctctacttcgggaacctgccgtacaactgcgacagcgcgcagcttgccggcattgtgcaggagtacgccagcccggagatggtcgaggtgctgtacgatcgtacgacgggcagaagccgagggttcgccttcgtgacgatgaccacggttcaggactgcgagttggtcatcaagaacctcgacggcagcctgtacggtggccggacgatgaaggtgaacttcgccgaccggcccaagcccaagcaggcgctgtacccggagacggagcacaagctgttcgtcggcaacctgtcgtggacggtcacgtcggagatgctcacggaggcgttcggccgctgcggcaccgtggtcggcgcgagggtgctctacgacggcgagaccggccgctccaggggctacggcttcgtctgctactccaccagggaggagatggacgaggcgctttcctcgctcaacggaatggaaatggaaggcagggagatgagggtcaacttggccctcggaaagaagtaacagagttcagatatgtggaggaagttgcaattggtatgtgatggatgcctatgcgatgcaaccgagacgacgacgcttgctcatctcatccggagcacatacgaggagagcagagagcaggaaaaggaaaaggaaacggaaaccttcctgatctagcatagcatgggagtgtcattgccatctggtgtgtgtttagcaaatatatacggttcatacagtgcgaattgtgattctggcgagattaggatgctgattcctccgatcattggagcacagttttggcttgatccatgcacattcgaagctgctgttactgaaagagttgacaggccgtatgtttggtacaactttttttatgagaatatggatttgtggataatactgaaagatgtcctatacgttctgaatcc

SEQ ID NO: 129387 - DNA, 1052 bp, Zea Mays
aacggcagccatacgtaggcggagttagagagattattggtcagggcagaaagaggcagcgaagggagagccacatgtgctgcttcgtctgcgtgtgacatgtccggatctcgttggcgccaagaaccaccaccaccaccacatcctggagcagggcgaggcaacctccgcgccactcgccagctgcccagtcgtctcccacgtcctagcacaacagagcagagcagagcgagcaaaggtatctgccatccaccatggccgtctccatcgccggcagcagcatccgcctccacgttgccccgcccagtcgccgccgcgtcagcgtggtctccgccgccgccgcggcgcggctcgaccggcgctcggcggccctgctcctgctgtccacggcggttccagcggcatcggcagcgacagctcccccagcgagcgccgcgggcatcggtctcttcggcatccgcaagaagctggagcgcgcggaggaggcggcagtcgaggcggtgagggaggtggaggaggcggcggcggaggccgcggcggtgggcggggaagccgtgaaggaggcggcggccgaggcggtgcgggaggtggaggaggccgcggcggtgggcggggaggccgtgaagggggcggtgacggaggcggagaaggaggtcgccagcgagggcctgcagctggtggccggcgcggagctcgccggggacgggctagtgcaggccgcggtggtcgccggcgccgaggcgctcggggtcgtcgtgggcctatccgtggtaaatggtatcctgaagcccgaggcctagatggtgtaggctgctgggccttgtagtttcggccgaatacaagtgtttgggctttagcgcttcgttgtcggtgtcgctgtaatttgctgatgacctcttcttttgtgtgtaaattgttattattataacaattattggagtgcggatatgggcagctagaaaagtgtgatcaatttgtaatgctgcaggatttgaacaccatacatgactacatgaggtccactgatcggagcatcagagttagtttagggg

SEQ ID NO: 129388 - DNA, 1585 bp, Zea Mays
gggattcttctatatcatgactcggtcatatgcttacgttgatgttggattatttttattaaagcgattctcacataaaccaattgaaaaaggtactgtatttgagaatgtacagcagcttctggcaacgataatcagaaaaaaaaacaaacaaacacggccaatggacgggggccacggggcttccattggaagcgaagagataacgtgggtccaaccggaactggctcactattctgttcggttccttccgaaaacacaacaggaaaacacacgcacaaaattgccgtttccgaatggccacggccgtgctccgccgcccattcctcgccgcgctcctcctccccgccgccggaggggcgtccgggacctcctcctggttccgtccccggagacgtaggtcctctccttccgtgcgcgcggtgtcttccgactcccccaagcccgtcgcctccacttcctcccccaccggcggtgacagccccgacgaggaaccaccggtcctaccgctcctccaggagcttgcggattgcttgattcttccgcccaagctcctcgctcagctcccgagcgaccttcgtctcgacctcaatgacgctgcgtttgatctctccaacgggccagttctcgacgagtgtggccaagaagtgggtgatctgctcctgaacctggcaaaagcatgggagttagctgatacgtcaacatcaaatagcattgccaagcagctgccgttgatggagccctacttgacgcgcagcgccaaatcagcgtttggcaagcggctggtgtcagctggaaggaggtttcagtcaatgggacagtacaaccagggagaactcaaaaagattgctgaaacaatgatcaagaatggtaagctgctatcgaaacacccagtggttcaatctgatgttcaggctatgaaagaaaaaaggagactaaagtttggagaacttgagttcggagtgactgctcaaagtgccactatcggttctgcagtagcggcaatttttggattaatctcatggcaactagcacgaggcgtgcaaagtattcctgacaatacaacgcaatacacaaatgacaatgcactgcagttggccaagtcgctcaagaccgcactgcttgttcttggctacacatctaccggcctatccttattcgcggcttttgggctgctgttgctagcccagcagattaactctgagaacaaatcggagtaactgacaggcactcgctgaagttgtggacctcatgccttgcctttctatgctccaatgaggcaaacgttcatagggaattgcatacactgggaccttgtgtgtatcagtgcatgcaatgttctgtataaaaataaagagccaattgtttgtgattacggataaaataatcggtggagatattgaagcaaacatggaagtcagcctgggactgactgaagaacaaattgttagtgaacgcaacagggaactgcttgtattcaaaattgtgctttcggagtgtggtactgctgttactcatcaaaactgaaaaaaatcgttcttaccatcataattaagtatgatgaatgagtatatattctgcatgg

SEQ ID NO: 129389 - DNA, 1695 bp, Zea Mays
gggattcttctatatcatgactcggtcatatgcttacgttgatgttggattatttttattaaagcgattctcacataaaccaattgaaaaaggtactgtatttgagaatgtacagcagcttctggcaacgataatcagaaaaaaaaacaaacaaacacggccaatggacgggggccacggggcttccattggaagcgaagagataacgtgggtccaaccggaactggctcactattctgttcggttccttccgaaaacacaacaggaaaacacacgcacaaaattgccgtttccgaatggccacggccgtgctccgccgcccattcctcgccgcgctcctcctccccgccgccggaggggcgtccgggacctcctcctggttccgtccccggagacgtaggtcctctccttccgtgcgcgcggtgtcttccgactcccccaagcccgtcgcctccacttcctcccccaccggcggtgacagccccgacgaggaaccaccggtcctaccgctcctccaggagcttgcggattgcttgattcttccgcccaagctcctcgctcagctcccgagcgaccttcgtctcgacctcaatgacgctgcgtttgatctctccaacgggccagttctcgacgaggtaccaaagaactcagcattcagcaactggatacatgctagaggtttcagcacaaccaagcacgcttacaatgctcatttctttgctgagacatagtgtggccaagaagtgggtgatctgctcctgaacctggcaaaagcatgggagttagctgatacgtcaacatcaaatagcattgccaagcagctgccgttgatggagccctacttgacgcgcagcgccaaatcagtgtagcgtttggcaagcggctggtgtcagctggaaggaggtttcagtcaatgggacagtacaaccagggagaactcaaaaagattgctgaaacaatgatcaagaatggtaagctgctatcgaaacacccagtggttcaatctgatgttcaggctatgaaagaaaaaaggagactaaagtttggagaacttgagttcggagtgactgctcaaagtgccactatcggttctgcagtagcggcaatttttggattaatctcatggcaactagcacgaggcgtgcaaagtattcctgacaatacaacgcaatacacaaatgacaatgcactgcagttggccaagtcgctcaagaccgcactgcttgttcttggctacacatctaccggcctatccttattcgcggcttttgggctgctgttgctagcccagcagattaactctgagaacaaatcggagtaactgacaggcactcgctgaagttgtggacctcatgccttgcctttctatgctccaatgaggcaaacgttcatagggaattgcatacactgggaccttgtgtgtatcagtgcatgcaatgttctgtataaaaataaagagccaattgtttgtgattacggataaaataatcggtggagatattgaagcaaacatggaagtcagcctgggactgactgaagaacaaattgttagtgaacgcaacagggaactgcttgtattcaaaattgtgctttcggagtgtggtactgctgttactcatcaaaactgaaaaaaatcgttcttaccatcataattaagtatgatgaatgagtatatattctgcatggttttttttt

SEQ ID NO: 129390 - DNA, 1867 bp, Zea Mays
ctccgccggctgctcttcttctcccctctcgctatatccccggggacctcacagccacatctctccactgctccgtccagcgcgtccacctcccaaacccctactcccccaggaagcaatggcttcccccacccagggccaggtcatcacctgcaaaggtaacctgcttgatcttgtgtgctcctgcttcttcgcatcgcggcggtggcgtacgagccgaacaagccactcgtgatcgaggacgtgcaggtggcgccgccgcaggccggcgaggtccgcgtcaagatcctattcaccgcgctctgccacaccgaccactacacctggagcggcaaggatcctgagggtcttttcccttgcattcttggccacgaagctgccggaattgtggaaagtgtcggtgaaggagtaactgatgtgcagcctggggatcatgtcattccttgctaccaagcagaatgcaaagaatgcaagttttgcaagagcggaaagaccaacctctgtggtaaggtccggagtgccacaggcgtaggtgtcatgatgaatgatatgaagagcaggttctctgtaaatggaaagcccatttaccatttcatggggacatcaacattcagccagtacactgtggtgcatgatgtcagtgttgcaaagatcaacccacaggcacccttagataaagtctgcctgctcggttgtggtgttcctactggtcttggagcggtgtggaatactgcaaaggttgaatctggctcagttgttgctgtttttggccttggaacagttggacttgcagttgctgagggagcaaaagctgctggtgcttctcgagttattggcattgacatcgacaataaaaagtttgatgttgcaaagaactttggagttacagaatttgttaacccaaaagagcatgacaaaccgatacagcaggtcctggtcgatcttacagatggcggcgtggattacagctttgagtgcattggaaatgtttcggttatgagggctgcactggaatgctgccacaagggctggggaacctccgtcatcgtcggcgtcgccgcctctggccaggagatcgccacacgaccattccagctcgtgactgggcgtgtctggaagggaaccgctttcggtggcttcaagagccggacccaggtcccatggcttgttgacaagtacatgaaaaaggaaattaaggtggacgagtacattacgcacaacatgaacctggctgacatcaacgacgccttccacctgctgcacgaaggtggctgtctgcgttgtgtgctggcaatgcagatttgaaattcctaagctaagcagtttttgttttggaactagaactcctttttgcctcgttaggcctggacccgctgtataatgctatgttgtgttggatggctgacgatggttactgctgtgttgctagcaatgtggtacttgatctgtatcacggttgcaaataagtgctgtttctaaaacactccctctcggtgaataaggggttgtttggtttgaggaatcattccatccaaaatgaggtggtgcatcatagatctattcctcaaatttgctcggatgacttcaatccttatattagtactaactaattcactatgaggaatgagatggtgatggatcaactaattccattccacaaaccaaagaaaaaagtgaggtgatgatggactagctcatctttcaaaccaaaacaccctataagtgatctgtatcatatgtggggaagatgtttactatggcagattgtgcgataacaatatggagacaatgtttggaaactgaaccatatattggtgcaaccaggcaaacaagacacaaagatgaaggtggatgaacctccatctta

SEQ ID NO: 129391 - DNA, 1826 bp, Zea Mays
ctccgccggctgctcttcttctcccctctcgctatatccccggggacctcacagccacatctctccactgctccgtccagcgcgtccacctcccaaacccctactcccccaggaagcaatggcttcccccacccagggccaggtcatcacctgcaaagcggcggtggcgtacgagccgaacaagccactcgtgatcgaggacgtgcaggtggcgccgccgcaggccggcgaggtccgcgtcaagatcctattcaccgcgctctgccacaccgaccactacacctggagcggcaaggatcctgagggtcttttcccttgcattcttggccacgaagctgccggaattgtggaaagtgtcggtgaaggagtaactgatgtgcagcctggggatcatgtcattccttgctaccaagcagaatgcaaagaatgcaagttttgcaagagcggaaagaccaacctctgtggtaaggtccggagtgccacaggcgtaggtgtcatgatgaatgatatgaagagcaggttctctgtaaatggaaagcccatttaccatttcatggggacatcaacattcagccagtacactgtggtgcatgatgtcagtgttgcaaagatcaacccacaggcacccttagataaagtctgcctgctcggttgtggtgttcctactggtcttggagcggtgtggaatactgcaaaggttgaatctggctcagttgttgctgtttttggccttggaacagttggacttgcagttgctgagggagcaaaagctgctggtgcttctcgagttattggcattgacatcgacaataaaaagtttgatgttgcaaagaactttggagttacagaatttgttaacccaaaagagcatgacaaaccgatacagcaggtcctggtcgatcttacagatggcggcgtggattacagctttgagtgcattggaaatgtttcggttatgagggctgcactggaatgctgccacaagggctggggaacctccgtcatcgtcggcgtcgccgcctctggccaggagatcgccacacgaccattccagctcgtgactgggcgtgtctggaagggaaccgctttcggtggcttcaagagccggacccaggtcccatggcttgttgacaagtacatgaaaaaggaaattaaggtggacgagtacattacgcacaacatgaacctggctgacatcaacgacgccttccacctgctgcacgaaggtggctgtctgcgttgtgtgctggcaatgcagatttgaaattcctaagctaagcagtttttgttttggaactagaactcctttttgcctcgttaggcctggacccgctgtataatgctatgttgtgttggatggctgacgatggttactgctgtgttgctagcaatgtggtacttgatctgtatcacggttgcaaataagtgctgtttctaaaacactccctctcggtgaataaggggttgtttggtttgaggaatcattccatccaaaatgaggtggtgcatcatagatctattcctcaaatttgctcggatgacttcaatccttatattagtactaactaattcactatgaggaatgagatggtgatggatcaactaattccattccacaaaccaaagaaaaaagtgaggtgatgatggactagctcatctttcaaaccaaaacaccctataagtgatctgtatcatatgtggggaagatgtttactatggcagattgtgcgataacaatatggagacaatgtttggaaactgaaccatatattggtgcaaccaggcaaacaagacacaaagatgaaggtggatgaacctccatctta

SEQ ID NO: 129392 - DNA, 923 bp, Zea Mays
gaccaacctctgtggtaaggtccggagtgccacaggcgtaggtgtcatgatgaatgatatgaagagcaggttctctgtaaatggaaagcccatttaccatttcatggggacatcaacattcagccaggagatcgccacacgaccattccagctcgtgactgggcgtgtctggaagggaaccgctttcggtggcttcaagagccggacccaggtcccatggcttgttgacaagtacatgaaaaaggaaattaaggtggacgagtacattacgcacaacatgaacctggctgacatcaacgacgccttccacctgctgcacgaaggtggctgtctgcgttgtgtgctggcaatgcagatttgaaattcctaagctaagcagtttttgttttggaactagaactcctttttgcctcgttaggcctggacccgctgtataatgctatgttgtgttggatggctgacgatggttactgctgtgttgctagcaatgtggtacttgatctgtatcacggttgcaaataagtgctgtttctaaaacactccctctcggtgaataaggggttgtttggtttgaggaatcattccatccaaaatgaggtggtgcatcatagatctattcctcaaatttgctcggatgacttcaatccttatattagtactaactaattcactatgaggaatgagatggtgatggatcaactaattccattccacaaaccaaagaaaaaagtgaggtgatgatggactagctcatctttcaaaccaaaacaccctataagtgatctgtatcatatgtggggaagatgtttactatggcagattgtgcgataacaatatggagacaatgtttggaaactgaaccatatattggtgcaaccaggcaaacaagacacaaagatgaaggtggatgaacctccatctta

SEQ ID NO: 129393 - DNA, 2083 bp, Zea Mays
cagcgtcgccatcccatcgtcgtcgtcttccatagctgagcttgtggtgtctccgcagtccgcacttggcaattccgtggccattatctactcctcggctcctctcctcgcagaagaattcgttcccccaatttggagttggaaaagcgtcgaccccagaaaacgggaggcctcgacctcgctagtctccgttccattcgaaaagccatcgcctggtgagcgagaaggggaaggtcgatggcgacgtgttctcgcccgctcttcgtctccgactcagcggcctccgcctcgccgtctcgggcgtcctttcgccgccttcgcacggtcgcagtcgtatcgatttgggaacccctgccccacccaccactgcgggctgcagcctgccgtttcgctcgaacgaagcaatgctccaggagatccaccgagtgtttggcgagtggaccgtccgtttccagattgacgcggccaataaggagaatgctgtcccgttactcttcactgatggtcactttgcacggcaacctcagccggtgctacaaggccatgagcgcgctgcggccagatggggtatccaggcacttcatgtccgctggtggtttcgaacgcgtcgttttaggggtggtgctcgtcatgtccatctcgggagcttcttatacagcaccgtcatcatcggcgctcacagaggaaaacttgcttttcctggaggcttggcgcgcggttgatcgagcatactatgacaaatcttttaatgggcaaagttggtttagataccgtgaaaatgcccttcgcaatgaaccgatgaacacaagggaagagacatatgcggcaatcaagaaaatgctttcaacattggatgacccttttactcgtttcttagaacctgagaaattgaagagcttgcgggaagtctggtacgcaaggcgcactcacgggtgtaggtttatcgattggttacccaatggcaattaatggatcaccttcaggagttgctgtcatgacagccacccctggtggtcctgcagaaaaggctggcattcttcctggagacaccattttggcaattgacaacagaagcactgaagatatggatatatatgatgccgcagaacgcttacagggccctgaaggaagttcagtagatttgtctattcgtagtgggaccaataccaggcatgtcgttctaaagagacaaacagtcaatttaaaccccgtgaggtcaaggatgtgtgagattccaggttcaaaagatagctcaaagatcggttacatcaaattgacaacatttaaccaaaatgctgcagaatctgttaaggaagccattaagacattgagggacaacaatgttaaatcctttgtgctggatctgcggaataacagtggtggcctttttcctgaaggaattcaaattgcaaagatttggatggacaagggtgttattgtatatatatgcgatagccaaggtgttcgtgacatttatgaggctgatggcgctgatacaattgctgcatcagaaccgttggttgtgctggtaaacaaaggaactgcaagtgcaagtgagatccttgctggagcgctgaaagacaataagagggcagtcgtatatggggaaccaacatatggaaaagggaagattcagtcggttttcggattatctgatggatctggcttggctgttaccgtagcacgctatgaaactcctgcacataccgacattgacaaggttggtgtgattccagaccgaccactgccagcttcatttcctaccgatgaagatgccttctgcagctgccttagggattcaacggctgcttgcaatctgaatgctgctcagctgtttgcaaaatcatgaccaggcccttcattcaacattttgggtcttgggcgttgtacagataaccgtggtgtttcgtaggagctgcttgtgcgtggtgtgtgggtagtccgtaattcttttcattagcattgatttttgtcccagttttatcgcctgtgaaatgaaagcattgtttctgcgtgaaatcacggtcgtgttgaacatgcacttgatgcaacaattttgaatggaagcactaagaaaacctgc

SEQ ID NO: 129394 - DNA, 518 bp, Zea Mays
aagcaacattaacaaaatctagaataacgatagcagttccatgtaaacaaattgcattttgcacccttccataccagctatgctttgtgctgaaacgactccaagttcatttttcgcagtggaaaggtaatatgcccttgcatcaccaagagaaagctttaacattatttaaggatccaaagccagccaagaatattaactacttcaaacaggaaaaatattcagggcccattcagcatggctcctccaaacacgccagagcatttgagacactttttgcagctctgcctcctcagtcctcactcccaaaaggctgtacctctactgttcaccccaagacgactcctcaaaatgtgttgagaagcccgttttggggtcaacagtatagaaagccggagctattttgggctgagcagccggagccacaaaagtggctcctcaagtgctccggctcctccggaggagcacttcaggagccaagccaaacgggccctcaaagcaagagtttaaagatttaa

SEQ ID NO: 129395 - DNA, 447 bp, Zea Mays
taccagctatgctttgtgctgaaacgactccaagttcatttttcgcagtggaaaggtaatatgcccttgcatcaccaagagaaagctttaacattatttaaggatccaaagccagccaagaatattaactacttcaaacaggaaaaatattcagggcccattcagcatggctcctccaaacacgccagagcatttgagacactttttgcagctctgcctcctcagtcctcactcccaaaaggctgtacctctactgttcaccccaagacgactcctcaaaatgtgttgagaagcccgttttggggtcaacagtatagaaagccggagctattttgggctgagcagccggagccacaaaagtggctcctcaagtgctccggctcctccggaggagcacttcaggagccaagccaaacgggccctcaaagcaagagtttaaagatttaa

SEQ ID NO: 129396 - DNA, 3676 bp, Zea Mays
ggccgcctcccgtgccgagggatggccaaggcggagaagctggtggtggaggtggtggcggcgcacaacctcatgcccaaagacggccagggctcctcgtcgccgtacgtggaggtggagttcgagcaccagaagcgccgcacgcgggccaggcccaaggagctcaaccccgtctggaacgagcgcctcgtctttcccgtctccgaccccgacgacctgccctaccgcgccatcgacgttggggtatacaacgaccgcggcgccgccgtcggcggaggcggcgctccgcacgggcggaacttcctcggcaaggtgcgcgtcccgtccgccggcgtgccggcgcccggcgaggaggcagtaccgcagctcttcaccctcgagaagcgcagcctcttctcccacatccgcggcgagatcaccctcaagatttaccgcgtcaactccggcgacgtcgtcgtcaagtccaagcaggagaagccggcgaaggcggtggtggttgggccggaggtggtggcggcgccgacggtgactgggcccaagaagcagccgcactcgcacccacacccaccgccgccgcagcagcagcaccagcgccatcctctggcggccgtgcagccgccgccggagccgcccatggatgtcatgccgcaaccgccggtcccgatggctatgaagccggtggcgatgcacgcggacccttaccccgtcccgcccatgttctccggccctgcggacttctcgctgaaggagacgcggccccgcctcggcagcggcgtcgtcgccgacaaggcgagcgcgacctacgacctggtggagcaggtggagtacctctacgtgcgcgtggtgcgcgcgcgcggcgtgcccatggcgaccgaggccgtcgccgaggtcaagcttggcaactaccgcggcgtgacgccggccgtcccttcgcacaactgggaccaggtgttcgccttctccagggagaccatccagtcgtcgttcgtggaggtgttcgtgcgcgcgcggggcagcgacgaccacgtcggccgcgtctggttcgacctatccgaggttccgcgccgcgcgccgcccgacagcacgctcgccccgcagtggtacagcatggaggaccgcaagggacagcgcggcggcgcggaggtgatgctcgccgtctggttcggcacccaggccgacgagtcgttcgcggaggcctggcactccaaggccgccggcgtccacggcaacggggcgcttggctccatcaggtccaaggtgtacgtcgcgcccaagctctggtatcttcgtgtctccgtgattgaagggcaggacctgttccccatggacaagggcccgttggcgatcggtcgattcccggagctcttcgtgcgtgcgcaggtggggagccagatcatgcgcacacggccggcgccggtggtgtcgacacggggacctgcgagtccattctggaatgaagacctgatgttcgtggtggctgagccatttgaggagttccttgttctgtccgtggaagatcgtgtgtcgccaggccgtgatgagttgcttggccggctcgtcgtgccggtgtctgccattgagaggcggtgggattggaagccagtggtttccaggtggttcgggctggactgtggtactggtggtgggggcaatgttgctggcaacagtgtgcacaggttcgggagccgccgtgtgcatctccggctaagtcttgatggcggttaccatgttctggatgaggctacagcttacagcagcgacctccagcctacagcaaaacagctatggaagccacatgttggagtgctcgagcttggtgttcttggtgccactggcctgatgccaatgaagtcacgtgatggtggtaggggcgcgacgacggatgcttattgcgttgcaaagtacggccagaagtggatccgcacacgcaccattgttgactcgttgtgcccccggtggaacgagcagtacacatgggacgtgttcgacccctgcaccgtcatcactgtaggtgtgtttgacaattgccatgttgacggcgcatctgggagtgctgctcgtgacagttgcattggcaaggtccgtatccggctctcgacattggagactgatagggtgtatacccatgcctaccctctgctgatgctgcatccaacgggggtgaagaagatgggggagcttcacctagccgtgcgcttcgcctgtggcaacgccggcaacatgttccatgcctatgcacacccattgcttccgaagatgcactatgcagagccactcctcgtgcgccaggtcgagacccttcggtgtcaggccaccaacgtggttgcggcccggcttggacgtgccgagccacccctcggcaaggaggttgtcgagtacatgcttgaccatcgctcaagcctgtggagcatgcggcgcagcaaggcaaacttcttccgcctcatcaatgtgctctctggccctgttgctatcgggaggtggttcgagctcgtccgctcttggcagcgcccggtgcactcatgcctggccgtgttcacgttcctggtgttcctcgcaacgccggagctggttcttccgacagcctttctggccatggcgttcgctgggctctggaggtacagaggccgcccaaggcacccgcctcacatggagatgaggctgtctcacgcggacggagccaccgcagacgagctggacgaggagttcgacacgttcccttcgacccgcggcgacgtcgtgcgtttccggtacgaccgcctccgcagcgtggccgggagggtccagacggtggtgggcgacatcgcgacgcagggcgagaggatgcaggccgtcctgagctggcgtgacccgagggcgacgctgctcttcgccgtcgcctgcgtcgctgccgcggtgatcgcgtattgcgttcccacgaaggtgatggttgggatgtggggcctctacgccatgcgtccgccgaggttcaggagcaggatgccttccccgctgatgaacttcttccgaaggcttccttccagggctgatatcctgctctgatccttcctactgctgtctggccggctggcagtggataagtcagtttggccctctgattcagttaggcggttttggcaggaagggagtgagtctaggaagaaacaaattagtctgctgatgtggtggttgttagcttgatgtcgtttaccctgttggtgttaggtattgcagtactgtgtgctatgtgatgcgtttggtagtagttagttgtaggctttgcagtaccagcagctgttcttgtgcttcggcttaagttgtgcaatggctagctgagtagaagtagtttgggtagtaggttgtgatgttttcggcaaactggtgatggtgagatcatgagtttcagtttaactagagaactgatttgatctttatgccctgtgctttatttaaaaactgtctgccggatgccggttgcccaaagtatcagtagcaaatgcagaatccgtgttttttctctcttggagctcaccagagtagtacaattgtctccttaaatatcttccagtctctaaactcttgtctgttcttgaaagatggaatggttgttgttccactcacgtgtgcatggctcccatgtggtttttgttaaggttgtctccataccgttcccatgtggctcagggcttaaagtaatgga

SEQ ID NO: 129397 - DNA, 3873 bp, Zea Mays
atggcaatgccacccgccgcggtggcgcggctgcgggagctggtgccggcgccggggacggaggaggagctggagctcgacgtcgccggcgcggccgcgctcgtcgagtgctgctccggcctcctccgccctggcggcggcggtgacggcgacgccggggccgcgctcgaggcgctcgaggcactctgcgctgcgggcggagggggcgcgatgcgccgccatgccgatgggctcgctccgctggtcgtcgcgcgcctcggcgacggacacgcggccgtgcgggaggccgcgaggaggtacctcgtgctgctcatggagatgaaggagatgaatgcaagaacggaaaacacagagccaaactcaaacgtgccaaatgaccaacacgttcactatacgacaatcgaaatggaatcttctaataccagccaagcaagaaaaaattccaaagagaaggtcagcgcaagagacatctcgcttcttgcaggagaaggagatattacaaggaagttagtcgaacctataaaggttttctctgagaaggacctactaagggagataggaaaagtagtatctactttgcagccagataatgagtggtcaatccggataactgcaatgcaaagagtggagggtttagtgcttggaggtgctgcggactattcggccttccccatgctcctaaaacagctcatgactcctctaataactcagcttctggataggagatctagcgttgtaaaacaggcatgccatttattaaacttcctatcaaaagagctactacgtgactttgagccatacgcagagctgcttattccggtccttcttaagaatgtcgtgatcaccatccttgtaattgctgagtctgctgataactgtataaaagagatgttaaggaactgcaaggtggctcgtatactaccaaggattattgaatttgcaaagaatgatagaagtgctgttcttcgtgccaggtgttgtgaatatgcaacactaatgttagagtactgggttgatactccagaaatacagagatcagctgacctgtacgaagaccttataaaatgttgtatagcagatgcaactagtgagatgataaatgatgaagatactgagacacctcaagcgcatcttcctccagttaaaataagtcatcttcaacctagttctttcgttccagctgtaatagataaagttgttaaggtcgattctgggatatcattttcttccggagaccttcaaacatcagacatactatacctccagtgtgatgatataatcgcaaaaggcctagatgcgggcaataacgatgacacactgactattggaagttcttttgaggataagatcacactaagagaactagaaactagagacagagatactgagaaaaatgattcaggcaacagtacaggtgtcaattcatcggctcgtgaccaaccaactgccactcccattacaatagaagcaccttcagaaatgtcactggatgatgcaactgttgtaacaattgttcaagacaaggctgaatgcaagctgaatgttgaaccgataaatcagcaagttcaagcacaagaagatccttctgacttgacatgcctgtcacctgcagttaactcgaaaggtgcagggaacttactaaaggaaaatcctgttgaagtaagctctgatgctggatcaagtggaaaagtaggaactcataagaagagtgctgtttctaagaagccacgtggtagttacacccctaacttccggcgacctctcttgagtaagcagatgacaaattggttttatgccagtaccaaaagtgatatacatgagaagcaactcattctgggagaaatggtcaacaacatggatgtgccctcatctattacagaggcactttctttgggtcttaacccaagatcagattggatgatgaaggtatatgcattcagtttcttaagacagtgtttgctagaacgtggatcaaaaggcactcaggaagttgcacaaaattttgagaaggttatgaggcttgtttgtcgatatctagatgatccccatcacaaagtggcacatgctgctctctcttcactagctgatatcatgccagttttcaagaagccttttgaacattatctcgacaagacactgccccatattttctcccggttaaatgatccaaaggaatcaatcaagcagcagtgcttggcaattttgaaacatgcaaatgaaagttatcccattgattctctcttacccgccttacttcgttcgctagatgagcagaaatctcccaagtcaaaactggcagttcttgagtttgcaaatgcctcttttgtgaaatgcgaagtcaattctgaaagctattgtagcagcagcttcctcaagccatggtttggaaaacttgcccatttgtttaacgataaaaacaagaaactgaaggaggttacagtggttggtttctcatctatttattctcactatgatcctacatccatgttaagctttttggtcaccctgtcaatggaagaacaaaagcggctaaaacgggcaatgaagcaattaataccatcaatagaaagtgacatggaagagttcttgcaacagaagagacataagcaaaagactccatcttttgatatttttactgcaaaatcaccacttcatcctgcatttcaatctgcaaaatcaccactgcatcctgctcatcgatcttctaaatcaccactccatcctcgatttgctgagtcgcccggtcattccgcatataaatacgccaagtcaccgctgcatccctcgtatcaacctgctaactcaccgctgcatccctcgtatcaatctaactatgtcaaggctgatgattgtttcagttctgcactccagtgtctcccggatacatctttggaagtccaggaggaccgtactggaaggattgagatcgaatctcctaataaatcttatgggcacaaagctgaaatgatggacaagaagtcctgtaccgtgaggtcaaagaatgatctcccgagaagaagtgacttcagtgtgatatcaaataacatagttcagaatgcaagcagtagggacagtcggagtacaaagatacttgatgaaccaaacgacagtgaactgcacataaatacccgaaaaaacaaagttacgaggacgaggaatgatttgcaggatcatgagtactatttagtgtgttctctttctgcaacagttacatgctataagtgtcctatgagcttgtttttacaaatcttggcaacagattttacaaagctagacaccacctcatcttgcactcgttttcagaatttacaccagatgtcttcttcccttctcgagatgcttgatgacccagatatggccacaagagagcttgcactttctctgctggctgaaatccttgaaaagcaccagaaggcgatggagaactgcgttgagcttcttgtagttaaactgctgcatgcaaccaaagacggtgccttgaaggttgtaaatcaggcccatatctgcttgacaactgtggtcactcagttcgacccactcagatgccttggggccatcgcttctcagctggccagccaggatgagaaagttcttattgtaagcatcaatagtctgagcaagcttgtgatgcgattctcggaggacaacctgatggctcatctgccaacgtttcttccagcacttgtggatgcttccaaaaaccgcagtccgtatgtccgcaaggctgcgatggtgtgcgtggtggacgcgtacctgaagctggggccggcgctgctgccgtacctggagggcctggacagcgcgcagctgcagctgataaccacccacgccagccgtctgtcccaggcaagattgattgcgtcggacggctga

SEQ ID NO: 129398 - DNA, 3375 bp, Zea Mays
cccccccccccccccggggtgccggcggccgaaatgtgatgatgagttcttgtggcgtccgcccatcatcatagttccctgtcgtccttggcccatttgttcctgtcctcgggggagcgaggcgtcggggctcgcgcgcttcacgtgttgattcctcgctcccgcacactgcctcctcgtcggatttcgtggtgcggatgccgctttttggacgcagctgatcagttgttgctttttgttccgttctagcgctcctgccttgtcccggttcttctctctctttctcgctcactgcctgtcttcaaaagtttcgaactttgaaatctcctgttactatgacgatgtgattacggaatatgacgagttattatgactctggatttgcaggaagggacggtgtgaatgaaaggcgctcaggataaaaggcacagaaagaagcaggacctccaggttctcgggcccttcccgggatgcctggggaggatgatcaacatgttagacctcagcaatggcgtggttgctaccaagatgctcactgagaaggcgcatagagatgtttctccggccggaaaagaccggagtaatactttcaagatggcaattaatcccccagctcagactgaagataaacaaagggatagtcagacaagaaggaatttccctactaaaaggtcaaactcgcctactaaaaggactggtgcgatgcctgttaaaatgctgatggagcaggacatgtggaaagaaagacggcctgatgaggagccactgaatgttgttgcaagattaatgggcctacatgagcctccaggtcagcaatccaatttccctttaggaagacaattggataagaaatatcagtgtggtggttttgaagagaactactggaatctcaagtcaaagaaggaaagcaaatgccaccaaaaccaaaaggcagggccacgccatcagcacacttggaatggttctggtgaccaaccatcaagaatcagtagcagccagagcatgcaccaagaaaatgagacttgtgagaagaggatgtcaattgttcgcgagaagtttgctgaagcaaagcgactagccacagatgagaaacttcttcattcgaaggagttccaagatgcactgcagtttttaagctcaaatagagacctattcttggagttccttgacgagccaaatcctctattatcaagcaaccgttatgagttccaacctgttgcaccaccttctgaagtaaagcaaataaccatactgaagccatcagaaccagcaaagagaaaagacagcatctttgtggggagacaactgttttcagatggagatggaggtgaaagtgaacgaaacagatacaggcgccatcagagttcggatgtttccccagcaaattcaaatttgtctgagccaacaaaaattgtagtactaaaaccaggattccccagttctcatgactccaggattgcgaggtcttcattatcatcagcagaagacagtgaagatgaaagtatgatggcggttgatgaaaccatgtgctcaagaaggttggcaaaggagatcacttggcagatgaggatgcggctaaaagacaggcaagacgaagagagtatgctctcatgtgaataccctgacttttatatcggagatgactccttcagtaaatcagaagttgagattccaaaagagatgtgtggtgaaacaagtggggaattggagtttggcactccgacttctggccgctcttgggattttctgagtagaagtggaagtcctttctctgcgtcatgctctagtcaggcatcccatagaagggagccgtcagtagttagggaaggcaagaagaagattttagagagattgtctatggtatcatcaacagtcaatattgaggaagaaatggaaggtcgcagaagtacaggcacacttggtgacatgctcacaatatcgaaagtcaaggaccaggaagaaattggggctgaaacactggggagcccagcacctgagctggaacctgaggagcctttctcatgtttgccaagatctcgatcccttccactttctttgtcctatggagtcgctgagtcaaatggaataacctctggcactcatgaagctgaaaaggaaagaatcaggaagtcgtcatcgtttagggaaaaagtttctagcctgttctctaaaaataagaaatcaaccagggagaaggtagatccatctgtgagcaatagactcaaacatggaggggctgtgactactggtgatgtgaaggaaatctgcaaccatcttgccctagacaatcttcagaaacaacatacttgtctaaacacagatgagaagaacactgtgcaaggactcgtgactagttcttgtgagaccaatagtgcagctgatatccctgccaaggatatttcctccatttcaagtcttggtgtcccaggaatctttggtggccttcaggatgaacctagtcctgtatctgtactagatggaccgtttatatgtgataacaataggaggctactgtactcatctgaaaatttcatcacttcatccccacaagctttgtcaaggtctcccctgatcggatcattttcacggtcactgtcatgggaggatcccccgctggaagtcatgtcgccgaattcgttgagactctcaaggcttttctcgaaggctgatgaagatctagattcactgacgtttatccagaagctggtccactctcgaggcacgggtcgagaaagttgcatattagctgaccctttggacccgagtttgctcgagaagatttcggattacgaagaagatggaattaagtttgggaaaaggcggcccaaacagaggctccttttcgacgccgtaaacgaagcgctcatcgagcttgcttcgatggcggaactggctgcgtacccctggggtagatcatgctcttcggagcacggggattgcaagaacggttccagcagtaattctgcggctgaggaaatctggcgggtcattaggaactggtcgatacttgagaagtaccctcccggtgaagctattgaaagaaatctcttgctggagatgatactaaagagggaggtggcggaggcagccagcgctgacacgactcggttagagacgtttgatctcaacaccacggtctgcgccatggtcttggatggcctggttgaagagacagttgtagatctgactaactactgctagtgaggtacctctgccctctaactaataatctcgcgctctgctccctagtgttggtgtttggtgtgatacttgctgccgtaacactgctccatgctattactcgctcaaatgtgatgccaaataaatgggtctctacgttgtttacgtttctgttttgatctcttctaccgtggt

SEQ ID NO: 129399 - DNA, 971 bp, Zea Mays
cgtttctcccgttcacctggcatccacgctcgattcggccgttttccgcatccacggtgccaggcgaccgccgccgcttccctactcacccttggccggcgacgacgagcgcccactacggcaggtacgccccccatccccttccttctctgcgaaactgagcacttgaccccgaaccctaattcaagctactgtatttggctatctatatccggatctgatccaatcacaagcgcaagtgtctgcacgtatcgtccctgctaatttcgttctttatatcctttgttggatccgccgctgcctcctgcattccattccaggatgacgacgctcaggaacctcaagatcaagacgtcgacgtgcaagaggatcgtgaaggagctgcgctcgtacgagaaggaggtggagaaggaggctgccaagaccgccgacatgaaggagaagggcgccgatccctacgacctcaaacagcaggagaatgttttggctgagtcaaggatgatggtcccagactgccacaaacgacttgaaactgcactggctgacttgaaagcaacactggctgaactgaaggagtcaaatgagcaaggtgccgagattggagaagctgagagtacaatcgcagaagttgaagcagttgtcaagccagcagaagattaaactaaaaaaaactcttggtttgctgaactgttagcgcacatcctattttctcatattcagcccttgtgagcttattacgatatgtttgaggcgtcaaatcctgtaccattatcatcacttctgtcttgaaatttgagttttatgttcccaagttcaaagcgttactgtttgttgtctgggagagcgcacatccctggcttctccgggaagttgttagtgtaaattgaaattaagaaaaaatggacgaatttgaatacagacgaaatttgcgacggtcgatggaaatgtattgtctctattacattatctcc

SEQ ID NO: 129400 - DNA, 775 bp, Zea Mays
cgtttctcccgttcacctggcatccacgctcgattcggccgttttccgcatccacggtgccaggcgaccgccgccgcttccctactcacccttggccggcgacgacgagcgcccactacggcaggatgacgacgctcaggaacctcaagatcaagacgtcgacgtgcaagaggatcgtgaaggagctgcgctcgtacgagaaggaggtggagaaggaggctgccaagaccgccgacatgaaggagaagggcgccgatccctacgacctcaaacagcaggagaatgttttggctgagtcaaggatgatggtcccagactgccacaaacgacttgaaactgcactggctgacttgaaagcaacactggctgaactgaaggagtcaaatgagcaaggtgccgagattggagaagctgagagtacaatcgcagaagttgaagcagttgtcaagccagcagaagattaaactaaaaaaaactcttggtttgctgaactgttagcgcacatcctattttctcatattcagcccttgtgagcttattacgatatgtttgaggcgtcaaatcctgtaccattatcatcacttctgtcttgaaatttgagttttatgttcccaagttcaaagcgttactgtttgttgtctgggagagcgcacatccctggcttctccgggaagttgttagtgtaaattgaaattaagaaaaaatggacgaatttgaatacagacgaaatttgcgacggtcgatggaaatgtattgtctctattacattatctcc

SEQ ID NO: 129401 - DNA, 2232 bp, Zea Mays
gacggctgcaagtgggcctaggcccagtaacgtgtgtgactgggatgggccacggcccacagaccggcagatccggacgcccccaaggccctcccaaccctaccattcctttctctccctctcgccgtcgtcgccacctccacttggccccgctcatcgcctcctccgacgaccaccgtccaccggcgacaaggacagcgacgatgcagtcggcggcgtggaggcgtcacctcctcgaccaccacctctccccttcaacctcggctgccatcgccgccttcagatccgcctcccagcccgggctcgctccccaagggttgtttggagcggatggcgcaagatgcatgtctgcgagggcgccggcggtcaaggggtccgggcatctcgtccgcaagggcaccggagggaggtcttctgtgagtggaattgtagccacggtgtttggagctactgggtttcttgggcgctatcttgtgcaacaacttgccaagatggggtctcaagtgcttgtcccattcagaggttgtgaggattctcctcgccacctgaagattatgggtgacttgggtcagattgtgcccatgaaataccatccgagagatgttgattcaattaaggctgttatggccaagtcaaatgtggttattaacctcataggacgagagtatgaaacaaggaactacagcttcgaagaagtaaaccaccatatgcctgaacagcttgcaacaattgctaaggagcatgggggtatcataagatttatccaggtttcttgcctaggggcgtcaccgtcttctgaatctagaatgttgaggacaaaagctgcaggagagcaatcagtcttcaaagaattccctgaggctacaatcatgaggcctgctaccatgattggcacagaagatcgaatcctgaacagatgggcacaatttgcaaagaattggggtttcctcccgcttgttggtggtggatctactaagattcagcctgtgtatgtaatcgatgttgctgctgctattgtgaactccctgaaggatgacggcactagcatgggaaagatatatgaacttgggggccctgaaatttacactgtccatgagctggctgagctgatgtacgagacaatccgcgaatggccaagatatgtcaatgtccctcttcctgttgcaagggctattgcttccccaagggagatgctgctcaataaagtgccgttcccgcttccaacaccatccattttcaacctagaccaaatcaacgcatttgctgtggacaacctcgtctcggaagatgctctgactttcgaagacctcagcatcatgcctcagaagctgaaagggtacccggtggagtacctggtgtcttacaggaagggcgggccgtcgttcggctcgaccgtgagcgagaagatgaggagctcggagatgtagggagcctcgtaccacctccgaagatactgtagattcctatgatcatttggctgcattgttccggccacctgacgccgtctcgccggttggagcagcaggaccaaattcccttgcgtggctcctgctctttgccttgtttgtttgtacgccaataaggacccaaatttccgtgcatgtgaagagaagaaagaatcgttccacagttttacactgaggggtttttttcgtacacagcatgatacaatataacccttgtttctggattcatacattgttcgttctgcccaaatgtctctgcatgttgcagctgcttccgctctgctctgcgccggaccgaacagaaacgggaagcttgcaagctgctctggactgtctcccaacaaccaagctgactgtctgacgaaatctgatgtggcctctctggttttacgcaaggatcaaggccaacctgaagtggacttggcagcgtgcgtgtttttttttaaccagcaaagatcagcagtggcgccatcacgggagaaggatgtgccaccacctcccggagtaccggtagagtggcgaagaaaatagaccagcagagccgcaatcacgcagtgatcacatccgtctctgctgatgtgctgctatggttctggttaccggagccatcagtcacgcagctgtcctgccgctgaatctgatgtgatgcgtcaacagaagcaggtaccacggcggtgttggtatccattttcagtttccgttccgggcacgtttgtctgtttgtttgatctactaccatcgcattgaatgaaaattctgtctgagt

SEQ ID NO: 129402 - DNA, 119 bp, Zea Mays
tttttgaacttaatggtaggagctgccttgtcattaagaataagattagaattaactcggatttaaggaaaatcgtgaccgaaacctagacagggagcccaaacaacacaagcagtgac

SEQ ID NO: 129403 - DNA, 1205 bp, Zea Mays
atgcggccattcgcatgcaccaggctgccaggccttggcattttatattctgtattccatctcactcacatcggaggtagaggtgtgcggcgatcctttaatgtcaagctgtgtttcctgcaggcggcgcaagcttccattgcggcgggatcccaagtttgggtcgaggaccccggtgtcgcttggatcgacggggaggttgtaaaagtcaatggagacacggttacggtcagatgttccaatgataagacggttacggtgaaagcgtctaatgttcatgctaaggatcccgaggaagcgccatgcggagtcgatgacatgacaaagcttgcctatctgcacgaacccggggttcttcagaatctgaaagctagatatgacatgaatgaaatttatacatatactgggaatattttgattgctgtaaatcccttccgaagactgccccatctgtatgatactcagatgatgcagcaatataaaggggcagaatttggtgaattaagccctcatccttttgccgttgcggatgttgcatatagattgatgcgcaatgaaggtataagccagtcgattcttgttagtggagaaagtggtgctggtaaaacggaaagcaccaagatgatcatgcgatatcttgcttacatgggtgggaaggctgcttccgaagggcgaactgtggagaagcaagtccttcagtccaatcctgttcttgaagcatttggaaatgcaaagactgtcaggaacaataactcaagtcgtttcggtaaatttgttgagatccagtttgatcagaaagggaaaatatcaggagctgctgtaagaacttatcttcttgagagatcccgtgtctgtcaaatatctgacccagaaagaaattaccattgtttctacatgatatgtgctgcccctcctgaggagcgtgagagatacaaactcggagatcccagcacatttcactaccttaatcagtccaactgcattaagcttgaaggcctcgatgaatctaaagagtaccttgaaaccaggaaggctatggacattatcggaattagttctgaagagcaggaagcaatctttcgggttgttgcggctattctccacttggggaatgtcgagtttgcagaaggggatgatggtgattcatcaaaacccaaagatgaaaaatctctttctcatttgagaacagctgctgagctcttcat

SEQ ID NO: 129404 - DNA, 3733 bp, Zea Mays
ctgtgtactcacggttgtttgattggcttgtgaataaaatcaacaactctattggccaagaccccaactcgaaatgcttaattggagtgctggatatatatgggtttgaaagcttcaagacaaacagttttgagcagttttgtatcaacctgacaaacgaaaagctccagcaacacttcaatcagcatgtgtttaagatggaacaagaagagtacaccaaagaagaaattaattggagttacattgagttcattgataaccaggatgttcttgatctcattgagaagaaacctggtggaattattgcccttctggatgaagcttgtatgttgccgagatcgacacatgaaacatttgctcagaaattgtatcaaacttacaaaaatcacaagcgctttgctaagccaaaattatctcggtcagacttcaccatatgccattacgctggagatgtcacctatcaaacggaattatttctggacaagaacaaagattatgttgttgctgagcatcaggctttgttgagtgcttcaaaatgtgcatttgtttcaggccttttcccttttctatctgaggattcctcaaaatcttcaaagttttcatccattggttctaggttcaagcaacaattgcaatctctgttggaaactctgagtgcaactgagccacactacatccgctgtgtaaaacccaataatttgttgaagcctgcaatttttgagaaccagaacgttcttcagcaactcagatgtggaggagttatggaggcgattaggatcagttgtgctggatatccgaccagaagaacattctatgaatttatagaccgttttggtattcttgcgcctgatgttttgagtggaagttctgatgaggtcagtgctgtaaggaggttgttggacaagatagatcttcaaggttaccagattggcaagacaaaagtattccttcgtgctggtcagatggctgaacttgatgctcgtagaaatgaagtgctagggcgttcagctagcatgattcagaggaaagtgcgttcattcttggcacagaagaatttcattgcattgcgaagatcagctttacaaatccagacagtttgtcgcggtgaacttgcaagaagagtttatcacaacctccagagagaagctgcttcactcaagatccagactttgtaccgtatgtatactgccagaaaagcgtacaacgaactttctgcttcagcagttaccattcaatcaggattgcgcggcatgtgcgcgcgtaaagagctccacttcagaagacaaacaagagctgcaatcatcatccagagtcgctgccgtcaattcttggcgagattgcattattcaagaacaaagaaagctgcaattactacacagtgtgcgtggagagggaaggctgctagaaaggagctccgcaagctcaaaatggctgcccgggaaactggtgcattgcaagctgccaaaaataaacttgagaaacaagttgaggagctcacgtggcggctacagttggagaagcgcatgcgagctgatctcgaggaaactaaatcacaagaaaatgcaaagttgcaagctgcattgcaggaggtgcaacaacagtacaaagaaacaaaagaaatactagtacaggagagggaagcagccaaaaaggctgcagagatagctccagttattaaagaggtccctgttatagatacagagctaatgaataagcttagagatgaaaatgacaaactgaagactatggtcagttcgcttgaaaagaagatcgatgatactgaaaagaaatatcaagaaacaagcaaaatcagtgaggataggctcaaacaggcaatggatgctgagactaaaatcgttgacttgaacatggcaatgctaaggcttcaagagaaaatatccaccatggaatctgaggagaaagtgcaaagacaagcgcttctaagcacgccagtcaagagcatgtctgaacatttgtcaattccaattgctccaaaggcacatcatttggagaacggctttcatgaggttgaaggacttaaggaaccccaaagtgcacctcctgctattaaggaatatgggaacggtgatcctaagatgaaaaaatctattgttgacagacaacttgaaaacgtggatgcactcattgagtgtgtagggacaaaccttggatactgtgcagggaagccagttgctgctattaccatatacaaatgtcttcttcattggaaatcattcgaggcagataagactagtgtttttgaccgtctcattcagttaataggatctgctatcgagaacgaggatgacaatgacaaccttgcttactggctctccaatacatctagcttattgttcctactgcagagaagtctcaaggctgctggtgctcctggtagcgtttcacgaaagaaacctcctcaaccaacatcattatttggaagaatggcccaaggcttgcgttctgcatcttttgccaacatgcatgttgaagcgacagatgttgtgcgccaagttgaggccaaatatcctgccttgcttttcaagcagcagctaactgcttatgtggagaagatatatggaatcgtccgagacaatattaaaaaggaattatcatctttgatttcgctatgtatccaggctccaagaacaatgaaagctagcatgctgcgagtttctggacgattatccagtcaatctcagagtcagagcaaccactggcagaaaatcattgagagcttggataagctcttgaagatactgcaagataaccatgtgcctccggttttagctcagaaaatatttacccagatattttcatacattaatgtccagctattcaacagtctattgcttcgtcgtgagtgttgctccttcagcaacggagagtatgttaaggctggtctagctgagttggagctgtggtgtgcaaaggcaacaactgagtatgcagcatcttcatgggatgagctcaagcatatcaggcaggctgttggatttttggttatattccagaagttcagaatatcttatgatgagatagtcaatgacctatgtccgatcttgagtgttcaacaactgtacagaatatgtacacaatactgggatgacaagtataatacccaaagtgtttcatcagacgttcttagtaacatgcgggtgctaatgacagaggattctaacagtgatgaaagcggttcgttcttgttagatgataattcgagcatcccgttctccgtggatgatatcaccaactcaatgcaggagaaggacttcacggatatcaaaccggctgatgagctactcgagaaccctgccttccagtttttacaggattagcgctagtgaagtcctcgagcattttatgctgctagatatcttgtcagatcatttattgatttgttgtatattttttggatcctttctaccacatgtgcctttttttagttatcttatccttttgagctagcttttgtaaaaattcatataggtatttgttagggttgggatgggattccgcccttacagttagaaaaggccttatcttttaaagcggggcaaatgattctttgtagggcaacatgaaatcaatctttttacccaagggtgtggtgagaaggggtagatgcaatgtttgtagcctcccagttatagattgtgtaaattatatactgtaaatcaacagtgcaatggaaaagaaaggaaagctatatagcaagtgcagttatgttgtc

SEQ ID NO: 129405 - DNA, 2771 bp, Zea Mays
aaacagttttaccattttatagaaatgaataaaaaagctgagaagtttgacaatctgcaacagttttttatggcgagaagacgaaaaaaaggccaaataaacagggcccagtgggtggcccgtggctgaacccgccatcggatttcgaaggttcgaggcaaccccaaaatccaaacaaaggaacattccccgggaagcggaaacgaaccactccgggcctccagcttttctatttttcataactacccttatcctccaccggtgtttgcgcggagcgactaggggcacttccgtccgtttcgcacccccgaataaacaaggcgcaggagcagcagcagcagcaggttcttgtccccttccatccgtcccagtcccaccgccaccgtcgcaccgcatcccttctccccagctcgccgccgccgcgcccacgatcgacatggcgaagctggggcgttaaagcagttgaaaacatttccgatacagctggcaagctttacttccgataacatttgtgcttatcaggatgagcaccgccaaggtcatgataacatacaagaggaagcgtgctgccacacatgcccatacagaagacgacacagttcttgactcatctcctgctgcctcaagcaatgtggctgtcagcagtctacaacttaagcctgagggccctgctgagactgccgtgataaatgaatataatcatattactcctaaaatgcagcagtctttctccacgtttcaacaaaacatcaaagaagaacgtgaaccagagaaaggacatgatcagctatatgaatcatcaccgtggaaagaacaacctgagatttgttctgccactattgcctcaaccgcagaggcgcatagcaataaatcacaatgcattgatggcacaaatagtcaaacccctgtttcaagttctctgtgtggcaacatgcttgctgataggatgattaaccagacaaaagattcaaatatctctgcccctgtggaaataaattctcctacggggatggaaaatgctgtcgcccctggccaatgtaagagcaggtttagtcctctgctcacctttcgcaggcgagttaagaagaaaacaaatttggatgaaccagcagaagaaatttgttcacttgacaacgacaaacagtgttcaacactgacatgcagcccaccacgctcatcacaggatgctacatcattactaaaacatactgctccaaaccctttggatattgaggataaggtaggtagattgaaaaatactggaccttctacagaagctgaacactcacctgaacaagaaagttcccacgtcgtaaaatcctcagttcaacatgtggttccacagattgctctagatgtaaaccaaaacataattctggaagatgatgttacaccaatgtcgaaccaaaagatgtccttggaagatgatgttacaccaatgtcgaagttcactggtgtgcaagaggtcagtgggcaagatacgccagtggaggacttcaacagaacatcaccaaatactattgaagtgccaaaagttattgatttgcaggggaagggacattgtactggggaaactacttctctgcagtctccaagacaaaaagttgatgccagttggttgaaacggaccaataaatctgtggcagaagatgttccagaatctcaaggttcaacaaaaaatattccaataattctcttggatgatgataatgatgataggggcaaggagctcgaaaattcagaggccctcgatcaagggctccatagtcaaaacaaaagaacttttgggaagattgacctgaactgtactgaattaagacaacagggacttctctgtttagatgactcaacaattcaaaggctgccagatctggatctagctgtcaatgctcgaaagcaaatgtctcgaccgattgaaaggctgtttttcacagaggagaaagataccatccgtggcaaacaagagcatcatgaagaaagctcaaccatgcacgccccatactcaaatttctttgatctgggtccaccgtggaacaccgggagtttgaagggaccaaaaggcttgccttcagaagtaaagtttggaataatggacagggctcctgagttcagtctagacctcaggctggatagtttcacagacaacaacagtgtggctgccctgaggagcgacaagttgtttctcggaagcacctccagcacatctcgtaagttaacagaaaagcttggcatgtactcctacaagaggcagtcggctccgtggtcagaagaagagctggactttctttggatcggggttaggaggtacggcgtgaataactggaatgcaatgctgagggacagtcggctgcggttttcaatctcaaggatgcccgaggaccttgctaagcaatgggacaaggagcagaagaaacttgtgggtcctgcgcaagggcccaagcccaaacggacctttcattgggcgaatattaccttggtagagcttcgtgctctggatgctccaagtcttcatttctcggggcccagacggacctttcattgggcgacgtctaccttcgcagtggccgtgctccagagagaggccaccagcatcatttaccaacaagcctgggcgtgggcggcttccctggggcttcttcatcgtatggaagaagtggcggcaggcgcagaagggcgtccaagtcgtactactacgagaacaagtcggcttggttccaggagccaccatcggacagggtgccccagcaacccggcggccgaatgggccctga

SEQ ID NO: 129406 - DNA, 3311 bp, Zea Mays
aaacagttttaccattttatagaaatgaataaaaaagctgagaagtttgacaatctgcaacagttttttatggcgagaagacgaaaaaaaggccaaataaacagggcccagtgggtggcccgtggctgaacccgccatcggatttcgaaggttcgaggcaaccccaaaatccaaacaaaggaacattccccgggaagcggaaacgaaccactccgggcctccagcttttctatttttcataactacccttatcctccaccggtgtttgcgcggagcgactaggggcacttccgtccgtttcgcacccccgaataaacaaggcgcaggagcagcagcagcagcaggttcttgtccccttccatccgtcccagtcccaccgccaccgtcgcaccgcatcccttctccccagctcgccgccgccgcgcccacgatcgacatggcgaagctggggcgttaaagcagttgaaaacatttccgatacagctggcaagctttacttccgataacatttgtgcttatcaggatgagcaccgccaaggtcatgataacatacaagaggaagcgtgctgccacacatgcccatacagaagacgacacagttcttgactcatctcctgctgcctcaagcaatgtggctgtcagcagtctacaacttaagcctgagggccctgctgagactgccgtgataaatgaatataatcatattactcctaaaatgcagcagtctttctccacgtttcaacaaaacatcaaagaagaacgtgaaccagagaaaggacatgatcagctatatgaatcatcaccgtggaaagaacaacctgagatttgttctgccactattgcctcaaccgcagaggcgcatagcaataaatcacaatgcattgatggcacaaatagtcaaacccctgtttcaagttctctgtgtggcaacatgcttgctgataggatgattaaccagacaaaagattcaaatatctctgcccctgtggaaataaattctcctacggggatggaaaatgctgtcgcccctggccaatgtaagagcaggtttagtcctctgctcacctttcgcaggcgagttaagaagaaaacaaatttggatgaaccagcagaagaaatttgttcacttgacaacgacaaacagtgttcaacactgacatgcagcccaccacgctcatcacaggatgctacatcattactaaaacatactgctccaaaccctttggatattgaggataaggtaggtagattgaaaaatactggaccttctacagaagctgaacactcacctgaacaagaaagttcccacgtcgtaaaatcctcagttcaacatgtggttccacagattgctctagatgtaaaccaaaacataattctggaagatgatgttacaccaatgtcgaaccaaaagatgtccttggaagatgatgttacaccaatgtcgaagttcactggtgtgcaagaggtcagtgggcaagatacgccagtggaggacttcaacagaacatcaccaaatactattgaagtgccaaaagttattgatttgcaggggaagggacattgtactggggaaactacttctctgcagtctccaagacaaaaagttgatgccagttggttgaaacggaccaataaatctgtggcagaagatgttccagaatctcaaggttcaacaaaaaatattccaataattctcttggatgatgataatgatgataggggcaaggagctcgaaaattcagaggccctcgatcaagggctccatagtcaaaacaaaagaacttttgggaagattgacctgaactgtactgaattaagacaacagggacttctctgtttagatgactcaacaattcaaaggctgccagatctggatctagctgtcaatgctcgaaagcaaatgtctcgaccgattgaaaggctgtttttcacagaggagaaagataccatccgtggcaaacaagagcatcatgaagaaagctcaaccatgcacgccccatactcaaatttctttgatctgggtccaccgtggaacaccgggagtttgaagggaccaaaaggcttgccttcagaagtaaagtttggaataatggacagggctcctgagttcagtctagacctcaggctggatagtttcacagacaacaacagtgtggctgccctgaggagcgacaagttgtttctcggaagcacctccagcacatctcgtaagttaacagaaaagcttggcatgtactcctacaagaggcagtcggctccgtggtcagaagaagagctggactttctttggatcggggttaggaggtacggcgtgaataactggaatgcaatgctgagggacagtcggctgcggttttcaatctcaaggatgcccgaggaccttgctaagcaatgggacaaggagcagaagaaacttgtgggtcctgcgcaagctgttggttatcttggtagagcttcgtgctctggatgctcaaagtctgcatctgtcggggcccaagcccaaacggacctttcattgggcgaatattaccttggtagagcttcgtgctctggatgctccaagtcttcatttctcggggcccagacggacctttcattgggcgacgtctaccttcgcagtggccgtgctccagagagaggccaccagcatcatttaccaacaagcctgggcgtgggcggcttccctggggcttcttcatcgtatggaagaagtggcggcaggcgcagaagggcgtccaagtcgtactactacgagaacaagtcggcttggttccaggagccaccatcggacagggtgccccagcaacccggcggccgaatgggccctgagatgtggccgagcatcatggtggtgccaccgccaacggcagatccaccgagggacgacgacgtgaagccccatgtcctcctccctgatgctaccctgaagcgcgcgataaggaggagtgcggactgggggtcgttcagcaggaggctgttcctgtccggcgatctcaacgggggggctgcaggcgccccagtaccaagcgacaccggcgcgtcatccgaagagacagtgtctgacagctgagcttcagtttatttgacatgtcccattcccattcccattcttattggatgttgatgaagctgctggcatgttctctgtaatgtcatggttgcctagtactcactagtattgcatcttgtataaagtctctctctctctctctctctctctctgtcctctataacaggctacgagtccactcatgcatggtggttagatcgaacaaatactccgtaacaacatagcataccctaaacccccc

SEQ ID NO: 129407 - DNA, 1281 bp, Zea Mays
atggtaggcaacaagccgccacaacaccgccatcgccatggctcctcctcaataattggggcagaggagctcaacctcctgcacatggccaggggctccccgcaggacggtggcggtggccgcggcaagagctggggcgcgctgggccagtggaagtgcaggctgctgggctccctccgcccgcggcgcgtgcgctgcgtggtgtgcctgcaggtgcagcacgtcaccggcctgcccccggccgcggagggccgcggggtggtggtgggttggcgtagcaagggcagcgagggggagcacacggcgccggcccgggtggcgcggggcgccgccgcgttcgacgaggtgttcaccgccggcggcgccacactgcgaggcttcaccgtgtgggcggcgctcatggacgcgcctgccgataatggggatctcggcgcgttccccgtcgacctcgccgccgccgcggcggagacgacctccaaccccagcaagttcggaggcaaggcgctcagcttcctgctgggcggggcggcggccggtgcggtgctcaccgttagcgtctactgcagagtgatggatcagcacggggacaactatggggctgctaatggtcaagcgagagagaagaacaagggcaaaggcagagcaggctcgtacgcctcctgcctgccggagctgagctgcctccgcaaccggcaggtggcggaggcatccagcgggtcggcgcgctccgacgaccgtggcggattcatcaccatcgagaactcgatggccgagatgcacagcggcggggccggggcggccttcggactactggcggaggacttggactgggaggaaggcgcggggttcatcaccatggacatggagaagagcagggtgtcgtcgagccggccgctcccgccggacatggtggtggtggaggaggagaagccgtgcctgctgatggagctgtcgtcggaggaggaggcagcttcggcggcggacgtggcgaaggtggaggacgagttcctgacgatgctggaggacacgtactgggcgaggagcaaggaaatcgagaaggggttgggcgtgagcctggacaccggactggatctgggcatggatctggacccgctcatcaaggacgccgagatggagctcgccaaggcggagcaggcatggaagagcaaggtcggcgccgctatggtggaggaggaggagtacaaggagctcgtccggaggtggagcgccagggagaccggcggctgctcctggggctttggattcgggagcccaatctga

SEQ ID NO: 129408 - DNA, 1606 bp, Zea Mays
gtgagcagccgcatccggccttcctcttcctcctcccctctcccccgttggcttgttcagttgctcttcgtctcctcccctcccctccgccggctctccggcccctcttcgtcccccctcatcctccgcgcacatttccagacgaggaaccagggaggctaagtgcaggaaggcaggatgcagtacaagaacctgggccggtcggggctccgcgtcagccagctctcgtacggcgcgtgggtgaccttcgggaaccagctggacgtgaaggaggccaaggcgctgctgcaggcgtgccgggacgcgggcgtcaacttcttcgacaacgccgaggtgtacgccaacggccgcgccgaggagatcatgggccaggccatccgggacctgggctggcgccgctccgacgtcgtcatctccaccaagctcttctggggcggccagggccccaacgacaagggcctctcccgcaagcacgtcgtcgagggcctccgcgcctcgctccgccgcctcgacatggactacgtcgacgtcgtctactgccaccgccccgacgcctccacgcccgtcgaggagacggtgcgcgccatcaactgggtcatcgaccagggctgggccttctactggggcacctccgagtggtccgcgcagcagatcaccgaggcctgggcagtcgccaaccgcctcgacctcgtgggacccatcgtcgagcagccggagtacaacctcttctccaggcacaaggttgagtctgagtttttgccactttacagcacctatggcatcggattgactacatggagtcctctagcttcaggagtactaactggaaaatataccaaagggaacatacctgctgatagcaggtttgcactagacaattacaagaacctggcaaataggtccctggttgacgacacgcttcgaaaagtgaatgggctaaaacctatcgccgctgaactcggcgtttcgttagctcaactctccattgcttggtgcgcgtcaaaccccaacgtctcatccgtgatcactggagccaccaaagaaagccagatcgtggagaacatgaaggctctagatgtcatcccactgctgacgccggaggtcgttgacaggattgaggcggtggtccagagcaagcccaaacgcactgaatcatacaggtgaaggcggtacgtacgggcctacgtgagtgttcgtccgaatggagtttaggcctctccagtgacttggggggtgtttggtttctagggactaatttttagtccctccacttaattctattttagtccctaaattactaaatatagaaactaaaactctattttagtttccctatttaacaatttatgaactaaaatggaattaagtgaagggactaaagtttagtccctataaaccaaacacccccttgatttcacgaaattatatccatggaacatggtcccgtgtattctttctgggcgtccgcagtcgtggtgctgtgttccaaacatctgtccgtcctgtgtgtattctgcctgcgtttcagattcagatttttttattttggactcaatcaacgctgcactgtgtgtttgaatgcactatagctaagagttagttagtt

SEQ ID NO: 129409 - DNA, 1731 bp, Zea Mays
atgcccttgcgccgccatgccggccgcgccatcgccgccgcgcccggcggtttcctccacctctccctgctcgcctccctccgccaccgcccctcgcttcaggcgcacgcgcagctcctgctcttgggcctcccgctgccccccgccgcggcctcacacctcctccgcccgcacctccgcgccggccatccgcttgcctcgctccgcctcttcctccgcgtgctccgcgaccaccaccccgccacaaccggcgccaccgcttcccaggaggagggggctgttcccgactcccgctccctctccgcggttctcgcagcctgctcccgcctcgagtccccttcccccggactctgcatccacgccttcctcctaaagtcgggattcgcctccgacgtcttcgccgccaattcgctcctccatttctatgccgcgttcggtctccacgccctcgcgtgcaagctgttcgacgaaatgccgaccagggacaccgtgtcgttcaacaccctgatcggttcgtacgtgcagtcgggacgcgttgaacgcgcgttggtggtgttcaggaacatggtggagggagggttccggctggacgagtggaccatcagagcgttgctgggtgcctgtgctgggctaggcgatttcatggtggccaaagctgcgcatgggtttgccagcaggacattgaggcatagattgctcgactctggagaggtggtgattgggttagtggacatgtatgtcaagtgtggtgcagtgcacctcgccaggaaaacatttgatttgtttggggagaaggtgaaggacgtgagagtttggagtgtgatggtatcagggtatgctagggttggggagatcggcatggctcggaagttgtttgatgagatgcccaataaggacttggttgcgtggacagttttggtcggtggatatgtgcaggcaggtagatacaaggaggcacttgggttgttcgaggagatggaagcggcaggacttgaggctgatgagatgacggtcgtcaccgtgctttcagcttgtgcccagaatgatgctattagccttgtaaagaggctccattatcgtatgaaccagaatggattggttagcagaaatgcaagagttgccaccagcttcgtgcacatatatgcaaaacatgggtgcatacagacagctatggatgtgtttcgtggaatcactgatgaattcaagactgtggagttgttcaatgctatgatacatggactcgctcaccatggttatggtgagaaagctatctcactttttgataaaatggaaagcctggggctccaacctgatgacatcacatttgtgggaatcctgtgcgcatgcagtcgcagtaacttggtcgaacaagggtgtaagatgttctcatcaatgctggacaagtacggtgtcaaaccagatgtcaagcatcacgcttgcatggctgatcttcttggaagagctggacgtcttgatgatgcttacaactttatccagaatatgcctttcaaagcaaatcttgtgatatggtcatctcttctgacagcttgcaagatccatggaaataacaagattaggaagcttgtagagaggcaaattctcggattagatgctacctacaagcctgaaaagctgaccttatctggcttattttctgatgagaagaggaaagagctatctgcaagggcgagaaaagctataaagcacaaatctgagcacagatgtacctag

SEQ ID NO: 129410 - DNA, 729 bp, Zea Mays
ttttcagttgaagaggatactatgaatctatgatttggcaattcacttctaatggaatgtacttgtcattctttatataggattattaacttcaactttcagcggtatatataattccagtttacagaatgtagcttgtaagggtatggcgattttgctacagaagataacagggctagcgcaaaaatttggggggaaatcatctattgaatggagagtagacttttgttggaagttggaacaaaagttgctagatttgaggcaggtggccagcataccggaaagaatcagccggtgagctgtggtgtgtgggttatagttactggttgcaaggggtggtgactcgatactagcttccgtccctcccttggctacttgtgtcaggtggttctctcttggagtttgtgggtggactgctctactctgtagaagaagcgtctgggcatggaagcaatcttttctttggaacggaacctcttggagtggagttatgtggtgaaaagccatggatcagtgaagaagaggacctggagaaggcaatgtcgtcgggcctttggatctagccccgaggatgatggcttggttggtcaggttcaggtgtttatttcgtgcgtggagctgtgcggttacggtgggtttgattctttttgtgcttggaattgtaaagacgactaggcttagtgtgtgtttgtttcgctactagattatataagttggattatggtggaa

SEQ ID NO: 129411 - DNA, 1526 bp, Zea Mays
actagagttggagagcaacctcaaaggcaggggcataagtgatcatgggaaagggacaatgcaaggctgctggtggctcaaagacgtacgttctgaagctggacatgcactgccaatgcaatggctgtgtcaagaagatgaaggacgcggtgaaggagatgatgagcctctcgcaaggtatgtatgtgcttttgtcgtgtactgtgtactactactactacacgcctgctgtctggctggctggctgcgtcattgaaagtggaggtacaggggtggagagagctgatgtttcagcagaggcagaggcgggagaggtgagggtggaagtgacgggcggaattgacatggacccagcgaagctctgctgcctgctgcaagaggcgacgaagaagaagcgtgtgaggatagccgaagaagcgagcgtcccatcgcctgggcggcaaaccactctgtctggtcagggtcaggcagaggctgctggtggctggcggcgagatggcgcgggcaccttccctacaaccgtcccgatcccgagcgccccgccggcgccggcgccagaggaggaggcggaggcatggagcgagacgacggcgccttcggagcgttgccggtaccgctgggcggcgcctgtcagcacgttcggtgtgtgggctgcatcggacatcaccgggacgttggccatgttgtaccaccaccacctatgaaccccgcctcatgctgtgtataaaacgaagcagtccgcgccctctctctctccctctctctctctccctccctctctccctctctctctctctgtcgagttagatgggtgtttgatattttggacgcgtttgggcccggggttaaatttagtcctaggttttatatgccaaatatgagggttttaacatttactaatcataaattgataaggcttacttacgggtacctaaaagcttagggtgtgtttggatggagggacgaggaaggatgaagagagataggatgggatcattttaatttgacccgcgtttggtttggaggtccacagtcagggtcaaaaaatattgttcaaaaatggtggatgggactatccctcaaaaaataagggacggggtcaacccagggttgatcccgtctcatccctcgttgacaccgaaccaaacactaccttaaattatcatcacgcaatgcagtcctgagatcccaaacgcgtcgtctataggttgggacaacagcaacgcggcaccgtactagtgcaaagtggggcgaagccgtgaagtgacgcggaagtcgggtgtgtagcagcgcgtcaaccacgcaagtcaaggagggaatcaccacaaaaaaatatagaatagtttcagtttgtatccaccttgattggttatccgcacccttttatcttagatcatcgtatgtattgactttatttgagattatgtttggttgattgtatgtgtgagtcatagtctacatggtgcatacaaaataagtcattttgatattattaacatgcatccatctatatgatgcttaaaatt

SEQ ID NO: 129412 - DNA, 830 bp, Zea Mays
accgacactcaggccaggccgatcaatgggcaagaagagcggccgcagcggcgccgacgcgcccaaggcgacggcgttcgtgctgaaggtggcgatgcactgccgctgcgacggctgcgtccccaagatccgcgccgcggtcaacaaactgacgctccggtgcgagggcatccagtcgctggaccagtcggcgctggacaccaagggcgaactggcgctggtggccacggcggacccggagaggctgcgccgccgcctgcgcgaggccacggggaagagcgtcgacatcgtcttccccaagcccgcagcggccaacggcggcagcagcggcagggaggaggcgaacgccgccgtccaggctcaggctcaggcccaggcccaggcgctgctgctcgccgccggtctgcaacagcagcagcagcacggccgtccctggtacgcgctccagcagggtgggtacggcccgccgccagagccgtacgtggcttcctaccccgccaccgcgtggggcgcgtacccacacaacggcctcgatgacgcctacggcggcggatggttcgggtactgagcgaccggcggagagtagagcagcggatggagcttttgaggttcgggtactgagcgaccggcggagagcagagcagcggatggagcttttgcgttgtgtagtgtgtcagtggtgatgtccgcacgtgtagtactgtagtgatctgggattagcaggaactgagcaaatattggttggttgtgtgtttgttggacgacgaagtgtttctgttaaaaaaggtcttgatgccttaactttaattcagcttctatctttaaaataa

SEQ ID NO: 129413 - DNA, 567 bp, Zea Mays
atgcactgccgctgcgacggctgcgtccccaagatccgcgccgcggtcaacaaactgacgctccggtgcgagggcatccagtcgctggaccagtcggcgctggacaccaagggcgaactggcgctggtggccacggcggacccggagaggccacggggaagagcgtcgacatcgtcttccccaagcccgcagcggccaacggcggcagcagcggcagggaggaggcgaacgccgccgtccaggctcaggctcaggcccaggcccaggcgctgctgctcgccgccggtctgcaacagcagcagcagcacggccgtccctggtacgcgctccagcagggtgggtacggcccgccgccagagccgtacgtggcttcctaccccgccaccgcgtggggcgcgtacccacacaacggcctcgatgacgcctacggcggcggatggttcgggtactgagcgaccggcggagagtagagcagcggatggagcttttgaggttcgggtactgagcgaccggcggagagcagagcagcggatggagcttttgcgttgtgtagtgtgtcagtggtga

SEQ ID NO: 129414 - DNA, 747 bp, Zea Mays
gtcatgcatcaaattcaacagctagctagcttaggtgcaaggcagcatgcatggatatatatagatgagtttgagagatggaccggggtagatgatatatagagctgctgcgtacataccagagaaataaagagaggaggatggagacagggcatgcagcagggatcaaagggaattaatcgatcgaagaaaacaagaatgtacaccatccatccatccatccatccatctatctatctatcgaccttggtcgccgccgaattgaacaagatcgaacaaggcggtgtcaagaggagtttggttgatctgtctagctacctcacctgtatccatctagagaagattgtgatggacaactcgatcagatcaagggagaggagtgagctgagctgagggaccgagctagctaattgccatggatcgatctaggcaagcaagacataagctaggtatatatatatataaggccgagaccggggaatggacactgagcatcagaagctagcagttgaagcaaattaaaaaaaaaaaaactctagcaggtagtggctagctaggatcttggatgacgataggaatgaagctccccatggaatgagctgagaatcgaagatgagtgagggtgaaagctgtagctctccattgaggagagagagagagagagttatgatattgctgatgaaaaattgtattgttctctctgtctctctttctctatctatataggcaattaacaaggaaatctac

SEQ ID NO: 129415 - DNA, 758 bp, Zea Mays
tcgcaatggcgtcgtgggacaaccttggagagctctccaacatcgcgcaactcacggggctggacgccgtcaagctcatctccctcatcgtcagggcggcgtccacgacgcggctgcacaagcgcaactgccgccgcttcgcgcagcacctcaagctcatcggcggcctgctggagcagctccacgtgtcggagctcaggaagtacctggagatgcgggagccgttggagcagctcgaggacgcgctccgctggggctacctgctcgtcaactcctgccaggaccgctcctacctctacctcctcgccatgggctggaacatcgtctaccagttccgcaaggcgcagagcgagatcgacaattacctccgcctcgtcctgctcatcacgctcgtcgacaatgcccgcattcgggatcggcttgagtatattgagagggaccaatgtgaatattcctttgacgaggaagacaagaaagtgcaagatgctctgttgaatcctgacccttgcacgaatcctacaattgtgctcaagaagactctgtcatgtttgtatccaaacttgcctttcaatgaggccctccaaaaggaaagtgagaagcttcaggttgaacttgaaaggtcatagagcaacatggatttgggttcttgtgaggtaatccaacacctgcttggagtaaccaaaactgtggaatctacaattctagagaaagaaacaaatgttaaagctccagaaaagaagggttcaaactacagtaaa

SEQ ID NO: 129416 - DNA, 1136 bp, Zea Mays
gtggtatttgactttcagtcgttttcttttgttttaaagtgttgtattatgttacaatgttctgtactgacttgccgttgccttacgctacatgttagttcatccatttttgagagatagctttttataatcccattttttgttttgcagcatgtcctgcagcatgggaaaccagaagagcgttctacaataattacacaactcgctggacagatagtgaaaatgagccagcagaaatttgcttctaatgttgttgaaaagtgtcttacttttggtaatcctgagcaacgtcagattctgatcactgaaatgcttggcacaactgatgagaatgagccgttacaggttcgttttcaacaattggactgagcatgctccttttaaaaaaaaacagtaccaggatttgctgctgcagggttgaatttcatacattctaagtttctaacaacacttgtaatgtgaacttatgttccccaggcaatgatgaaagaccagttcgcaaactatgtggtgcagaaggttctggagatatgtgatgaccagaaccgtgaattgattctttcccgtatcaaggtccacttgaatgcactgaaaagatacacctatgggaagcatatcgtggcacgtgttgagaagcttattgctgcaggagaacggcgcattggtgccccatcctcttgctgagatggcaataaagctatatacaggtcgcagaataacacctgtacagacagacagggatagcgaggcctagctttttaccattaccagtagtcggtaatattgagcgacggagaggttaaaaaaggctcccaaatcctttgatgtaaataaaggatagccgctggaaataaataaaaagaatgagaaaagatgaagagattttgcttgtccttgagggaagagttgtatatttgtgtggtttattttcccctcttgaagcagatggataaatgttttaggatcatagatgatgggaagcaagggcagctgtagattatcctttctttttttccttgggtttcattagtcaatgtataatgtattaatgttcatggtgatgctaatctctgtaaagcctgccttgagtttactgacattttcctgaaatgaaattaaatgcatgtttcctggta

SEQ ID NO: 129417 - DNA, 967 bp, Zea Mays
agtgttgtattatgttacaatgttctgtactgacttgccgttgccttacgctacatgttagttcatccatttttgagagatagctttttataatcccattttttgttttgcagcatgtcctgcagcatgggaaaccagaagagcgttctacaataattacacaactcgctggacagatagtgaaaatgagccagcagaaatttgcttctaatgttgttgaaaagtgtcttacttttggtaatcctgagcaacgtcagattctgatcactgaaatgcttggcacaactgatgagaatgagccgttacaggcaatgatgaaagaccagttcgcaaactatgtggtgcagaaggttctggagatatgtgatgaccagaaccgtgaattgattctttcccgtatcaaggtccacttgaatgcactgaaaagatacacctatgggaagcatatcgtggcacgtgttgagaagcttattgctgcaggagaacggcgcattggtgccccatcctcttgctgagatggcaataaagctatatacaggtcgcagaataacacctgtacagacagacagggatagcgaggcctagctttttaccattaccagtagtcggtaatattgagcgacggagaggttaaaaaaggctcccaaatcctttgatgtaaataaaggatagccgctggaaataaataaaaagaatgagaaaagatgaagagattttgcttgtccttgagggaagagttgtatatttgtgtggtttattttcccctcttgaagcagatggataaatgttttaggatcatagatgatgggaagcaagggcagctgtagattatcctttctttttttccttgggtttcattagtcaatgtataatgtattaatgttcatggtgatgctaatctctgtaaagcctgccttgagtttactgacattttcctgaaatgaaattaaatgcatgtttcctggta

SEQ ID NO: 129418 - DNA, 103 bp, Zea Mays
ggttgctattgtttgggatgcaaggcacctcatataaccagggttggatatcgagccaacttagctccgttcggtctagctcaagctaactcattaaaatatc

SEQ ID NO: 129419 - DNA, 3339 bp, Zea Mays
atggcctgctgggtggcggccgccatgcacctgctgctgctctgcaacgccgcggccgccgcgcgcgccgccgtcgccctgttcgccgcgactccgatgcccccgcgcctgtccctcgcggaggccgccgccgccgccggcgcaggcgactacgacgacggcggcaccggggacaaggggtcccaggccctcgtggggagccccatcgtggccggcgccatgaacaaccgcctgagggcgctcacctcctccttcgccgccgccatcggcaagaagctggactactgcatcaaggacacggagacggagtggaatcaggccttcgatttctccaaggacaccaccttcctcaccaattgcatgaaggagaccaagggggacctccagcagcggatctgcacggccgccgagatgaggttctacttcgacagcctgatgggcggcgacgacacggcggaggccaactacgtgaggcccaacgtcaactgcaaccggtcgtcgtggatcgacgggtgcgagcccggctgggcgtgcagcgccggggccgaccagaagatcaacctgcaggacaccaagaacatgccctacaggccgctcaagtgccagtcctgctgcccaggattcttctgcccgcatggcctcacctgcatgatcccttgccctctgggtgcctactgtccacggtccagcctgaatacctccacaggcatctgtgacccctacaactaccagccgccgcccgggaaccctaaccacacctgcggagccgccgacatctgggccgatgtggtcacgacagatgacatcttctgccccgctggattctactgccccagcactatacagaagctcccttgtagtagtgggtattattgcaggaagggatcaacctcacagactagatgctacaagaagagctcttgcccaccaaactctgctactcaggacatcacaatcttcggcgcgctgcttgtggtcgcgtcctgcttagtcctcctcatcatctacaacttctccggccaaatcctgaccaaccgcgagaagcggcaggccaagtcccgggaggccgccgcgaggcacgcgcgggagacagcgcaggcccgggagaggtggaagtcggccaagggcgtggccaagaaggccggcgtgggcctgcagtcgcagctgtcccgcaccttctcgcgcaagaagggcggtggcggtggcggtgggcagtcgtcgcagctgcaggccggagcgtccacaaaggtaggtgatgacgcgggcgggaagaagcacagcaacctcgccgacatggtgcggtccatcgacgacaacccggagagcgacgaagggttcaacctggaggtaggggacaaggcgctgaagaagccgacgggcaaggagatgcacacccggagccagatcttcaagtacgcgtacggccagatcgagagggagaaggcgatgcagcaggagaaccacaacatgaccttctcgggcgtcatctccatggcgcaggaccacgacgtgagcacgcgcctgtccgtcgagatcgccttcaaggacctgaccctcacgctcaagggcagcaagaagaagctcctgcggtccgtcacggggaagctctcgcccgggaaggtggcggccgtcatgggcccgtccggcgccgggaagaccaccttcctcagcgccatcgccggcaaggccacagggtgcgacacgtcgggcctggtgctgataaacggcaggatcgagccgatccgagggtacaagaagatcatcggcttcgtaccccaggacgacatcgtccacggcaacctgaccgtggaggagaacctgtggttcaacgcgaggtgcaggctgtcggcggagatgtcgaaagccgacaaggtgctcgtcgtggagagggtcatcgagtcccttgggctgcagccggtccgggactccctggtggggacggtggagcagcgcggcatctccggcgggcagcggaagagggtcaacgtcggcctggagatggtgatggagccgtcggtgctgatcctggacgagccgacgtctggactggacagcgcatcctcgctgctcctgctccgcgccctccgccgcgaggctctcgagggcgtcaacatctccatggtggtccaccagcccagctacacactgtacaggatgttcgacgacctgatcctactggccaaggggggcatgacggtgtaccacgggccggtgaagaaggtggaggagtacttcacagggctgggcatcgtggtgccggagcgcgtgaacccgccggactactacatcgacatcctggagggcatcgtgaagccgagcctgagctcgggaggcagcgtcaaggacctgcccatcaggtggatggtgcacaacggctacgacgtgccgcgggacatgctgcagagctcgtcggaatcggagtccacgtccaggggcgacgcgggacacgctccggacgagccgtcgtccgtggtctcgctgctctggggcaacctcagggacatcctcgggcagaagaaggacgagtacgactacaacaagacgtcggaggacctgtccaagcgcaagactccaggcatactcaggcagtacagatacttcctaggaaggtgcggcaagcagaggctccgtgacgccaggatacagggagtggactacctgatcctctgtctcgccggcatatgcctgggaacgctggccaaagtgagcgacgagacgttcggggcgctggggtacacctacaccgtcatcgctgtctccttggtcgcagctctgctgtgcaagatcggagccctgcgttccttcacgctggacaagataaactactggagggagcgagcctccgggatgagctcgctggcctacttcctgtccaaggacagcatcgaccacttcaacacggtggtgaagcccatcgtctacctctccatgttctacttcttcaacaacccgcggtcctccatctgggagaactacatcgtcctcctcgcgctcgtctactgcgtcaccggcatcggatacaccttcgcagtcttcttccagccaggttccgcgcagctgtggtcggccttgcttccggtggttttgactctgatagccactcagcagaaggacactatccttgccgacctgtgctacaccaagtgggctctggaagccttcgtcattgccaacgctcagaactattccggcgtgtggctcataacccggtgtggctcgctggtcaggagcggctacgatatcgagcacgaggctctctgtatagcggtcctcatcgccaacggggtactcttccgctgtgtagccttcttctgcatggtcaccttccagaagaactga

SEQ ID NO: 129420 - DNA, 1386 bp, Zea Mays
acgcacgccggcgaaagcgagagacagacagcgaaaaaggaccaagcttccttctctgtatcgactagcaagcacgccccggactcacgagggcctcccatggccggccccaagcccaggaagccggatcggatgtgcaaatccaagagcgacatcgccgcctccacctcctcctccgccatggcggcatccacaccgcggcaccaccggtctccgcgcacgacctcgacctccttccccgaggtgtcctcctactccacctcctcctccttcacggcgtcgtccctcgccgcgttccgcgactccctcccggagctgcccctcctcttcaccttccaggacctcgccgccgccaccgccaacttctccgccgcgcaccgcctcgtcccggccgcgccctcctccaactccttccgctgcgcgctgcgcggccacccggccgccgttttccgccgcccactccgccgcgacgcgcgggacgtggccgcgcgcctcgccgcgctgggccactgccaccacgccgccatcgcgcgcctcctcggcgccgccgcgtcgcccgatcgcaccacgctgttcctcgcctacgagctggtccccaacgcgtccccgctgtccgtgctcctccggaaccccaagaacccgtccttcaccccgctcgcgtcctggcactcgcgcctccagctcgccgtcgacgtctgcgacgcgctatactacgtccacctccaggccgacaccgtccacaaccgcctctccgcgtcctccgtcctcgtctgcggagacgggcccctcccgcgcgccaagatcgcgcatttcggcgcggccgacctcgccggcgagctcccggtcgagcacaaggacgacgacgacgacggaggaggaggagggtcaaggggctcctccggctccggggacaaccgccgcaccagaagccgggggaggcggatcgagggcacgcgcgggtacatggcgccggagctcgtggccggcggcccgccgtcgcgccgctccgacgtgttcgcgctcggcgtcgtgctgctggagctggtgtctgggcaggagccggtgcggtacgagctgctgaaccggggcacgggcgagtacgagaggacgtcgctgatcgacaccgcggcggccgcagtcgcggaggggatgcggaggtgggtggaccgcaggctcagggactcgttccccgtcgacgcagcgcagtcgctcaccacgctggcgctgctctgcgtcgccaaggaccccctggcgcggccggacatgtcgcgggtggccgccaaggtgtccaagctcttcctggaggcgcaggagtgggccgccaagttcaaagtcccgaccgacatctccatttccatcgcccccaggtgactgatggctcagact

SEQ ID NO: 129421 - DNA, 1554 bp, Zea Mays
acgcacgccggcgaaagcgagagacagacagcgaaaaaggaccaagcttccttctctgtatcgactagcaagcacgccccggactcacgagggcctcccatggccggccccaagcccaggaagccggatcggatgtgcaaatccaagagcgacatcgccgcctccacctcctcctccgccatggcggcatccacaccgcggcaccaccggtctccgcgcacgacctcgacctccttccccgaggtgtcctcctactccacctcctcctccttcacggcgtcgtccctcgccgcgttccgcgactccctcccggagctgcccctcctcttcaccttccaggacctcgccgccgccaccgccaacttctccgccgcgcaccgcctcgtcccggccgcgccctcctccaactccttccgctgcgcgctgcgcggccacccggccgccgttttccgccgcccactccgccgcgacgcgcgggacgtggccgcgcgcctcgccgcgctgggccactgccaccacgccgccatcgcgcgcctcctcggcgccgccgcgtcgcccgatcgcaccacgctgttcctcgcctacgagctggtccccaacgcgtccccgctgtccgtgctcctccggaaccccaagaacccgtccttcaccccgctcgcgtcctggcactcgcgcctccagctcgccgtcgacgtctgcgacgcgctatactacgtccacctccaggccgacaccgtccacaaccgcctctccgcgtcctccgtcctcgtctgcggagacgggcccctcccgcgcgccaagatcgcgcatttcggcgcggccgacctcgccggcgagctcccggtcgagcacaaggacgacgacgacgacggaggaggaggagggtcaaggggctcctccggctccggggacaaccgccgcaccagaagccgggggaggcggatcgagggcacgcgcgggtacatggcgccggagctcgtggccggcggcccgccgtcgcgccgctccgacgtgttcgcgctcggcgtcgtgctgctggagctggtgtctgggcaggagccggtgcggtacgagctgctgaaccggggcacgggcgagtacgagaggacgtcgctgatcgacaccgcggcggccgcagtcgcggaggggatgcggaggtgggtggaccgcaggctcagggactcgttccccgtcgacgcagcgcagtcgctcaccacgctggcgctgctctgcgtcgccaaggaccccctggcgcggccggacatgtcgcgggtggccgccaaggtgtccaagctcttcctggaggcgcaggagtgggccgccaagttcaaagtcccgaccgacatctccatttccatcgcccccagattgccacggcttgtatttcttgctgttgatgatgtggatgtgtctgaattctggtggtcagttcaactcttgctgttgatgatgtggatgtgtctgaattctgatggtcagttcaacgagaaaactgcagctgcagcccctattttcttcgggcagcgtcagcgtccatggaaccaggtcgcctag

SEQ ID NO: 129422 - DNA, 648 bp, Zea Mays
cgcacatgtcagctagcgcctcctcccgcctcccagcactgatgctggcgttgtccggccactggtggtggtggctcgcaggcgaatgcgcggcgccctggacgccgcacgcgagctgcgccttggtctgcaatgcatcagctgcgcttgcaggatggcgacctgctgctggagagcgaagatctgggcgacgcagccgtagacggggtcgcgccgtcgcggagcctggcctgcgcctcgtaggtgatggagacgacggtctcgcagcggtcggcgacggggaggtgggacagcagcttggaggtgttgctttgctggcgcccaacaccttgtggttggcggcgaagcgcggcagcgcgcggcgccctggtcgtggtcgcgctgttgaagtagggcgcgaacacgcacgcactccggcacgcaccgccggcccaggaacttgcacgcgccgcacgtacggagaccccgagcccgtcgcggcagcagcagctccggccatgtcgatcgtcgtcatcactggcgcaaataattaaagggaaaagctagcaaaggaagagctaactagctagctagctagtcgatcgtcgtcgcgcacggcgcatctctccgagctactggtgctactagctatggtaggataggacgccc

SEQ ID NO: 129423 - DNA, 1929 bp, Zea Mays
ttgttgacagcagagtagcagaccaaagttaacaacataatctcacagttatacatagcaggaaaggaacaaaaaagtggcagtcatccaaactttcaggaatttaatatgtactacatagcaataaatataaaataatctcaaccattgaaacaataccaaaatttgagataaaccctctaatagcaaatatattggtaatatgtttggcagctcctataatgctaacctctttctttggtgctgaccaaaatgtatctcacagaaacgccaaagtctaaacctaaaacaagtgttatgaaatactccgtattattaacattaaacaactactgctagcactagcacaaaatgaactagtgcagcttgttgagatcaatttggtgaataacataaagaatccatcaaagttaaattttctagtatcgtcagttcatcacctcagcactagtatgaactgtaaggacactagagtttggaacaaaaccgacgaagtacctaggactaatggtgctgcaatcaaggcaccaaattagtgaagcacagtatggtatccactccatctactcgattagttctgcaaagcagcagggaccagaaatctgttgctaaatccacaagctgctaaagccttcgaccaagctttgaagagtagcaaagccgattcagtgaagcgagacgagaccttggaggagggcgcggcgcggcgcatccccgcggaggttgcggagggagaagagcgcccggaagcgctccgcgatgggctgctccgtgttcagcagccgctcgcagaggaaccgctccatctccggggacgactcgaacgcggaggtggccgtcatctcacgcgggcgactccgtacggttcacacgctccggtcggcaaggtggtcactgggggcggcggcggcgaaggaaatcccgcctctcggaaagaaaaagaaaaggagaagacgagggacgagctcgcgtcgagtcgacgccgaccgtccgatcggaacgcgccacgtcacctctccaaacggacggacgacagcgaccagaggctcctcttgtcttgatgccggtgggtcccaatggctttacccagattctggcccacatggcagttacacgctacgtgtgtaatctcgcgtcggcgaagcgcgtagcattccttttcctcctcccctttgcggcttctcgcagcgctgcgaatcccaatccgcaccgatccgacgcgaatcgatcgagaggcagggggcagcactaatcgaatcgagactagcgccatgaacccgagaggccatcgtagcaacagaacttctctcttcgatggcattgaggagggtggaatccgagcaacatcctattcttctcatgagatagatgagcaagaaaatgatggagctattgatggactgcaggatcgtgtcagcattctcaagcggttgtcaggcgatatccatgaagaggtggagactcataacagaatgctggaccgaatggggaacgatatggatacttcaaggggttttctgtctgggaccgtggacaaattcaagatggtatttgagaccaaatcaagccggaggatgggaaccctcgtcgcatcattcgtcgccctttttctgctggtttactacttgaccaggtagaagacatgacatgctggaaatggtcatctcatcatctgcgtgccgtgccgtatagatagataccttgaaaacccaccgtcctgagtgccaaagtatatgttgatgtgggtgtttcgtcaactctgcactgtacaacacgactacagcgtgcgtgctgggtcgatcctatgttctcttgttgcgggattcaagtttgttgtccgttccttccctttggcatgtcatgtgtatggtatttagtagcataacaacaacaaaaaaactgtataaagaagctttgattgagcactat

SEQ ID NO: 129424 - DNA, 655 bp, Zea Mays
ggctgtttgttcttattgattctaataatgtagaatcccatttttatctgaacatcctaggttgactgttcctttgtgaaattttatttgagtagttaagtttaaatttgcaacccctttcactttgcagttagtctctcttcgtctattgattgtatgccctgttcctattggaaaatttatgcactttgtgcagccatcgtagcaacagaacttctctcttcgatggcattgaggagggtggaatccgagcaacatcctattcttctcatgagatagatgagcaagaaaatgatggagctattgatggactgcaggatcgtgtcagcattctcaagcgggtattgtgcaacttcaacttcttaaaacattctaactctgttgattcttttatgtaaaacaactgtagatattattatatacttaccagctcaagagatgagataataaaataggtttattaaaacaatattgtgttccttaaaaaaatagtttctctctgctgcaactttagtgcacagtattagtgtagatatgggattcttgtcagctgcacgctttcctggatcagtttggtttgaaatatttgaaattagttcagcacggttctctagttaaattttaccaaaaaggaatctaagtaatctgatgggcc

SEQ ID NO: 129425 - DNA, 1364 bp, Zea Mays
ctactagcttattgcatgtccacctttcatatacccacttgttagcttgctgccctcctcaaagctcagaccaaccagctcttctcctccttgatctctccaatcaagctctctctctctctctctctctctcaacacataccaaacttccactcctcctagatagctagctactagctagacagaaatcccccatgtaattggagagagaacttatgtgttctatgatagattagatatgatgcttctctagctcatcagatcaaattagtactcgaccgataccaagttaattaagaagaagttctctcagcaaaggcgtcaagctggcgaaccggtggtggagcgtgcccggtcacttgggcctgccggagcagccgtccggcggccccaaccccaagacggagcccccggccatgaaggacccggagcccagcagcccggcagtcggcgcgccgggcgaccacggagccgatgagaccaacgagtccggtggcgccgtggtggcggcgcccagccggcggccccgcgggcgcccgccggggtccaagaacaagcccaagccgcccatcttcgtcacgcgcgacagccccaacgcgctgcgcagccacgtcatggaggtggcgggcggcgccgatgtggcggacgccatcgcgcagttctcgcgccgccgccagcgcggtgtctgcgtgctcagcggcgccgggaccgtcgccaacgtggcgctgcggcaaccgtccgcgcccacggccgtggtcgcgctccgcggccgcttcgagatcctctcgcttaccggcaccttcctgcccggccccgcgccgccggggtccacggggctcaccgtgtacctggccgggggccaggggcaggtggttggcggcagcgttgtaggcaccctcatcgccgccggcccggtcatggtgatcgcgtccacgttcgccaacgcaacctacgagcgccttccgctcgaagaggaggatgaagggccagctccaccgatggcgtccggcggcggcgccgatccgctcatgggtggaggcctcggcatcgccgacccgtcagcgctgcccatgttcaacttgccgccgagcaacgggcagcttggaggcggcgacggcttcccgtcatgggcgcacccgcggccaccgtactgatgatcctgatgcgcccaaggtcgagcacagttgctagaatgcaatggcgaatgctgtgcgtgcactgcatggtcgttactgttccattggagacgacgacggccggatcggagtggcgcgccattagtaggttagtacatatgatgaagtgtggccgtcgtccctagtgctactttgttgccgtgcaataatcagatgtcgttggtctca

SEQ ID NO: 129426 - DNA, 1947 bp, Zea Mays
ctgcacaggggtttcgattttttcgattaaactgaaaactgaaccgaagcatacggttaactgaatcttcggttttccttttttctaaacaaaatttcggttaaccaaacttaaaaaaaaaactaaaaaaccaaaccgaaaaatttcggttactcaattgcccagccctgtgggcctcgtgccgctcactagactttaaagcccgtttggccctctacacggaccagacctgccttttcttcttcagcgtgcacattccttccccacttctctctctctctcgtgacgacggcgacggcaacgactggggcgacagtcgctgccgccctacttgccggttgctcggatcttcttcggcccgttagccgtcgacgagcaccaccagggcaaccagatacttcagtggcttcgcaaggatgtcctggtgcactattgagtctgatcctggtgtgttcactgagctgattcagcaaatgcaagtgaaaggtgtacaggtggaagagctttactctctcgatgtgggctctcttagtcaactgcggccagtatatgggctaatttttctcttcaagtggatacccggggagaaggatgaacggcctgttgtcagagatcctaacccaaaccttttctttgcgcaccaagtcatcactaatgcatgtgctactcaagctattctctcagttctcatgaatcgccctgaaattgacattggcccagaattatctcaattgaaggaattcacaggagcttttacaccagatctgaagggcttggctattagcaacagcgaatctatccggacagctcataacagctttgcaaggccagagccatttatttctgatgagcagagggccgcaactaaggatgatgatgtttaccatttcataagctatttaccttttgaaggtgtcctgtatgagctggatggactgaaggaagggcctgtgaatcttgggcagtgcgatggtgctgatgatcttgattggctacggatggtgcagccagttattcaagaaaggattgagcgctactcacaaagcgagatcaggttcaatctcatggccatcataaagaacaggaaagaggtgtacagtgctgagcttgaggaactggagaagagaagggagcagattttgcaggagatgaataatgcttcctccacagaatccttgagcagttcgcttacggaggtgatatcggcaatcgaaactgtcacggagaaggtcatcatggaagaagagaagttcaagaagtggaagaaggagaacattcggaggaaacataactacatccctttcttgttcaacttgctgaagatgcttgcagagaagcagcagctaaaacctctggtcgagaaggccaaacagcaaaagtcagcaagcccgagcacgagttgatggtgaaatgtcaatagactggtagcttttgccgatgtcttctgagcgtcgtgttatcttatcagatacattgccaagtcggcagctcagataaattatgaccgatgttatttataccatgttgcacgccgtgatgtatcagcagctatgccattttttttttgcagagcacgtgcgttgttgaagtggttaattttagtcgtttagagagattgtttgagagtaagggtaatggaatggactgaggaggttgaatcactcaatattcaattttaaataatgatgggttccagccctctcaatcccctccattccacctactcctaaacaaactcttaggtctagttttgcaactcttttttgtcaaggaattttcattttatcaagagaaattagttcatttatacttagaaaaatggagttgacaatctagcctttagccgtttattttgtgttaggttaattgtccctgtggatttgttgatggttgtggatcattttgggtaataattttgagataccacttgctagttgagtacaagat

SEQ ID NO: 129427 - DNA, 2029 bp, Zea Mays
ctgcacaggggtttcgattttttcgattaaactgaaaactgaaccgaagcatacggttaactgaatcttcggttttccttttttctaaacaaaatttcggttaaccaaacttaaaaaaaaaactaaaaaaccaaaccgaaaaatttcggttactcaattgcccagccctgtgggcctcgtgccgctcactagactttaaagcccgtttggccctctacacggaccagacctgccttttcttcttcagcgtgcacattccttccccacttctctctctctctcgtgacgacggcgacggcaacgactggggcgacagtcgctgccgccctacttgccggttgctcggatcttcttcggcccgttagccgtcgacgagcaccaccagggcaaccagatacttcagtggcttcgcaaggatgtcctggtgcactattgagtctgatcctggtgtgttcactgagctgattcagcaaatgcaagtgaaaggtgtacaggtggaagagctttactctctcgatgtgggctctcttagtcaactgcggtgagaatctttattatttatgtcgtcattatctgcaatctgaatgccttgaacacatatttgtcctctccacttttcttaggccagtatatgggctaatttttctcttcaagtggatacccggggagaaggatgaacggcctgttgtcagagatcctaacccaaaccttttctttgcgcaccaagtcatcactaatgcatgtgctactcaagctattctctcagttctcatgaatcgccctgaaattgacattggcccagaattatctcaattgaaggaattcacaggagcttttacaccagatctgaagggcttggctattagcaacagcgaatctatccggacagctcataacagctttgcaaggccagagccatttatttctgatgagcagagggccgcaactaaggatgatgatgtttaccatttcataagctatttaccttttgaaggtgtcctgtatgagctggatggactgaaggaagggcctgtgaatcttgggcagtgcgatggtgctgatgatcttgattggctacggatggtgcagccagttattcaagaaaggattgagcgctactcacaaagcgagatcaggttcaatctcatggccatcataaagaacaggaaagaggtgtacagtgctgagcttgaggaactggagaagagaagggagcagattttgcaggagatgaataatgcttcctccacagaatccttgagcagttcgcttacggaggtgatatcggcaatcgaaactgtcacggagaaggtcatcatggaagaagagaagttcaagaagtggaagaaggagaacattcggaggaaacataactacatccctttcttgttcaacttgctgaagatgcttgcagagaagcagcagctaaaacctctggtcgagaaggccaaacagcaaaagtcagcaagcccgagcacgagttgatggtgaaatgtcaatagactggtagcttttgccgatgtcttctgagcgtcgtgttatcttatcagatacattgccaagtcggcagctcagataaattatgaccgatgttatttataccatgttgcacgccgtgatgtatcagcagctatgccattttttttttgcagagcacgtgcgttgttgaagtggttaattttagtcgtttagagagattgtttgagagtaagggtaatggaatggactgaggaggttgaatcactcaatattcaattttaaataatgatgggttccagccctctcaatcccctccattccacctactcctaaacaaactcttaggtctagttttgcaactcttttttgtcaaggaattttcattttatcaagagaaattagttcatttatacttagaaaaatggagttgacaatctagcctttagccgtttattttgtgttaggttaattgtccctgtggatttgttgatggttgtggatcattttgggtaataattttgagataccacttgctagttgagtacaagat

SEQ ID NO: 129428 - DNA, 3140 bp, Zea Mays
ccctctacacggaccagacctgccttttcttcttcagcgtgcacattccttccccacttctctctctctctcgtgacgacggcgacggcaacgactggggcgacagtcgctgccgccctacttgccggttgctcggatcttcttcggcccgttagccgtcgacgagcaccaccaggtacgccaaccccttcatcttctcttcctgctgtgcgaaactgaggacccaaaccctaacctactatttgtttttcggatctgatctatgcatgcattacgcctactaacttcgattgctctgcaaaaataatcggtgtatacatgagtagacccacgtcccgggcaaaattctgaagcccattgttgatgtgggcatattagcaaatctctcgtgttcaccccagcttaaaaatataagctgtttggtgccgctcgtgtatttaccatgtttttgctactattgattgtgccagggcaaccagatacttcagtggcttcgcaaggatgtcctggtgcactattgagtctgatcctggtgagttttcgcatggtctcatcaatgactatatgtgctgttccttgtcattttcgattcgtgggaggtgtatggcatgttagcgtgcgggtaggatactcccttattttttcccctgcccgtccacctctgcatatcatgcaatttctgtgttttgcttataagtgtagtgggctcggttatacccgagttatcttcaaggggacaattttcctttagtcatgatgattgcattcatcgtctttttaagtcattcagcatgtgctcttcaccgttcctaatagtagcgttaggaaaccaacttatgtcatcagtcgtcacacttttgaatgatctaccaacccattggtatctctgttctttggcatattacttcccccctactttcacgaaacagcaaactgttgatgagttgaaacacattttgttatgcttactcccatttgtacttctgagttctgtcttagttgttcttactggtgtttgaaaccattgcttatgttatacttgagcaggtgtgttcactgagctgattcagcaaatgcaagtgaaaggtgtacaggttagcttccagggctctgttgcgttccttgcctgaactgcttgttttgtagcaactgtttttttcctcatccattgaactattattgtatctgcaatggcattatgcgctcgacctgttcattcactagtgtacactagttcttctgaagttttgtttcttgctcatgttctgaaactcacatcaacctggaactctcatttttggaagtgccttactgccatattatatgactgtaggataagcataataatatgtagctgattgtaatcttgtttgtcaacaggatcttgaagacatgcactttagtttaaggtagaataactgataatttgttgtcaatagttgctctttttttacctttatgcaacggtcaactcaatttgaaatggggagggtccttgtattatcaaaaagtaagggaggccttgagtgaggcttattctacatttgtttattcacttgcattcgtttagtatgggacctctagtcacatgacaacatgccagctaccaattatatttgtttgaggtcatgcttttatttcttgagtttgataatgttggtacttaagttacaataataatatatatagaacaggtgcctctagaaatatgtgacgatcatttttttgtcaagttatccatagaaaaaaaatttgaacccagaaatttatatgtttgggatgttctttaaacaggtggaagagctttactctctcgatgtgggctctcttagtcaactgcggtgagaatctttattatttatgtcgtcattatctgcaatctgaatgccttgaacacatatttgtcctctccacttttcttaggccagtatatgggctaatttttctcttcaagtggatacccggggagaaggatgaacggcctgttgtcagagatcctaacccaaaccttttctttgcgcaccaagttagttctgttctgtttctgtccctttagctaaccacgtttgctactctgtgcttaacaataacaggatatccttttacttattttcaggtcatcactaatgcatgtgctactcaagctattctctcagttctcatgaatcgccctgaaattgacattggcccagaattatctcaattgaaggaattcacaggagcttttacaccagatctgaagggcttggctattagcaacagcgaatctatccggacagctcataacagctttgcaaggccagagccatttatttctgatgagcagagggccgcaactaaggatgatgatgtttaccatttcataagctatttaccttttgaaggtgtcctgtatgagctggatggactgaaggaagggcctgtgaatcttgggcagtgcgatggtgctgatgatcttgattggctacggatggtgcagccagttattcaagaaaggattgagcgctactcacaaagcgagatcaggttcaatctcatggccatcataaagaacaggaaagaggtgtacagtgctgagcttgaggaactggagaagagaagggagcagattttgcaggagatgaataatgcttcctccacagaatccttgagcagttcgcttacggaggtgatatcggcaatcgaaactgtcacggagaaggtcatcatggaagaagagaagttcaagaagtggaagaaggagaacattcggaggaaacataactacatccctttcttgttcaacttgctgaagatgcttgcagagaagcagcagctaaaacctctggtcgagaaggccaaacagcaaaagtcagcaagcccgagcacgagttgatggtgaaatgtcaatagactggtagcttttgccgatgtcttctgagcgtcgtgttatcttatcagatacattgccaagtcggcagctcagataaattatgaccgatgttatttataccatgttgcacgccgtgatgtatcagcagctatgccattttttttttgcagagcacgtgcgttgttgaagtggttaattttagtcgtttagagagattgtttgagagtaagggtaatggaatggactgaggaggttgaatcactcaata

SEQ ID NO: 129429 - DNA, 935 bp, Zea Mays
atgaatgcgatagatttgatactgaaaaagttatctttggatgttcactacccagctaatttgagctccccatttccatatgcaggtcttactttcccaagctaccctggtgttcctgttggttatatgattccgcaggtgccatataataatgctgtgaactatggacctaataacgggtatggaggaaggtaccaaaacaacaagcccagtacacctatgagatctcctgctagtaatgaagcccaagaatctctgaccattggtattgccgatgaacacattggtgctgttgtaggacgtgctggaaggaacataacagagattattcaggctagtggtgctcggatcaagatatcggataggggtgacttcatatctgggacatctgacaggaaggtgacgattactggaacatcagaagctatccggaccgcggagtccatgatcatgcagagggtgtcagccagttcggagaggctatgataccagatatgtttgacggactgtgggggccgttgttgagtccgagcagcatgtttgatgcaagttattattgtttgttgcgttgcgccaatggtttagtcgaagatatatatgtgcagcgtttgaatggatttgggaatagggctgagttatatcccgtggatgccacaacaaggcaggcaggcgccgctctgtgctagtggctgagtaggttgacaattcgaaagggcatggttggaagctttcagcgtttcccattcattcttgtgtgcctctccggatggagatcctctgcagtgccatgtcggccagactgcgagcaaaagctgacttttctggcggacgaagataggagtagcatgcatctagctgtcttgtgaaagtactattatttatcaaaatacagaatcggtcctcaaactttggtacgttgttggctccctgaattc

SEQ ID NO: 129430 - DNA, 1089 bp, Zea Mays
atgaatgcgatagatttgatactgaaaaagttatctttggatgttcactacccagctaatttgagctccccatttccatatgcaggtcttactttcccaagctaccctggtgttcctgttggttatatgattccgcaggtgccatataataatgctgtgaactatggacctaataacgggtatggaggaaggtaccaaaacaacaagcccagtacacctatgagatctcctgctagtaatgaagcccaagaatctctgaccattggtattgccgatgaacacattggtgctgttgtaggacgtgctggaaggaacataacagagattattcaggctagtggtgctcggatcaagatatcggataggggtgacttcatatctgggacatctgacaggaaggtgacgattactggaacatcagaagctatccggaccgcggagtccatgatcatgcagagggtgtcagccagttcggagaggctatgataccagatatgtttgacggactgtgggggccgttgttgagtccgagcagcatgtttgatgcaagttattattgtttgttgcgttgcgccaatggtttagtcgaagatatatatgtgcagcgtttgaatggatttgggaatagggctgagttatatcccgtggatgccacaacaaggcaggcaggcgccgctctgtgctagtggctgagtaggttgacaattcggtatgttgatttcctggtacccccccttccttttttttttgagtcttgtgtatgtagatctgagtatgggttctttctttcacgtggccagaaagggcatggttggaagctttcagcgtttcccattcattcttgtgtgcctctccggatggagatcctctgcagtgccatgtcggccagactgcgagcaaaagctgacttttctggcggacgaagataggagtagcatgcatctagctgtcttgtgaaagtactattatttatcaaaatacagaatcggtcctcaaactttggtacgttgttggctccctgaattcaagaaatcgaaaaaaaaaacaagtcttgtaactttgtcgggtctaaaattagatttgtctaaa

SEQ ID NO: 129431 - DNA, 909 bp, Zea Mays
ttggagtggagacccaacagcagcatttcatatatatatttaacataataacacgaccaaccaaccgttaattatttcatacaacaacaatatcacatacgatatactcggagttctgagtatcctaaaccacagcaacagagctgttagttagttagttagtacatgcgtgctgtgtgtgtcctaggaggaggattcgactttgtcacagagcctttatccacccaaccaggcaacaactgctaccctactacccgcggatcgagttgatatcaatggcaggagttctcgagtccatctgcctcatcatgcccgcttcccacccgccgccactcatcgcaggagggaccatgccactgtgctccgcgggtgccacctcctcgggctccatgtccacctccgctttcaccttgttcttcttcgaacctccgtacatgaagctccccactatcacctgcagcaatgcaaaaccacggttcctttctctttatgcagaagatgacatagaaaacaaaccatacgacaccaaaactgcaatgccgacggactccgcctacactcccaccaataaccctgtggtcaggaccacacaaagctatgcaaagacctccgcttcgggtccgtgtgccaccatcctctaccaccaagtatgacccagaaaggcacaggatctcaaatcggccctgccaaaccaacaataaagcataaggatacaaaactagaagagaacgaaacaataaggcaatacttcagctgtaagatgcaagcaatccaacaatccaggcaagtgctagcagcaaacattttgtttaatttgcacagtaggcaaaacatttatattcaaatgtgcaacaagagaagaatagaacgcatgtgtgcagtagtttttacggaaatggtaaccaacag

SEQ ID NO: 129432 - DNA, 2669 bp, Zea Mays
agcaggacacgtatcacgctctcagttgaaactgaaatgaagggtgggtgggtgggtgcgacccacggtccgccgccgaagccgagctccctcgcaaatctctcgcatcgcgttcacagcagatggcggggaaggaggagaggaagcgggtgttggtggtgggcggcagcggctacctgggccagcacctcctcgcggcgtcctccaccgtcgaccgcctcgacgtcgctttcacccaccacagccccgccccgccgcagccgctcctcgagacgctcccctccgtccgcgcattccgcgccgacctccgctccggcgacggcttcgaggcgatctccgcgtcctttggccagccacacgtggttgtcaactgtgctgcgatgtcagttcctcgggcatgcgaattggatccacctgctgctatggctaccaatgtgccttcttcgcttgtgaattggttgctaagttttgggaatgaagactcgcttttgattcagctctcaaccgatcaagtttatgagggggtgaaatccttctacaaagaagaggacgagacaatgccggtgaacatgtatggaaaatctaaagttgcagcggagaaactaatcgttgagaaatgctcgaactatgcgatcttgagaagcagcattatatatgggccacaaacaatctctcctgtggcaaaatcccttccgattcagtggatggatggtgttctttcacaaggccaacaggttgagttcttcagtgatgaattccggtgccctgtctatgtcaaagatatggtggacgtaattttgtcactaacaaagacttggttcccagatgatggcaaaaaagtccaggtcctcctgaatgtcggtggtccagatagggtatcaagactgcagatggctgagtctgttgctgttgtccgtggatataaccccagtataatcaaatctgtgtctgcatcatcggttaatcgcggagtagcttctccaccagacatatccatggacatcaccaagctaacccagatccttggtatcaagccaatatcatttcaagatggagtcagaagtacacttgatgcagaagacagtacatgacgcttcctcactggtttgcttgagttcttaagggggagttgtttgcattcaaatgtagtagtgtgacataaagaatcacatttgatttgcaaaatttcagtatcggtaaatttctgttgggtttatgtgaaatatgtaagttttgtacccactaaacaccaatgccaccatccgtgttactgcttgattctgcaccattatgaataaagatggtctccattttaaatcattttcttccagaagtatgtaactgtattgtgcatgtatattacaatttataattaatgttacccccatgtattttatttgtttggtactttcaagatttgtttctgtacggtgcataatctggattggattgcagaagtgcttggtttgccgatgcattgctgccctataatatttgttctcccaatattacttctcttctctttctggccgcatcccctaggcttcctgctaatcacggtttcctcaactctgactttcccgcgtaggcaagcatcgttgctggccacactagctagcagcatcgtcgccgggggcacagccacagcccacaggcatcggccacgagacggcaaggaggggcgtgcatgcattgatgcatgcatggcccgacgcctgcgccggtcggatcggttatgcactgcacgagagggaatatatgggggagagaggttgattagacacctgtatgttgggatgtttactggtttgttttgttgtgtcaagctaggaaaggaaaatgtgtgacctgtgctggttgtgtcatctcttaatagttacaattgctcaggatagcctcttttagctaccgggtctatttcttagttcaagattcctcttactaatttgaataaaagaattagtagatctgttccacccaaatgggggaatgggtgctagggttatgaacttataatcatagaatcaattcggtcaacagattataagttcattccataccggaccagatcgtgcacattcttattatgactaggggtcattcgagcctatggaaatagaatactgtgtttacatagaaatccctgcatccttacattatatttaggattaggattaggtgtaatcatatctgcttttgacatatatatcctatccttatttgggtaccatatgcacctctttgggcttctattgaatcaagaaattggattgtacatatttttttattttcatatcgattttgatacatataaggtgtcctacggataatgcaaatcgaagttatttgatacctctttgggcttctattgaagctatgtatatgaccgatcgatctaaatacttcaagactccacctttgtcatatatcccatatatcgcattcgatagatatcatattcatggaatacgattcactttcaagatgccttgacggtgaaatggtagacatgcgagactcaaaatctcgtgctaaagagtgtggaggtttgagtcctctttaaggcataatacagagaatgctccccgtagaagtattccagaaatctgcacctggcgctctcctttatcttctgaggtccttaaccatctcactgagaaaagtagaca

SEQ ID NO: 129433 - DNA, 1501 bp, Zea Mays
atcacgctctcagttgaaactgaaatgaagggtgggtgggtgggtgcgacccacggtccgccgccgaagccgagctccctcgcaaatctctcgcatcgcgttcacagcagatggcggggaaggaggagaggaagcgggtgttggtggtgggcggcagcggctacctgggccagcacctcctcgcggcgtcctccaccgtcgaccgcctcgacgtcgctttcacccaccacagccccgccccgccgcagccgctcctcgagacgctcccctccgtccgcgcattccgcgccgacctccgctccggcgacggcttcgaggcgatctccgcgtcctttggccagccacacgtggttgtcaactgtgctgcgatgtcagttcctcgggcatgcgaattggatccacctgctgctatggctaccaatgtgccttcttcgcttgtgaattggttgctaagttttgggaatgaagactcgcttttgattcagctctcaaccgatcaagtttatgagggggtgaaatccttctacaaagaagaggacgagacaatgccggtgaacatgtatggaaaatctaaagttgcagcggagaaactaatcgttgagaaatgctcgaactatgcgatcttgagaagcagcattatatatgggccacaaacaatctctcctgtggcaaaatcccttccgattcagtggatggatggtgttctttcacaaggccaacaggttgagttcttcagtgatgaattccggtgccctgtctatgtcaaagatatggtggacgtaattttgtcactaacaaagacttggttcccaggtatgaccgtttgagttcagcaatactctttcttgtgtttcactctaaacaattttaacgtgttccagatcagatataacgtttcgattttagtgtttttcctcttaccaattgctttccattgtaccatggtgactggcatggaagcgcatgcttcagatgatggcaaaaaagtccaggtcctcctgaatgtcggtggtccagatagggtatcaagactgcagatggctgagtctgttgctgttgtccgtggatataaccccagtataatcaaatctgtgtctgcatcatcggttaatcgcggagtagcttctccaccagacatatccatggacatcaccaagctaacccagatccttggtatcaagccaatatcatttcaagatggagtcagaagtacacttgatgcagaagacagtacatgacgcttcctcactggtttgcttgagttcttaagggggagttgtttgcattcaaatgtagtagtgtgacataaagaatcacatttgatttgcaaaatttcagtatcggtaaatttctgttgggtttatgtgaaatatgtaagttttgtacccactaaacaccaatgccaccatccgtgttactgcttgattctgcaccattatgaataaagatggtctccattttaaatcattttcttccagaagtatgtaactgtattgtgcat

SEQ ID NO: 129434 - DNA, 1406 bp, Zea Mays
atcacgctctcagttgaaactgaaatgaagggtgggtgggtgggtgcgacccacggtccgccgccgaagccgagctccctcgcaaatctctcgcatcgcgttcacagcagatggcggggaaggaggagaggaagcgggtgttggtggtgggcggcagcggctacctgggccagcacctcctcgcggcgtcctccaccgtcgaccgcctcgacgtcgctttcacccaccacagccccgccccgccgcagccgctcctcgagacgctcccctccgtccgcgcattccgcgccgacctccgctccggcgacggcttcgaggcgatctccgcgtcctttggccagccacacgtggttgtcaactgtgctgcgatgtcagttcctcgggcatgcgaattggatccacctgctgctatggctaccaatgtgccttcttcgcttgtgaattggttgctaagttttgggaatgaagactcgcttttgattcagctctcaaccgatcaagtttatgagggggtgaaatccttctacaaagaagaggacgagacaatgccggtgaacatgtatggaaaatctaaagttgcagcggagaaactaatcgttgagaaatgctcgaactatgcgatcttgagaagcagcattatatatgggccacaaacaatctctcctgtggcaaaatcccttccgattcagtggatggatggtgttctttcacaaggccaacaggttgagttcttcagtgatgaattccggtgccctgtctatgtcaaagatatggtggacgtaattttgtcactaacaaagacttggttcccagcgcatgcttcagatgatggcaaaaaagtccaggtcctcctgaatgtcggtggtccagatagggtatcaagactgcagatggctgagtctgttgctgttgtccgtggatataaccccagtataatcaaatctgtgtctgcatcatcggttaatcgcggagtagcttctccaccagacatatccatggacatcaccaagctaacccagatccttggtatcaagccaatatcatttcaagatggagtcagaagtacacttgatgcagaagacagtacatgacgcttcctcactggtttgcttgagttcttaagggggagttgtttgcattcaaatgtagtagtgtgacataaagaatcacatttgatttgcaaaatttcagtatcggtaaatttctgttgggtttatgtgaaatatgtaagttttgtacccactaaacaccaatgccaccatccgtgttactgcttgattctgcaccattatgaataaagatggtctccattttaaatcattttcttccagaagtatgtaactgtattgtgcatgtatattacaatttataattaatgttacccccatgtattttatttgtttggt

SEQ ID NO: 129435 - DNA, 2771 bp, Zea Mays
cacctcctctccacgctagcagccacttccactatcacggactcatccacccaccaccttccccggtcccccccgcgccgatcacggcacggcgaagcccgcccgctccctccctccctccagatcaggcgccgcctctccgcccccactgcccgcgccgccgctcgccccgttagccggggcgtggattgattcgcacctccttctcctcctctcgatcgggtttggaggttagagtaatgaaataaaatgctactcaaaagcaagtttaagttggccacagccattggcatcgtgctatcgatgctatcgctgctcgtgcacctttttcttgctaattattcagctgggggcattacaaagtacagcatgcacatggacgatgtccttccatttggaccgaggcctcgaccacggagactgtggggtccgttggtcccacttgatcacttgcatccttttgtgaaacctagcaaatcatatgctgttcccagtaagcataatggttttatttatgcaaagatatatggtggttttgagaagatacagtcttcaatctgtgatcttgttgccgttgccaggctattaaatgccactctggttattcctgagatacaagcaacaactcgtacaaaaggcatcagttcaaagttcaaaagcttttcttatctatacgatgaagatcatttcatacattcactgtccagtgatgtggttattgtgcatggcttgccaaaggatctcagagaggctaggaaaaagataaaatttcccacagtatctcctaggaattctgctactccagaatactacatcaaagaagtattacccagacttgtaaaatcaaaagttcttgggataattgttaatggaggtaattgtcttcagtcaattctccctgcaagtctggaggaatttcagcagcttagatgcagggtagccttccatgcactgaggttgcgccctcaaattcgggctcttgggagccaagtagtaggaaggttgcgagcatctggccgtccttatgtggcctatcacccaggactgcttagagatactctagcttttcatggttgtgctgaactgttccaggatattcatacagaacttattcagtatagaaggaatcagatgattaaacgaggaacagtaaaggagcagctaacagttgattcagtgtccaggaagatggctgggttgtgtccactcatgccagaagaggctggacttctacttcaagcattaggttacccaccaactacaataatattcttggctggttccgagacttttggtggacaaagaatgctgattcctctacgagctatgtttgctaacctagtcgatcgaacttcattatgtagtcagagggagctgtttgatttagttgggtcagaagatcctctaacctcagatttgccacagcctccacctcccaaaagtgaaaaacaactcattgaagaatggaagagagcagggcctcgtccaagaccgctgcctccacctcctgcaaggccattctatgcacatgagaaggaaggctggtatggttggattggtgagaatgacacagaaccggaggcttcactgattgagttcaggaggcaagcacatcggttgctctgggatgcacttgattattttgtttctgttgaagctgatgccttcttccctgggtttcacaacgacgggagtggttggccagactactcaagtttggtcatgggacaccggttataccaaacaccttccggtataacctacaggcctgacaggaaaattattgctgcactgtttgaagaagttaacgatcataggtatcatccaccacggaattggacaattgctgcacgtgagcacctcaacaggagtgcaagtgtggaaggcatcgtgtcatcggctatgttgtcaaaacctgtatcgtttcttgcccacccattgccagagtgctcttgcagaacaccaaagtcacctgctgttcaaccggtaaaagacagcaatggcagatccctatttggaggtgaggtagagtgtcctgattggatggcacgcagcctggcaatggcatctgctaggaatagcgaacctcaaaatgaggactatgaggatgagttgcgtgaagatggctctagccaagacacgcaggaatctaatacaagtgactcgaataaatcttcggagcaagatgaagagatggatccggatgattagagatatgcggagcacctttttaactgctaccaggtccaggctactcaagcaagaaaagcaggaatcatcttgcatcgcagcagcgcatcaccatctggagtagccccagcatgacaagctggtcatccatcgtgggggcttgcctggatcgtactctggtatacaaccaggctgaatacgaaactaacactttgttctcttcttccttcacgtcttactcatttttttgtttacgcgaaattgtttctgtacaaatgtcttaactgaaaatacattaatttttgagtgggtttgatatgtagccatttgttaggtaatgagattggcttacggtgggcagatgtgcacccgtaaaataccggacagtacaggcattgccattttgtcccacgttaattgttgagttttgttggtggccgaagagcctgcttagaccatccaggtgcatcaaaatagtacccaaaaaattaaaatgttacattatttaaagtgtttaggtactaaaaataaatttagcttaaagtgagccttaaatcatgtattttaggaaaaagaaaaga

SEQ ID NO: 129436 - DNA, 1678 bp, Zea Mays
tatatgataattttcctttaccatgtgggcctttacctttgaaatatgaacttcatgttttgcttttatacgacattgtttgtactaatctaatcattatgaaaatcaagctcgagacaaagaagtttaaagaaagaaaagttaactataaaagtagaaagacttcgtctcttctttccattccttggtcttgtggcacacattgagctgcacgatataatctgcttgatactatgcctgattcaccataccagcttactgattcatttttattgctaatgctgtgatgtaaacaatcctgtgattccaggctggacttctacttcaagcattaggttacccaccaactacaataatattcttggctggttccgagacttttggtggacaaagaatgctgattcctctacgagctatgtttgctaacctagtcgatcgaacttcattatgtagtcagagggagctgtttgatttagttgggtcagaagatcctctaacctcagatttgccacagcctccacctcccaaaagtgaaaaacaactcattgaagaatggaagagagcagggcctcgtccaagaccgctgcctccacctcctgcaaggccattctatgcacatgagaaggaaggctggtatggttggattggtgagaatgacacagaaccggaggcttcactgattgagttcaggaggcaagcacatcggttgctctgggatgcacttgattattttgtttctgttgaagctgatgccttcttccctgggtttcacaacgacgggagtggttggccagactactcaagtttggtcatgggacaccggttataccaaacaccttccggtataacctacaggcctgacaggaaaattattgctgcactgtttgaagaagttaacgatcataggtatcatccaccacggaattggacaattgctgcacgtgagcacctcaacaggagtgcaagtgtggaaggcatcgtgtcatcggctatgttgtcaaaacctgtatcgtttcttgcccacccattgccagagtgctcttgcagaacaccaaagtcacctgctgttcaaccggtaaaagacagcaatggcagatccctatttggaggtgaggtagagtgtcctgattggatggcacgcagcctggcaatggcatctgctaggaatagcgaacctcaaaatgaggactatgaggatgagttgcgtgaagatggctctagccaagacacgcaggaatctaatacaagtgactcgaataaatcttcggagcaagatgaagagatggatccggatgattagagatatgcggagcacctttttaactgctaccaggtccaggctactcaagcaagaaaagcaggaatcatcttgcatcgcagcagcgcatcaccatctggagtagccccagcatgacaagctggtcatccatcgtgggggcttgcctggatcgtactctggtatacaaccaggctgaatacgaaactaacactttgttctcttcttccttcacgtcttactcatttttttgtttacgcgaaattgtttctgtacaaatgtcttaactgaaaatacattaatttttgagtgggtttgatatgtagccatttgttaggtaatgagattggcttacggtgggcagatgtgcacccgtaaaataccggacagtacaggcattgc

SEQ ID NO: 129437 - DNA, 101 bp, Zea Mays
gaccggacctgggaaggaagaagacgagggataaaagagttttgtcttgtgctgggccttgtcacacggtccagcgtactagtgccacatcagcaatctag

SEQ ID NO: 129438 - DNA, 1649 bp, Zea Mays
gataagctgcttttttaatgtaacccccaactcaaactacatggaaatatggagctagagacacccgtatgccgtatcacatgagcggcgccctcagttttggccagaacggaaacggacggagacaaacccgcggctcgcgaccgaattccattttccagcgcgcacggacgactgtacctcccccgcccttcgccactccgctccctcctccacctgtcatctcccgcgcgggagacctgcccgctccatggcgccgtcgcgaccgctcatgcgggggatccgcccgccgcgcgtcttcccgacccgcggcggccgcgcctcgccgtacaccgtcgcgctcaccgcgctacttctcgtctccgccgccctcctcgcgctcatagccttcggcgtcttctcgctccccgtgtccgcgccaaatgctgccgccaccaccggcactgcagccggaggggagaccgagtcggccgacgtccgcccccgcgcccgccgcgacctgggggaggggctgggagagcgcggtgcgcagtggaccgaggtcatctcgtgggagcccagggcatttgtctaccacaacttcctctctaaggatgagtgtgaatacctaattggattggccaagcctcacatggtaaaatcaacagttgtcgacagcactaccggcaaaagcaaggacagcagggtccggacaagttcaggcatgtttcttcaaagaggaagagacaaggttattcgagcaattgaaaagaggatagcagactataccttcatacccgtagatcatggtgagggactccaagtgctgcattatgaagtcgggcagaagtatgagcctcactttgattattttcttgatgagtttaacacaaagaatggtggtcagaggatagctactcttctgatgtatctatcagatgttgaagaagggggcgagactattttccctgatgcaaatgtgaacgccagttctttaccatggtacaatgagctttcagattgtgccaaaagaggcctttctgtcaaaccaaagatgggagatgcgcttcttttctggagcatgaaaccagatgccactttggacccattaagcttgcatgggggttgtcctgtgattaaaggaaataaatggtcatcaaccaagtggatgcacatccatgagtacaaagcttgaggcttggagaatcaaatatatgctgttgaattgggtttgtaaggaacacaggaccttggccatgtgaaggttttgcttgaagaattgataaagcgctctactttctcctgcagatggatctttatgcatgtgacttggggatttctacgggattgacactcatgtatgctttacagacccactggagctgtattctttgctcctttgttggaggggagataatagggataagcaggggccttgctcatccttgcagttttttttttttttggctgatccttgctgacttggctttttttcacttttctttttcttccttgcagtaccccaactatagaggagttgtgtagtgcctatagagtttgagattttgtttttgtgtcatgcccctaatattagtacatgaatgttgtgttactatgatacttgtaagctttggtactaatgaatagtgaggtctagagctcaacattaa

SEQ ID NO: 129439 - DNA, 1579 bp, Zea Mays
gataagctgcttttttaatgtaacccccaactcaaactacatggaaatatggagctagagacacccgtatgccgtatcacatgagcggcgccctcagttttggccagaacggaaacggacggagacaaacccgcggctcgcgaccgaattccattttccagcgcgcacggacgactgtacctcccccgcccttcgccactccgctccctcctccacctgtcatctcccgcgcgggagacctgcccgctccatggcgccgtcgcgaccgctcatgcgggggatccgcccgccgcgcgtcttcccgacccgcggcggccgcgcctcgccgtacaccgtcgcgctcaccgcgctacttctcgtctccgccgccctcctcgcgctcatagccttcggcgtcttctcgctccccgtgtccgcgccaaatgctgccgccaccaccggcactgcagccggaggggagaccgagtcggccgacgtccgcccccgcgcccgccgcgacctgggggaggggctgggagagcgcggtgcgcagtggaccgaggtcatctcgtgggagcccagggcatttgtctaccacaacttcctctctaaggatgagtgtgaatacctaattggattggccaagcctcacatggtaaaatcaacagttgtcgacagcactaccggcaaaagcaaggacagcagggtccggacaagttcaggcatgtttcttcaaagaggaagagacaaggttattcgagcaattgaaaagaggatagcagactataccttcatacccgtagatcatggtgagggactccaagtgctgcattatgaagtcgggcagaagtatgagcctcactttgattattttcttgatgagtttaacacaaagaatggtggtcagaggatagctactcttctgatgtatctatcagatgttgaagaagggggcgagactattttccctgatgcaaatgtgaacgccagttctttaccatggtacaatgagctttcagattgtgccaaaagaggcctttctgtcaaaccaaagatgggagatgcgcttcttttctggagcatgaaaccagatgccactttggacccattaagcttgcatgggggttgtcctgtgattaaaggaaataaatggtcatcaaccaagtggatgcacatccatgagtacaaagcttgaggcttggagaatcaaatatatgctgttgaattgggtttgtaagatggatctttatgcatgtgacttggggatttctacgggattgacactcatgtatgctttacagacccactggagctgtattctttgctcctttgttggaggggagataatagggataagcaggggccttgctcatccttgcagttttttttttttttggctgatccttgctgacttggctttttttcacttttctttttcttccttgcagtaccccaactatagaggagttgtgtagtgcctatagagtttgagattttgtttttgtgtcatgcccctaatattagtacatgaatgttgtgttactatgatacttgtaagctttggtactaatgaatagtgaggtctagagctcaacattaa

SEQ ID NO: 129440 - DNA, 1504 bp, Zea Mays
gataagctgcttttttaatgtaacccccaactcaaactacatggaaatatggagctagagacacccgtatgccgtatcacatgagcggcgccctcagttttggccagaacggaaacggacggagacaaacccgcggctcgcgaccgaattccattttccagcgcgcacggacgactgtacctcccccgcccttcgccactccgctccctcctccacctgtcatctcccgcgcgggagacctgcccgctccatggcgccgtcgcgaccgctcatgcgggggatccgcccgccgcgcgtcttcccgacccgcggcggccgcgcctcgccgtacaccgtcgcgctcaccgcgctacttctcgtctccgccgccctcctcgcgctcatagccttcggcgtcttctcgctccccgtgtccgcgccaaatgctgccgccaccaccggcactgcagccggaggggagaccgagtcggccgacgtccgcccccgcgcccgccgcgacctgggggaggggctgggagagcgcggtgcgcagtggaccgaggtcatctcgtgggagcccagggcatttgtctaccacaacttcctctctaaggatgagtgtgaatacctaattggattggccaagcctcacatggtaaaatcaacagttgtcgacagcactaccggcaaaagcaaggacagcagggtccggacaagttcaggcatgtttcttcaaagaggaagagacaaggttattcgagcaattgaaaagaggatagcagactataccttcatacccgtagatcatggtgagggactccaagtgctgcattatgaagtcgggcagaagtatgagcctcactttgattattttcttgatgagtttaacacaaagaatggtggtcagaggatagctactcttctgatgtatctatcagatgttgaagaagggggcgagactattttccctgatgcaaatgtgaacgccagttctttaccatggtacaatgagctttcagattgtgccaaaagaggcctttctgtcaaaccaaagatgggagatgcgcttcttttctggagcatgaaaccagatgccactttggacccattaagcttgcatgggggttgtcctgtgattaaaggaaataaatggtcatcaaccaagtggatgcacatccatgagtacaaagcttgaggcttggagaatcaaatatatgctgttgaattgggtttgtaaggaacacaggaccttggccatgtgaaggttttgcttgaagaattgataaagcgctctactttctcctgcagatggatctttatgcatgtgacttggggatttctacgggattgacactcattaccccaactatagaggagttgtgtagtgcctatagagtttgagattttgtttttgtgtcatgcccctaatattagtacatgaatgttgtgttactatgatacttgtaagctttggtactaatgaatagtgaggtctagagctcaacattaatgaggctgttgtgct

SEQ ID NO: 129441 - DNA, 2475 bp, Zea Mays
tgcagtcctagagtagtcaaacaggacggacgcacaggcgtcggcgcggcgcggcgcgtgagctcttttgcttgccgcggctgctcgccacgccacgcttcagaagatcacacggtgacggcgggcggacgcgctcccccaatttccctcccattttctactccctcccctttccttccttcaccggcatcggcataggcgtctctccctgatctacctggagtctctctcctcgtactccagcgccgcctgcccctccgaccaccgctgcggcagcgcaccgacttcccgcctgaaccccagatctcacccgcgccatacacgccgccagccccagcccagatctacggcgcgcccgccatggacgccggcgccggggccacggccatccgagtgccctaccgccacctccgcgacgccgagatggagctcgtcagcctcaacggcggcgctcccggaggggacacgggcccgcccccgccaccgcccaaggaccagccgcggagccgcgccgacaggaccaagctcgtgctcgcctgcatggtcgccgcgggcgtccagttcggatgggcgctgcagctctccctccttacgccatacatccagaccctaggaatagaccatgccatggcatcatttatttggctgtgtgggcctataactggttttgtggttcaaccttgtgttggtgtttggagtgataagtgccgttcaaagtatgggaggagaagaccatttattttggctggatgcataatgatatgtgctgctgtaactctaatcgggttttctgcagacctcggttacatcttaggggacaccactgagcactgcagaacatataaaggttcaaggtttcgagctgctattgttttcattctaggattctggatgttggacctggcaaacaatacagtgcaaggtcctgcgcgtgctcttctagctgatctttcaggtcctgatcagtgcaattctgcaaatgcaatattctgctcatggatggctgttgggaatattcttggtttttcagctggagcgagtggggaatggcacaagtggtttccatttctaacgacaagagcatgctgtgaagcttgcggtaatttgaaagcagctttcttagttgcagttgtatttcttttgttatgtatgtctgttaccctgtacttcgctgaagagagcccactagatccaaaagatacacaaggactatcagattctgctcctctgctgaacggttctagagatgctgcccatgcatcaaatgaaccaaataatgaaagatttcctaatggccatgtgggtttaaacaatgtgtcggctaacaacaacactgaggaatttacaaatgtgaattccaacacagagaaaggaggagtcttcaatgatgggccaggagcagttttggttaacattttgaccagaatgaggcatctacctcctgggatgcattcagtgcttctagttatggccctaacatggttgtcatggtttccctttttcctttttgacactgactggatgggacgcgaagtttaccatggggatccaaatggagatttgagtgagaggaaagcttatgacaatggtgtccgagaaggtgcatttggtttgctattgaattcagttgtccttggcgttggttcattccttgttgatccactatgccggatgattggtgcaagattagtttgggccattagcaacttcacggtgtttatttgcatgatggctacaacgatattaagttggatctcttctgatctgtactcaagcaaacttcatcacatcatcggggcaaataaaacagtcaagatcacggcattggttgttttctctcttctcggattgccactctccatcacttacagcgttccgttttctgtgactgctgagctgactgccggtacaggaggtggacaaggtttggccacaggagtcctaaatcttgctatcgtggttccccagatagtagtgtcgcttggagcaggtccatgggacgctctgtatggaggagggaataccccggcgttcgtcttggcttcggtcttctccctggcagcaggtgtgctcgcagttctcaagctgccaaagctgtccaactcgtaccaatctgccgggttccatggatttggctgatgctcatgcccaaaacacccccgtctgccatgtaaaacatcacaccaacacttggccccattttgccattcgtttacagagaaatgattcttttttcctcgtacaactacagaataatgacagtgaaagtaggagtttaggtgagagagagagagaggctaggtaggttgatgtgaaggtgtaaaagctgtatcctcctttttttgtttttgtttttgtttttgacagtgtatgtaagagctgtccacaagaaaatttacaagtggtgtaacctgccctcgtttgtacattgtactactactacatgacaatcatatgtcctttgtctttatccaa

SEQ ID NO: 129442 - DNA, 2554 bp, Zea Mays
tgcagtcctagagtagtcaaacaggacggacgcacaggcgtcggcgcggcgcggcgcgtgagctcttttgcttgccgcggctgctcgccacgccacgcttcagaagatcacacggtgacggcgggcggacgcgctcccccaatttccctcccattttctactccctcccctttccttccttcaccggcatcggcataggcgtctctccctgatctacctggagtctctctcctcgtactccagcgccgcctgcccctccgaccaccgctgcggcagcgcaccgacttcccgcctgaaccccagatctcacccgcgccatacacgccgccagccccagcccagatctacggcgcgcccgccatggacgccggcgccggggccacggccatccgagtgccctaccgccacctccgcgacgccgagatggagctcgtcagcctcaacggcggcgctcccggaggggacacgggcccgcccccgccaccgcccaaggaccagccgcggagccgcgccgacaggaccaagctcgtgctcgcctgcatggtcgccgcgggcgtccagttcggatgggcgctgcagctctccctccttacgccatacatccagaccctaggaatagaccatgccatggcatcatttatttggctgtgtgggcctataactggttttgtggttcaaccttgtgttggtgtttggagtgataagtgccgttcaaagtatgggaggagaagaccatttattttggctggatgcataatgatatgtgctgctgtaactctaatcgggttttctgcagacctcggttacatcttaggggacaccactgagcactgcagaacatataaaggttcaaggtttcgagctgctattgttttcattctaggattctggatgttggacctggcaaacaatacagtgcaaggtcctgcgcgtgctcttctagctgatctttcaggtcctgatcagtgcaattctgcaaatgcaatattctgctcatggatggctgttgggaatattcttggtttttcagctggagcgagtggggaatggcacaagtggtttccatttctaacgacaagagcatgctgtgaagcttgcggtaatttgaaagcagctttcttagttgcagttgtatttcttttgttatgtatgtctgttaccctgtacttcgctgaagagagcccactagatccaaaagatacacaaggactatcagattctgctcctctgctgaacggttctagagatgctgcccatgcatcaaatgaaccaaataatgaaagatttcctaatggccatgtgggtttaaacaatgtgtcggctaacaacaacactgaggaatttacaaatgtgaattccaacacagagaaaggaggagtcttcaatgatgggccaggagcagttttggttaacattttgaccagaatgaggcatctacctcctgggatgcattcagtgcttctagttatggccctaacatggttgtcatggtttccctttttcctttttgacactgactggatgggacgcgaagtttaccatggggatccaaatggagatttgagtgagaggaaagcttatgacaatggtgtccgagaaggtgcatttggtttgctattgaattcagttgtccttggcgttggttcattccttgttgatccactatgccggatgattggtgcaagattagtttgggccattagcaacttcacggtgtttatttgcatgatggctacaacgatattaagttggatctcttctgatctgtactcaagcaaacttcatcacatcatcggggcaaataaaacagtcaagatcacggcattggttgttttctctcttctcggattgccactctccatcacttacagcgttccgttttctgtgactgctgagctgactgccggtacaggaggtggacaaggttcgtgttgcgcatatactgtattaattagcagccttgcgaaccacagtgactggtactgtttatgctccatctccaggtttggccacaggagtcctaaatcttgctatcgtggttccccagatagtagtgtcgcttggagcaggtccatgggacgctctgtatggaggagggaataccccggcgttcgtcttggcttcggtcttctccctggcagcaggtgtgctcgcagttctcaagctgccaaagctgtccaactcgtaccaatctgccgggttccatggatttggctgatgctcatgcccaaaacacccccgtctgccatgtaaaacatcacaccaacacttggccccattttgccattcgtttacagagaaatgattcttttttcctcgtacaactacagaataatgacagtgaaagtaggagtttaggtgagagagagagagaggctaggtaggttgatgtgaaggtgtaaaagctgtatcctcctttttttgtttttgtttttgtttttgacagtgtatgtaagagctgtccacaagaaaatttacaagtggtgtaacctgccctcgtttgtacattgtactactactacatgacaatcatatgtcctttgtctttatccaa

SEQ ID NO: 129443 - DNA, 2559 bp, Zea Mays
tgcagtcctagagtagtcaaacaggacggacgcacaggcgtcggcgcggcgcggcgcgtgagctcttttgcttgccgcggctgctcgccacgccacgcttcagaagatcacacggtgacggcgggcggacgcgctcccccaatttccctcccattttctactccctcccctttccttccttcaccggcatcggcataggcgtctctccctgatctacctggagtctctctcctcgtactccagcgccgcctgcccctccgaccaccgctgcggcagcgcaccgacttcccgcctgaaccccagatctcacccgcgccatacacgccgccagccccagcccagatctacggcgcgcccgccatggacgccggcgccggggccacggccatccgagtgccctaccgccacctccgcgacgccgagatggagctcgtcagcctcaacggcggcgctcccggaggggacacgggcccgcccccgccaccgcccaaggaccagccgcggagccgcgccgacaggaccaagctcgtgctcgcctgcatggtcgccgcgggcgtccagttcggatgggcgctgcagctctccctccttacgccatacatccagaccctaggaatagaccatgccatggcatcatttatttggctgtgtgggcctataactggttttgtggttcaaccttgtgttggtgtttggagtgataagtgccgttcaaagtatgggaggagaagaccatttattttggctggatgcataatgatatgtgctgctgtaactctaatcgggttttctgcagacctcggttacatcttaggggacaccactgagcactgcagaacatataaaggttcaaggtttcgagctgctattgttttcattctaggattctggatgttggacctggcaaacaatacagtgcaaggtcctgcgcgtgctcttctagctgatctttcaggtcctgatcagtgcaattctgcaaatgcaatattctgctcatggatggctgttgggaatattcttggtttttcagctggagcgagtggggaatggcacaagtggtttccatttctaacgacaagagcatgctgtgaagcttgcggtaatttgaaagcagctttcttagttgcagttgtatttcttttgttatgtatgtctgttaccctgtacttcgctgaagagagcccactagatccaaaagatacacaaggactatcagattctgctcctctgctgaacggttctagagatgctgcccatgcatcaaatgaaccaaataatgaaagatttcctaatggccatgtgggtttaaacaatgtgtcggctaacaacaacactgaggaatttacaaatgtgaattccaacacagagaaaggaggagtcttcaatgatgggccaggagcagttttggttaacattttgaccagaatgaggcatctacctcctgggatgcattcagtgcttctagttatggccctaacatggttgtcatggtttccctttttcctttttgacactgactggatgggacgcgaagtttaccatggggatccaaatggagatttgagtgagaggaaagcttatgacaatggtgtccgagaaggtgcatttggtttgctattgaattcagttgtccttggcgttggttcattccttgttgatccactatgccggatgattggtgcaagattagtttgggccattagcaacttcacggtgtttatttgcatgatggctacaacgatattaagttggatctcttctgatctgtactcaagcaaacttcatcacatcatcggggcaaataaaacagtcaagatcacggcattggttgttttctctcttctcggattgccactctccgtaagtatgaaaaccagagtcagcacatgttcttaatggcttaaattggaagctgccttatgcttttgctgtcaagcattgcagatcacttacagcgttccgttttctgtgactgctgagctgactgccggtacaggaggtggacaaggtttggccacaggagtcctaaatcttgctatcgtggttccccagatagtagtgtcgcttggagcaggtccatgggacgctctgtatggaggagggaataccccggcgttcgtcttggcttcggtcttctccctggcagcaggtgtgctcgcagttctcaagctgccaaagctgtccaactcgtaccaatctgccgggttccatggatttggctgatgctcatgcccaaaacacccccgtctgccatgtaaaacatcacaccaacacttggccccattttgccattcgtttacagagaaatgattcttttttcctcgtacaactacagaataatgacagtgaaagtaggagtttaggtgagagagagagagaggctaggtaggttgatgtgaaggtgtaaaagctgtatcctcctttttttgtttttgtttttgtttttgacagtgtatgtaagagctgtccacaagaaaatttacaagtggtgtaacctgccctcgtttgtacattgtactactactacatgacaatcatatgtcctttgtctttatccaa

SEQ ID NO: 129444 - DNA, 100 bp, Zea Mays
ctctagttagcaagggtatagacttatgtacccaatatgtgttttacccgctgccatcactaattttgattataaggaactagattgagagctctatctc

SEQ ID NO: 129445 - DNA, 740 bp, Zea Mays
cgtcgatttgttgaggtcccctcctcctgtaggtgtccaacttgactacagccacctctcggctccattctgcccctcctccttctcagtcggcagccaccatgccaccgcacgcaaccaaggatcccgtcgccgcgcctgcagcagccacggcggcggcgctgtcgcgggccctggcggcggcgcgccctttcctgcgcggggaggaggcggaggtggacccggcgctgcctggcctcgccgccgtgctgcgcggcgcgggcgccggcgagtgctggcacaagcacggcacgttcctggcgcacctgctggacgtgcaccggatcctccgcctgtggggcgcgcccgacgccgtggcgcgctgcggcctctaccactccgcctactccaactcctacgtcaacctggccatcttccagcctgacaccgggcgcgcccacgtcgctgccgtggtcggcggacccgcggagcgccttgtccacctcttctgcgtcgtccccaggcagcagctcgtccacgacgacctgctcttccactactccgaccaggacctcgccgacgacctagccagctccgaggagtcggtccgggacgcccggcgcggcgtgttcgacgacgcccagccgtggcggcgcaagatccagcgcctcctcccggcggacggcatcacggtcaagcacatcaggtaggtacttaacatactaccgtgggcaagcattcattccattggggttgggttg

SEQ ID NO: 129446 - DNA, 1564 bp, Zea Mays
cgtcgatttgttgaggtcccctcctcctgtaggtgtccaacttgactacagccacctctcggctccattctgcccctcctccttctcagtcggcagccaccatgccaccgcacgcaaccaaggatcccgtcgccgcgcctgcagcagccacggcggcggcgctgtcgcgggccctggcggcggcgcgccctttcctgcgcggggaggaggcggaggtggacccggcgctgcctggcctcgccgccgtgctgcgcggcgcgggcgccggcgagtgctggcacaagcacggcacgttcctggcgcacctgctggacgtgcaccggatcctccgcctgtggggcgcgcccgacgccgtggcgcgctgcggcctctaccactccgcctactccaactcctacgtcaacctggccatcttccagcctgacaccgggcgcgcccacgtcgctgccgtggtcggcggacccgcggagcgccttgtccacctcttctgcgtcgtccccaggcagcagctcgtccacgacgacctgctcttccactactccgaccaggacctcgccgacgacctagccagctccgaggagtcggtccgggacgcccggcgcggcgtgttcgacgacgcccagccgtggcggcgcaagatccagcgcctcctcccggcggacggcatcacggtcaagcacatcaggacaggggaggatgtgtcactgtccaggcgcatcgcagcgacgttcctcctgatgaccatagccgacttcagcgaccagctgttcgactggcaggaccgcctcttcgacaacagcaacggccgcctcgagttcagcggcaacacctggacctccctctggcccggcaccggcaagcctggcctctgggtcacctctagctcccgcatggccgcgctctacaccctcatcgtccgcgaggaggagatacacatcacgcagcgagcgcgagatacacatggccgggacgaggacatggacctggtgatccccccggtgttcaacggctgcacccgattgctcaacgccgaggaccagaaggtggcacgagacctctactgggaggcggtatgcggcgaggaggcgtcggactggctcaaggtggagcagctcctccagcagagcattgccaagaacccgtttgtgggggaaccacacctggtgcttgcccaggtgtaccttaacatggagaggtacggcgaggcgcagatgcaggcagaggaaggtctgaggctgttgctggagtggggcagcagctgggacaagaggatgccatgggagggctgggtgtcctggggcagggcgatgctgaccaaggccaccgacaaggattggccgcatacctcattcgggatcctcagccttgggcttgtcaaatgatacatatattctcaccgtatgcatatgtatgtatttgtacgaaataataaacccaaggccagggggtcaagccaaacaataatttgatgtacttggaattcagatgtgttatcaaacacaacttgtctgccagtcctcttcagtcatagttaagttcatctgacatttaatttgggttgttc

SEQ ID NO: 129447 - DNA, 1570 bp, Zea Mays
gttgaggtcccctcctcctgtaggtgtccaacttgactacagccacctctcggctccattctgcccctcctccttctcagtcggcagccaccatgccaccgcacgcaaccaaggatcccgtcgccgcgcctgcagcagccacggcggcggcgctgtcgcgggccctggcggcggcgcgccctttcctgcgcggggaggaggcggaggtggacccggcgctgcctggcctcgccgccgtgctgcgcggcgcgggcgccggcgagtgctggcacaagcacggcacgttcctggcgcacctgctggacgtgcaccggatcctccgcctgtggggcgcgcccgacgccgtggcgcgctgcggcctctaccactccgcctactccaactcctacgtcaacctggccatcttccagcctgacaccgggcgcgcccacgtcgctgccgtggtcggcggacccgcggagcgccttgtccacctcttctgcgtcgtccccaggcagcagctcgtccacgacgacctgctcttccactactccgaccaggacctcgccgacgacctagccagctccgaggagtcggtccgggacgcccggcgcggcgtgttcgacgacgcccagccgtggcggcgcaagatccagcgcctcctcccggcggacggcatcacggtcaagcacatcagtgagctgcactgcaggacaggggaggatgtgtcactgtccaggcgcatcgcagcgacgttcctcctgatgaccatagccgacttcagcgaccagctgttcgactggcaggaccgcctcttcgacaacagcaacggccgcctcgagttcagcggcaacacctggacctccctctggcccggcaccggcaagcctggcctctgggtcacctctagctcccgcatggccgcgctctacaccctcatcgtccgcgaggaggagatacacatcacgcagcgagcgcgagatacacatggccgggacgaggacatggacctggtgatccccccggtgttcaacggctgcacccgattgctcaacgccgaggaccagaaggtggcacgagacctctactgggaggcggtatgcggcgaggaggcgtcggactggctcaaggtggagcagctcctccagcagagcattgccaagaacccgtttgtgggggaaccacacctggtgcttgcccaggtgtaccttaacatggagaggtacggcgaggcgcagatgcaggcagaggaaggtctgaggctgttgctggagtggggcagcagctgggacaagaggatgccatgggagggctgggtgtcctggggcagggcgatgctgaccaaggccaccgacaaggattggccgcatacctcattcgggatcctcagccttgggcttgtcaaatgatacatatattctcaccgtatgcatatgtatgtatttgtacgaaataataaacccaaggccagggggtcaagccaaacaataatttgatgtacttggaattcagatgtgttatcaaacacaacttgtctgccagtcctcttcagtcatagttaagttcatctgacatttaatttgggttgttc

SEQ ID NO: 129448 - DNA, 1366 bp, Zea Mays
ccattctgcccctcctccttctcagtcggcagccaccatgccaccgcacgcaaccaaggatcccgtcgccgcgcctgcagctgcctggcctcgccgccgtgctgcgcggcgcgggcgccggcgagtgctggcacaagcacggcacgttcctggcgcacctgctggacgtgcaccggatcctccgcctgtggggcgcgcccgacgccgtggcgcgctgcggcctctaccactccgcctactccaactcctacgtcaacctggccatcttccagcctgacaccgggcgcgcccacgtcgctgccgtggtcggcggacccgcggagcgccttgtccacctcttctgcgtcgtccccaggcagcagctcgtccacgacgacctgctcttccactactccgaccaggacctcgccgacgacctagccagctccgaggagtcggtccgggacgcccggcgcggcgtgttcgacgacgcccagccgtggcggcgcaagatccagcgcctcctcccggcggacggcatcacggtcaagcacatcaggacaggggaggatgtgtcactgtccaggcgcatcgcagcgacgttcctcctgatgaccatagccgacttcagcgaccagctgttcgactggcaggaccgcctcttcgacaacagcaacggccgcctcgagttcagcggcaacacctggacctccctctggcccggcaccggcaagcctggcctctgggtcacctctagctcccgcatggccgcgctctacaccctcatcgtccgcgaggaggagatacacatcacgcagcgagcgcgagatacacatggccgggacgaggacatggacctggtgatccccccggtgttcaacggctgcacccgattgctcaacgccgaggaccagaaggtggcacgagacctctactgggaggcggtatgcggcgaggaggcgtcggactggctcaaggtggagcagctcctccagcagagcattgccaagaacccgtttgtgggggaaccacacctggtgcttgcccaggtgtaccttaacatggagaggtacggcgaggcgcagatgcaggcagaggaaggtctgaggctgttgctggagtggggcagcagctgggacaagaggatgccatgggagggctgggtgtcctggggcagggcgatgctgaccaaggccaccgacaaggattggccgcatacctcattcgggatcctcagccttgggcttgtcaaatgatacatatattctcaccgtatgcatatgtatgtatttgtacgaaataataaacccaaggccagggggtcaagccaaacaataatttgatgtacttggaattcagatgtgttatcaaacacaacttgtctgcc

SEQ ID NO: 129449 - DNA, 327 bp, Zea Mays
cgacgacatggctgatctttatttgtctagaaagttggctgggaactgttctctatttgccaggtgagagatgtgcttccgtaattattagatgatgacgacgacatggctgatctttatttgtctagaaagttggctggagcatcttcccctgttagtggttccggtggaccaaattggttctctgcatcccaactactggttcaaaaatatcaagaccaaattggttccctgaatgtgcttattatgctttgcttctatctatttgagtaggatacttctgaatgtgctgctaagcctttaagaatgaaagcttcgatttgattt

SEQ ID NO: 129450 - DNA, 3600 bp, Zea Mays
ccgccgcatcacaatctcacgtgtccgtcgccggcgatggaccggcagccgcccaccgcctcgctctcggcgcacgagtgggagcagctcctcgacgatttcgcttcctcttcgaacccctctcgccgcgaccgatggctccacctcccgctcctggacctcgccgtctcctcgctgctccgccgcgacctcccctcccatctcaagcctcacctcctctccttagtagacgaccacctgctcccgccctcctcgaccagcctccccgccctccttgcctccttcctctccttcccaccggaccatccgctccgcgaccaccttctcgtcaccgtcgtctccgccttcgcctccgccctcgccgcgcccgtctccagggaccacgaggccccgcacctcgccgccctcgttgacgcgctcctcgtcaccgccaaccgccccaaccacgcgcccgaccgcgccgcgcgcgcgctcgcctgcgacgccctgcgcgccatcgaagctgcgctaccgggtcttcttgccgaggtcctcggccacctctacgcgctcgccgccgcggagcgctcgccggccgcgcagtcctacctcctcctgctcgcctccgccgcgcgccacgccgtgcgcctcgggaggctcgcctctagcgcctccatcctgtcggtagcaggcccgcccacccccttcgctgtacccgctcacctgctcttgcctcccgccgcccctggcgcgtccatggcgccaccctcggaggtgaacatcagggacataaggaaggtgctcgctctgcttatggaccggccgcaggtgctcacgcccgcagcggccatggagatgatgtccatccttgccgaggtcgcgtcggctgtgctccagtgggcgccggcgattgcagcgcacattaaagtgcagttcggggggatggtgcattcgtccaacgccatgctgctacactcgctgctcacgctcttcctccagttcccggatgcctttggagctgaggacgagcgcacaatggcgcaccgcctggctttggctgcctgtgaggtgcaccgtccactcgcagtgcgattgctggctttgcattggctactcggctctggcaggttcagaaatctggtgcctggtctcgcccgatggttttaccctgccttgttcgatccccttgcgctcaaggccaagaagctggattgtctagcttatgttgctgctggtgttgatggggagaaggttgcagcagcaggcagagcgagcaagcgattgactgggctacttgacgatggtttggtttccgtctccgccttcaggtggctcccagcatggagtactgagacaggtgtggcgttccgagcgttgcacagtgtcttggttggtgcttctcctcacagaactgacggcacacgttgctccggggctggtgagctcctgaattctactatgttccaccatttacaggctatcttggttgatatggcatcagagcatcagggtttagtcccagtgattgctgatttcacgaaccgtctactagcatgcaactcacatcggtgggctggggagcgattgctccggacacttgatgagagtctgcttccaaggcttcagccaggctatcagcttgcttcatattaccctattttcgtgaagattgcacagaatgagacggtacctcagctccgcctaatagaattgctcaccgagcagatggtttctctcaccaagaagcatggaccggacacagagctgaagtcatggtctcagggaagcaaagttgtgggcatttgtcgtgtcatgttgaagcatcatcacagctctcatatctttcttcccctttcacaccttcttgtgctcactatcgagtccttccccgatctggaggttcgggaccatgccaggatttgcttgcggatgttatcttgtgttcctgggaagaaactgaggcatatcatgggagttggagaacaaccgtcaggtgtcacaccttctcatcctgattctttgtttgacatcccatcaccgtgtcctgctctagatcttaagagcatgcctgatctggcgtcttacattcatcttgaaagggttgggcctttagttgtgaagcaatcatgggccctcacattgcctaatttcagtgtccagagcagaccatctggttccattctaagtatacaggacgtcagctctgttccctcagagcaagaaaatccaactggacctacaattgagagaattggttatagacaagaaaccctacgtgtgatggatgctaaaggcgctgaaacattgcaaattctcagaaggtatttcgcgtgcattccagactatctacactcatctggtttcaagatacagatacagtgcacttttagattcgacacagagccatttaacaatgcgtgggggttagatttgccagtttcagattctgatggggctgatgagttgcctgccctttatgcagtgacaattacattttcatcaagtgcacagtttgggaaaattccatcatgtcatattcctttcattctaggggaacctccaggttctggtatggacatcgttcccgtagataatcagaacagggaagaatccggttactgtgcttcagtgatgatagaactggaacctcgagagccttcacctggtcttattgatgtttcagttgaagcaaacacagagaactgccatgtattatcagggccgcttaaacccattacagttggctttgaggacatgtttttaaaggccagcgtaccacctgatactccaagagagggtgtggctatgtactaccaggatctgtttcaagctttgtggcaggcctgtgatagctctactaacactggtcgagaaactttccctttgagtggagggaaagggtcagctgccattaacggaactcggtctgttaaacttttggaggtaactccaaaggttttgattggatctgttgaaagatatctggcttcctttgttgtcagtgtttctggagtttcacttgtaaccatcctgagaggaaacggaatcattaagaacgtcatgtgggaagaaaatgttgcagatgccagtgtaggtgctgacgcacttgttccgtactcaccggacagaaatctccagcttcagatcatagaagacgatgagattgggggtggtgctgagaggtatggccatggaagcaagagagagatgggtatcatgcgtgttatgatattcctaccacccaggtatcacctcctgtttctgatggaggtaggcagtgcctcaacattggtcaggataaggaccgatcattggccatgccttgcatatgtcgacgaatacttggaagcattgatttcttagagactttctgtggtcaatggtgtgcagtttttgtaccaatgctgttcagttttgtaccttatgtaacactagagagtgaacattgggggtttacgctttttgaggcctcttttctctctaccattcagagttgggagcctgtaacttccggtagagagcagttttgttcactggtattatcaaaaatacacaattatatatgcagaaactaaatccccatcgcatgtgtttggctgcaatttcgttcctttattattt

SEQ ID NO: 129451 - DNA, 1575 bp, Zea Mays
atgcaatcaatagccacggcggcggcgctgcagctgctgtgccggccgtcgctgagcgccgctcagctccggcaggtggacgggcacctgctccgctcctccacgctcctcctcgccgaccgcttcctccccaaccagctactccgctcgctgctcccagcgcacccgctcggcgccctccgcctgttcccgcgcctccgccgcatcatccccgacttccggccgaacaactacaccttctccttcctccttaaagccgccgcagactcgtcagcgccaccgtatctggaaccggagtccccattcggctcccacgccatcgtgccctgtctccacgccctcgccgtcgtcctggcctgggacgcccacgcctacgtcgccaacggcctcatccacgcctacgccacccacggcgtcctgccagccgcccgccgcctcttcggaggcgccgtcgcctcccgcgcggccgacgtgtgctcttggacgtcgctcctcacggcctgcgccaaggccgggcacgtggatgaggcgcgcgccctgttcgacggaatgccccgcaggaacgatgtcgcctggagcgccatgctgagcgcctacgtggccgcgggcagcttcggcgacgccgtgcggctgttcgaggacatgctcaggtcgtgcgtccgccccaacagggcggcggtggtcggggtgctgaccgcctgcggggcgctcggggcgctggaccagggcaggtgggtgcacgccttgctcgtcggcggcggcggccacggcgtggcgatggacggcgtagtggcgacggcgctggtggacatgtacgccaagtgcgggagcctggaaacggcgaggcaggtgttcgcggcggcaccgcgggggcagcgggacgtgttcgcctacacggccatgatctcggggctctcggaccacggccgctgcggggaggcgatcgacctgttcgggcagatgctggtggaaggggtgcgccccaacgaggtgaccttcatctgcgtgctcaccgcctgcggccgcgcgggcctcgtcggccgcgccaaggaggtgttccgcagcatgggggcggtgcacggcatggagcccggcgtggagcactacgggtgcctggtggacgtcctgggccgcgccggacagctggcggacgccttggaggccgtgcgttcgatgcccatgaggcccgactcgtacgtgctgggcgcgttgctgaacgcctgcgcggcgcacggcgacgtggaggccggcgagcaggtggtacgctggctggcggagctggggctggaccacagcggggtgcacgtgcagctgtccaacatgtacgccgggtggggcaagtgggaggaggtgctcaaggtgcggcgggacatggaggagaggagggtggccaaggtgcccgggtgcagcatgctagaggtgggcggcgtggtctgcgagtttgttgccggcgaccgctcgcatcccctgatgccagagatcatgtcagccagtagagacctccacgggcagctccggcagttggaccatgactacctcagcttaggccctctttgtttacaatcaagcttatag

SEQ ID NO: 129452 - DNA, 435 bp, Zea Mays
atgctcttccttgtctggagtggtcgacacgcagggtcaaaagaaatggttgttcctcttgtcccaaacgcattgatcctctagcgtagttcttggggaattcacgtggatcgaggaagagattttatttgtgttggggtttggaaggtggtggtgttgctcctgctgttcttggtatgagcgttggagatgggacatactactacaatgtgctcaaggtgagccgaaacgccacagcgtgacggaggaggacctcaagaagtcgtaccactggctggacatgaagtggcaccccgacaagaaccctggcgacgtcaagaatgaagttgaggccaaattcaagatctctaaggcctaaggggttttgagtgatccccagaagagggcggcatacgatcagtatggcaaggaagggctgaaggcctttgcagatat

SEQ ID NO: 129453 - DNA, 2450 bp, Zea Mays
gtagctctctcacccccaaccccaatggtcagcccgtgagggtgaggccgtgaccatttaaaagtcgttctctctccctctctctccaccacaccagccaatgggtgaacctaaacccccacgccccactcagtccagccgaccagccaccctcaccatgcctcgccgcgcaggagccgcctggccatgcttcctcctgctccacattatcgcccacctacacctcgccgtcaacgccgccgacgccgacgctctgctcaccttcaagtcctccctcgaccgctccgaccgcctcccgtggcgccccgacacggcgcccgctttctgcgcctcctggcccggcgtgcgccagtgcgcccccgccggccgcgtcaccaagctcgtcctcgagggcctcaacctgacgggctccctcaccgccgcgctcctcgccccgctggccgagctgcgggtcctcagcctcaagtccaacgccctcacaggccccatcccggaggccctcccgcgcgcgctcccaaatctcaagctgctgtacctcgccgacaaccgcctccagggccgcgtccccgccaccctcgccatgctccaccgggccaccgtcatcgtcctctccggcaaccgactcacgggccagatcccgccctccctcgccgccctgccacgcctgacctcgctgctcctcgaccgcaacctgctcaccggcgccgtgccgccgctggcgcagcgcacgctcagggcgctcaacgtctcggccaaccgcctgtcgggggagatcccgcgctcgctcgccgccaggttcaacgcctcgtcgttcctccccaatgccggcctctgcggcgctcctctagccgtccgctgcgtcgctggtggcccgagccccgcgccgctcaccgcggccacggcggctttcgcgcccctgcccccgccccggaccaaggcacgacgcggcaagaacgccgccgtcgtggccggagccacggtggcaggggtggtggtgctggccatcctagtggcggcggcgctcatggcgtcgcggagagggaggaacaagcgcgtcgccggcgacgtcgacaagggcaacgccggtacagtggcggcggaggcggagcaccagacagcacaggcacagcagcagcatattcatgcatcctccgcggcgccggccgcaaccacagccgggggcgtcggtggccgggagttctcgtgggagcgcgagggaatcggcaagctggtgttctgcggcggcgtggcggagatgtacagcctggaggagctgctgcgcgcgtcggccgagacgctggggcgtggcgaggtaggcagcacgtacaaggcggtcatggagacggggttcatcgtgacggtgaagcggatgcgcgacccgtcggcgggcggggtgggggccgccgagttcgggcggcgcgccgaggagctggggcgggtgcggcaccccaacgcagtggcgctgcgggcctacttccaggccaaggaggagcggctgctggtgtacgactactacccaaacggaagcctcttctccctcgtgcacgggtcgaggccgtccagcaagggcaagccactgcactggacatcgtgcatgaagatcgcagaggacgttgcggcggggctggtgcacctccaccagtggagcatcgtccacggcaacctgaagccctccaacgtcctcctaggccccgacttcgagtcgtgtctcaccgactacggcctgctgccgacgctgctaccctccaacgccgagctccactcctcgagctccctgttctaccgcgccccagaggtacgcggcgcccacgccacgtccttggaattattcacgcccgcgacagacgtgtacagcttcggggtgctcctgctggagctcctgacgggccggacaccgttccaggacctcatggagctgcatggcgacgacatccccagctgggttcgcgcggtgcgtgaggaggagagggagacggagtctgtgtccgccggtggaggtggagccgaggagaagctcacggcgctgatcaacatcgccgcgacgtgcgtggctgcggacccggccaggcgccccaccacggcggagctgctccggatggtgagggaggcgagggccgaggccatgtcatcgtcaaacagcagcgaccggtcaccagctcggtggtcggatgccatgctgggcgtaccactgccacgggatcaggccgcggaaagcttcacggacagggagaggctagactagaagaagcttccttgcttgcatcactgtgatgagatattgagatggatggtttggattgggttttgtttgtttgtttgttgtgcattttttttctttttaaatcagagactgatgatgatgagacaccaaagcaaagcaatgcaatgcaagcaagctatagatgctgccagtgttttatgttaatcttccagtcaatgattatctacaa

SEQ ID NO: 129454 - DNA, 3299 bp, Zea Mays
cacggacacggtggtccaggcgtccctgcctgccatgcattaacatttaatcttctcgtatatatatatatgctgcgtgcagggtcgaggccgtccagcaagggcaagccactgcactggacatcgtgcatgaagatcgcagaggacgttgcggcggggctggtgcacctccaccagtggagcatcgtccacggcaacctgaagccctccaacgtcctcctaggccccgacttcgagtcgtgtctcaccgactacggcctgctgccgacgctgctaccctccaacgccgagctccactcctcgagctccctgttctaccgcgccccagaggtacgcggcgcccacgccacgtccttggaattattcacgcccgcgacagacgtgtacagcttcggggtgctcctgctggagctcctgacgggccggacaccgttccaggacctcatggagctgcatggcgacgacatccccagctgggttcgcgcggtgcgtgaggaggagagggagacggagtctgtgtccgccggtggaggtggagccgaggagaagctcacggcgctgatcaacatcgccgcgacgtgcgtggctgcggacccggccaggcgccccaccacggcggagctgctccggatggtgagggaggcgagggccgaggccatgtcatcgtcaaacagcagcgaccggtcaccagctcggtggtcggatgccatgctgggcgtaccactgccacgggatcaggccgcggaaagcttcacggacagggagaggctagactagaagaagcttccttgcttgcatcactgtgatgagatattgagatggatggtttggattgggttttgtttgtttgtttgttgtgcattttttttctttttaaatcagagactgatgatgatgagacaccaaagcaaagcaatgcaatgcaagcaagctatagatgctgccagtgttttatgttaatcttccagtcaatgattatctacaacatagtacgtatttgttttgaattactactatatatatggcatacaacatctgctattgatgtctgtataaataaataaatgaacctcaatcagcagttgaacctgctttgtcttctcaaaacgttgttacttcttcttcagaagacaccaccccttccggccttgtaaacaacaagacaaggcccagaccagcccatctcacagagcaccctgtgacgcacgcagaggaaaaatttgcaaaaaagaccaggcgcaggcggcaaaaccaacagaacaggcctatgttcccatcgagtcgagacgagaccgtcctccgcccgagtctcgctcgctagctagggtttccaccaatggcggcgcccaccacctcccgccgcggccccggcggcgcccgcaacatggacgacgagaacctcaccttcgagacctccccgggggtcgaggtcgtcagcagcttcgaccagatgggcatcaaggacgacctcctccgcggcatctacggctacggtttcgagaagccctccgccatccagcagcgcgccgtgctccccatcatcaacggccgcgacgtcatcgcgcaggcccagtccggtaccggcaagacgtccatgatctccctcaccgtctgccagatcgtcgacaccgccgtgcgcgaggtgcaggctttgattctctcgcctactagggagcttgcttcccaaacagagagagttatgctggctattggggaccacctcaacgtccaagtgcacgcttgcattggtggaaagagtattggtgaggacatcaggaggctcgagaatggggtgcatgtcgtctctggaactccaggcagagtctgtgatatgatcaagaggaggacactgcggaccagagccatcaagcttctagttctggatgaagctgatgagatgttgagtagaggctttaaggatcagatttacgatgtctacagatatctccctccagaacttcaggtggttttgatctctgcaactcttcctcatgagatcttggagatgactagtaagttcatgaccgaaccggttaggatccttgtgaagcgtgatgagctgaccctggagggcatcaaacaattctttgttgctgttgagaaagaggagtggaagtttgatacactttgtgatctttatgatacactcaccatcacccaagctgttattttctgcaatactaagagaaaggtggattggctcactgaaaaaatgcgtacaaataacttcaccgtatcagctatgcacggtgacatgccccaacaagaaagggatgccattatgggtgagttcaggtctggcgcaactcgtgtgctaataactacagatgtttgggctcgaggactggacgttcagcaggtttcacttgtcataaattatgatctcccaaataatcgtgagctttacatccatcgcattggtcgttctggtcgttttgggcgcaagggtgtggcgatcaatttcgtgcgcaaggatgacatccgtatactgagagatatagagcagtactacagcacacaaattgacgagatgccaatgaatgttgctgatcttatttgagcagcaagaggatcgggaggggagcttcttgtgttggcttgaggcccttggcgcgagtgtggctgtggactggagcagatgggctttgtagttgggtgtggagcagagattatttccgtttttgccatggcatgaactgtatatattttagctcgctccagctcatgtaacactttgttgctgcgtttgtgcttgggatacgaagacctgtgttgatggcttcgttagtgtgacactgatttggcgtcggatttttgtttgtcatctgtcattcctgtgctgatctgaattgctgtttgtttattattattattattacaattactatcaattattatggttgactggtattacaattactatcaattattatggttttgactggttgcagagccgagaattgtgattctgtgcttattacatgaacctatgcttttcgtagcaggatttattattactaggggcgccctatccagcattgggaaagcatgaacaagtaattatacatgctatatttaaattagttaattagttagaggatgattgaatcttcaacaaaacagtttaatctggagaggaagaaagcaaatatcaaacaacacacacacgcttatgcttgataggaaacacattatgattgaatgaatgcaggttcttgatttcaaatacttatgctcggcagtagaaatccatacttatgctcggcattagaaatcctcggcacacgctgggtcgaacc

SEQ ID NO: 129455 - DNA, 1736 bp, Zea Mays
gaggtggagccgaggagaagctcacggcgctgatcaacatcgccgcgacagcaccctgtgacgcacgcagaggaaaaatttgcaaaaaagaccaggcgcaggcggcaaaaccaacagaacaggcctatgttcccatcgagtcgagacgagaccgtcctccgcccgagtctcgctcgctagctagggtttccaccaatggcggcgcccaccacctcccgccgcggccccggcggcgcccgcaacatggacgacgagaacctcaccttcgagacctccccgggggtcgaggtcgtcagcagcttcgaccagatgggcatcaaggacgacctcctccgcggcatctacggctacggtttcgagaagccctccgccatccagcagcgcgccgtgctccccatcatcaacggccgcgacgtcatcgcgcaggcccagtccggtaccggcaagacgtccatgatctccctcaccgtctgccagatcgtcgacaccgccgtgcgcgaggtgcaggctttgattctctcgcctactagggagcttgcttcccaaacagagagagttatgctggctattggggaccacctcaacgtccaagtgcacgcttgcattggtggaaagagtattggtgaggacatcaggaggctcgagaatggggtgcatgtcgtctctggaactccaggcagagtctgtgatatgatcaagaggaggacactgcggaccagagccatcaagcttctagttctggatgaagctgatgagatgttgagtagaggctttaaggatcagatttacgatgtctacagatatctccctccagaacttcaggtggttttgatctctgcaactcttcctcatgagatcttggagatgactagtaagttcatgaccgaaccggttaggatccttgtgaagcgtgatgagctgaccctggagggcatcaaacaattctttgttgctgttgagaaagaggagtggaagtttgatacactttgtgatctttatgatacactcaccatcacccaagctgttattttctgcaatactaagagaaaggtggattggctcactgaaaaaatgcgtacaaataacttcaccgtatcagctatgcacggtgacatgccccaacaagaaagggatgccattatgggtgagttcaggtctggcgcaactcgtgtgctaataactacagatgtttgggctcgaggactggacgttcagcaggtttcacttgtcataaattatgatctcccaaataatcgtgagctttacatccatcgcattggtcgttctggtcgttttgggcgcaagggtgtggcgatcaatttcgtgcgcaaggatgacatccgtatactgagagatatagagcagtactacagcacacaaattgacgagatgccaatgaatgttgctgatcttatttgagcagcaagaggatcgggaggggagcttcttgtgttggcttgaggcccttggcgcgagtgtggctgtggactggagcagatgggctttgtagttgggtgtggagcagagattatttccgtttttgccatggcatgaactgtatatattttagctcgctccagctcatgtaacactttgttgctgcgtttgtgcttgggatacgaagacctgtgttgatggcttcgttagtgtgacactgatttggcgtcggatttttgtttgtcatctgtcattcctgtgctgatctgaattgctgtttgtttattattattattatt

SEQ ID NO: 129456 - DNA, 685 bp, Zea Mays
attgactgctttatcatctacaagtttacacttaacagttttttttcttacaatgaatgggcggtaccgatggtgttgggcattaccgggcttctgttgttggcaaccttccggattcctaccaacagttccagtataagttgtcctcaaggcttgccaaggaccatcctgacctcagtgagtatctgtgcaaggaaataatgcatcaggtcctggctccttggatcgaaaatctcaattttgtgagactgaaggaatctggctggagcgagaggttactcaatagtctttattatgtgacatggaaacatggtgatcagtttcctgatgatattgagaaactttggaagcaatactcgcaatatcatcccagttttgaacttcttgatcaccagagggattgaggactgcaatgtgaatccatcggcagagatcactggtgcatttgctacttatttttctgtttcgaagcgtgttagcctatatcttgctcggatctgcccacaacagaccattgatcacttggtctgcgagctatctcagagaatgctcgaggacaatgaaggcctgggaaggttgatgtcatattggagttttcccaagggcctactgcctctcaggttgcaacagtcatcgatagccagcctcacatgtcccccttcttgttcgtggtcccggaggcatt

SEQ ID NO: 129457 - DNA, 100 bp, Zea Mays
ctgatgggaagaaacataaaagtcaagaaaagaccgttgctacagcttcaaaatcaagtccggctttcaagaagagcaaggatgacgatgattctgatga

SEQ ID NO: 129458 - DNA, 1068 bp, Zea Mays
atgcatccatttaaagggtctgatttgtggacatcacaacaatggaggcgctccatcctcccaggcatctccgccggcgactggtactgtccatcctatgaatccaggattttccctctaaattatggacttgcaagattaaaaacatctcctactataggttatcttaggatttttcatggacttgcatcctcttttgttgcagtgagtcaattggaagaatattctgaaacgagcgggcacttagtgcacaccaaggttgcattttttttgatgggttatcttttttccatccttcattttcaacttatgatccgattatcagagaacaccttgatggctcacctatcaacgtttcttccagcgcttatggatgctaaggtggttaagaaggtacagacaaagaaggcgcctgctcccaagattgctaaacaagagtccagtgatgatgacaccagcgacgagacctctgaatctgatgaggaacatgcaaagaagcctgctgctaaacccttggctacagttgcgaaaaatggttcgaagacggtcaagcaagagagcagcagcgatgaggacagttctgaagatgagtcggatgacaacagtgatgatgaacctgcaaagaaggctgctgctaaaccttgggtgccgttgctaaaaatgttttacccttccagtgctatagaacagaagggcaaaactgagcaaaaagaaccactaagggaagtgcctccaaagtcaaaggctccagcagcaactatcaaaaagaaagattccagtgaaagtgagtccgagagtgattctgaggttgaggaagcactttcagctgcaaaaaaagaaagcagcagtgaggatgaagatgacagtagtgaggaaagttcggatgatgagccaacaaaagttgaagaaaagaaggatccaaaagtatcagaaaacattggatctgaggatgaatcttctaaagacgagagtgataaagacagtgaagagcctgctaatactccaaagaaggctccagtgcacacctctgaaaagcaaactgctaccaaaagaagtatgcacatgtga

SEQ ID NO: 129459 - DNA, 1287 bp, Zea Mays
atgcatccatttaaagggtctgatttgtggacatcacaacaatggaggcgctccatcctcccaggcatctccgccggcgactggtactgtccatcctatgaatccaggattttccctctaaattatggacttgcaagattaaaaacatctcctactataggttatcttaggatttttcatggacttgcatcctcttttgttgcagtgagtcaattggaagaatattctgaaacgagcgggcacttagtgcacaccaaggttgcattttttttgatgggttatcttttttccatccttcattttcaacttatgatccgattatcagagaacaccttgatggctcacctatcaacgtttcttccagcgcttatggatgctaaggtggttaagaaggtacagacaaagaaggcgcctgctcccaagattgctaaacaagagtccagtgatgatgacaccagcgacgagacctctgaatctgatgaggaacatgcaaagaagcctgctgctaaacccttggctacagttgcgaaaaatggttcgaagacggtcaagcaagagagcagcagcgatgaggacagttctgaagatgagtcggatgacaacagtgatgatgaacctgcaaagaaggctgctgctaaaccttgggtgccgttgctaaaaatggtttgaagaaaggcaagcaagaaaccagcagggatgagaccagttctgatgatgagtcagacgatgatgttaaacctgctgccccactaaagaaaacatatgtggctgttgcacaaaagaaaaagggagattcttcttgagagtgactctgatgatgactcggatgaggaagtgcctccaaagtcaaaggctccagcagcaactatcaaaaagaaagattccagtgaaagtgagtccgagagtgattctgaggttgaggatgcaagtaaaactcatcctaccaagagagctgcttcaaaaatgaaagatgaatcaagtgatgactcagacactgatgatgatgaagaacctcctcaaaagaagtagaaggaagcactttcagctgcaaaaaaagaaagcagcagtgaggatgaagatgacagtagtgaggaaagttcggatgatgagccaacaaaagttgaagaaaagaaggatccaaaagtatcagaaaacattggatctgaggatgaatcttctaaagacgagagtgataaagacagtgaagagcctgctaatactccaaagaaggctccagtgcacacctctgaaaagcaaactgctaccaaaagaagtatgcacatgtga

SEQ ID NO: 129460 - DNA, 879 bp, Zea Mays
attaagcttccgtttcttttatgtattctttctttttttataagggcgttcctgttaaatcggttgaaacagaagcgacatcattggtctcttagcacagttctctaactttcgatgcacgtttttctttatttgtatcacgttcttctttattagcaaatcgtggagaatgcatgcaagttcttctttatttgtatcactatctcttagcacagttctctaactttcgatgcacgtacaagtctattttttaataaaaaactgtctatatatgggggcacacagaattctgtggacgtgtgcatcaatcatcacatgctgttatgcctgatgtcctgtggattggtgttcgatctcgtgaattcgagttgtcctccattcctcctgcatgacagatatactagacatttggaactgtttttttgcagctacatatataccaactggcagacatttggaactgtttttttgtgtgtgttcaggttactgaattggaacgggaaaaatgtccaccgttattaagagggctaaagaattcccaatcgattgtagctacatgcatgaaggagtgcacacagtgtcctacgtccataggatcgtcagctatttcatgcaagcatccacacaagtgtcctactatatattattgtgttctgatacttgagacttttattatgactatgtatgagatattgtctcttattagtactgaatgagatgtgtcttattatgattatggatgagacttttgtgatgtaattgataagagtatggatttaaatattgttatgtgattgtgtgtgagatgttttatgtgaaaatatgttgtgctatatatttgttatgatgtggaatgtggtgtaaaataaaaaataaaca

SEQ ID NO: 129461 - DNA, 660 bp, Zea Mays
tttgaggctttctggcccaagttttatggttttcaggagactgtttcttcaacttgggattcgatggaagcgactgcttgccccctggagtccctagctcttaaattgaaagccactgctagaggcctgcaaagttggagtgaccgcaaagtgggaaattttagtaagcagcgtgcgttggcaagagagattatctaccagttcgagcttgcgagggagttcagacagctttctgagttggagatttggctgttaaacagactcaagaagcattctttggcattggcgtcgctcattcgtacagttgctagactccgctctagggtgtcttggttgagacatggtgatgccaacaccaagtttttccatgcatgtgctcgttataggaagaagaacttcatcgccaagttgtctaacggtgaagggttggttaatagtcatgatgataaagcggatgtgctgctcaattattttacggagctgattggtagcagcaacgacagggagtcttctattgatcttgaggccctcgggatccaacaccatcttctggatcaccttgtcagctcatgttcggaagaagaagtttgggataccatcaagcagatgccctctgacaaagcgccggggcccgatggcttcacgggaagattttataag

SEQ ID NO: 129462 - DNA, 1874 bp, Zea Mays
gacgcagttgtggtcgcggcagcaggcgtcgaggtcgtgcaggtgcagggctcctcgccgtcgcagccgctccatcccacaccgcagtacttaccgtagcggatcccaacggctgcagcaaagaagcgttaaaccgggtcagatcgccgtcccgacggaatcgatgaggatggctgaagggggtcgcaattgagggccgcgcaagagcggctgcggcgggggctggggcgccgaggacggcggcggcgaggagcgtccgccgcggcgacaacgcttcgtattccgcatcgcagtttgttgaccggattggctggatgggccgaaccaggtcaagtggagatggagagagtcctggtgtggtgcgggccgcaagtgtgagtgagacgtcaccatcgaatcccaccacaaaagctcctttcgtcacaccggccagcacccagcttctcctctcctcacccccacgccccaccccaccaaacaatggcgccggcggcgacttccacagcctctgcgccctcctccttccactccaccggtaggcatagggccagggtcggggcccggccatcgctcgtctctctccgcgtcagagcagccaatcccaacgttaccgccgatcccgcaccggccttccagtccgtcacgaccttcgcgccagccaccgtcgccaacctcggcccgggcttcgacttcctcggatgcgccgtcgccgacgcctccctctccctgggtgacaccgtcaccgcaaccctggacccgtcactcccgcccgccaccgtctccatcgcctccgtcacatccccgtcccgccccaacctcgccgagcgcctctctagggacccgctccgcaactgcgcgggcgtcgccgccatcgccgcgctccgcgccctcggcgtccgctcccacgccgtgtccatccacctcaccaagggcctgccgctcggctcggggctcggctcctccgcggcctccgccgccgccgccgccaaggccgtcgacgccctcttcggctcgcgcctcggccgcgacgacctcgtcctcgcgggactcgagtcggagaaggccgtcagcggcttccacgccgacaacatcgcccccgccatcctcggcggcttcgtcctcgtccgcagctacgacccctttcacctcgtcccgctttccttcccgccagcgctccgcctccacttcgtcctggtcacccccgacttcgaggcgcccacgagcaagatgcgcgccgcgctgcccaggcaggtcgacgtccagcagcacgtgcgcaactccagccaggcagcggcgctcgtggcggcggtgctgcagggggacgcgggcctcatcggctccgcgatgtcgtccgacggcatcgtggagcccaccagggcacccctcatacctggcatggcggccgtaaaggcggcggccctgcaagctggagcgctgggctgcacaattagcggcgcgggccccacagtggtggccgtcatccaaggggaggaaaggggggaggaggttgcccgcaagatggtggacgcgttctggagcgcaggcaagctcaaggcgacagcaaccgtcgcgcagctcgatacccttggtgccagggtcatcgccacgtcatccttgaactagcaaaagattcggaaagtggtactgcaattgtatcaccaaacaaggaagaatgaaggggaaccccatggatttgtatgttttctcttctttcttgcatctttaggtggttaattggctttggaataaatgagatggaggacatcgctagaacaattctgttccgtgggctgtaatttcaatttgggctggtttctttatcatgccatggataattatgaataaatttgaggtagtttgttacctgtcgtcct

SEQ ID NO: 129463 - DNA, 474 bp, Zea Mays
atggcggggcgtcgggggctgaggagccagaaaccaaggtcggtcgtcgtgccccgttccgggtcgggcctgagcgtcgagtccacgtccatcctcatcagcggcctgaccacgctgctgatgctgcccaccatcggcgtggcgatgcgtctcatggacttgccggggcggcggaggccggaggctgctgctgtggacgatcccggtgctgatcgcgtcgctggtggtggcaagcgtggtgacgatggcggcgcacggggagcgtcatggtgtacctgtgcagctgtgctgcttcgtgatggggttcaggcccatccccaacatcctgtgcaccgagatcttcccgacgctggctctgcatcgccatctgctccctgggtgaggctcgtctgctacctggcgctgcacgtgccggagaccaagggcctgccgctggaggagatcaacagttccaagtgcagtacagacaagtag

SEQ ID NO: 129464 - DNA, 486 bp, Zea Mays
cgacgtgttcctgtggctgctcatcgacggagagcgtcggaggatggacgatgacggcaacggcgagaagaagagcatgactgtcgtgctgctctctttgcagaggttgaagttggagcagtacacagatatcatggtcatggcgctctgctgggacttgtttggcgccggaacagagaccacatcggtcacaactgaatgggccccgtcgcttctgctgaaccacccggaggccctgaagaaggcacaggcagagctcgacgcggtggtgggcagctcgcatctgatcaccaccgatgacatgtgctgcctcggctacctgcactgcatcatcaacgagaccctgcacatgtactcggccgccatgctgctcctgccgcacgagtcaatagtggactgcaaggtcgacggctacgacagtaccctctccaaggacgatggcctggtcgatggactcagaaaatgtgagcaatggaagtggcagga

SEQ ID NO: 129465 - DNA, 1152 bp, Zea Mays
cccatacccatggcatcctcctcggggggcggcggaggccgtaggatgacccccggaggagactcctctgcctccgccggcggcaggaggatctaccgcacccagaccgccggcaacctcggcgactccatattcgacagcgaggtcgtcccgtcgtcgcttgtcgacatcgcccccatcctgcgtgtggccaacgaggtggaggccagcaacccgcgagtagcctacctctgccgcttctacgccttcgagaaggcgcatcgcctcgaccccacctccagcggccgtggtgtccgccagttcaaaactgcgctgttgcagaggctcgagagggagaacgatcccacgctcaagggcagggtcaagcagagtgacgccagagaaatgcagagcttctaccagctctactacaagaagtacattcaggcgcttcaaaaagttgctgataaagccgacagggctcagctcaccaaagcctatcaaactgcagccgtgctcttcgaggtcctcagagccgtcaatgtctcccagaaaatcgaagtcgataagtcgattctggagacgcacaaccaggtcgaggaaaagaagaagctataccttccttacaatatcctcccgcttgatcctgacagtgccaaccagcctatcatgctctatcctgagatccaagctgctttccatgctcttcgtaacactagaggtctgccatggcccaaggaacacgaaaagaagcgtgatgcacccaaggaacacgaaaagaagcgtgatgcagatcttcttgcctggcttcaggccatgtttggattccagaaagataacgtatccaaccaaagggagcatctcatactcttgcttgccaacgtgcacataagacagattcccaaatctgaccaacaaccaaagttggatgaccgagcactggatacagtaatgaagaagctatttaagaattacaagaggtggtgcaagtatcttggtcgcaaaagcagcttatggttgccgactatccaacaggaggtgcaacaacgcaaacttctctatatgggtctttatctgctcatatggggcgaggcagctaacctgagattcatgccagaatgtctttgctacatctatcatcatgtatggacaatcctgagttttccaaaataa

SEQ ID NO: 129466 - DNA, 275 bp, Zea Mays
tggcctttgaactctatggtatgttggctggaaatgtgagcccgacgactggtgaaaatgttaaaccagcttatggtggagaagaagaagccttcttgaaaagagttgtgactccaatctacaaagttatagagaaggaggaagtagagaggagcaagaccatgaaatcaaagcactcacactggagaaactacgatgatcttaatgagtacttttggtcaagagattgcttccgattgggatggcctatgcgatctgatgcagattttttcaag

SEQ ID NO: 129467 - DNA, 1256 bp, Zea Mays
agattcgtcactgcggctatactgaaactgggtcaagcatcgccaagaaggaaaaggagcctcattcctaaagatgaagtcattcctccacttccaaatgcaccataccaccagggccagaatttccatgaaaaaattgtggccaaaggcatccttggcgtcttgaattatcgagaagaagtcaagctcatgattccaatggaaacccacataacttcagcagtctgtactgaaaggacagcaaaacaacagatgaaaggcaacaggtgtgtctttgacaattctaggccatgtgttgaggaagtgctaaaagctgttaatgtggaaggggggctgtggtgtttggctggagcttccaaactccaggaacttgtttttgggtcggtgcctactggtgcttttttagccctgtaggttgtggtcgccttcttcattgatgtggcgcgacggttgtatttgagggatggcgtgtgtgtgttggtgtttgtgtttcgggtcactcttgacctttgtacttactttcttccttaaatgaaatgacgcgcagttctcctgcgctgttcgagaaaaaaagataagtcgtctcctcacactgcaggtcacacagagtgcagacaaagtactgtcaggtgccagaaaaccctttcttctgaggatgttctttgagttaattctatctctaaagaccaaccatacaaagatcttgaatttcttaccagccttagactgccaaatccagttaaaggcagcagggggctgaattgattgaaaagtaaggctatagaacttggatgagctgaaagtagagttgccccacggatgggtccatttgtctttatcagctctagaattctgaaggttattgacaagctcatgaaaagtttgatatttctgagcagcataaggagataaaggagtatggatattgtgttccagatccatgttggctaaaaattcttgaaccaaacaatcttttttcctggcaaaagaaaagagacaaggaaaagtgaatttgggggagatattgttaatatgggacaattgtgattatacccttcgttggccttttagttgtgattttaccctccacattttttaactttgtgtttttacccctccattttaaaaacaaactaccgtttgcccttgcctcttaacgacgttagggaaagcaagaattagttattaaaaataaaaatataagaagaaatgggtgaatggtccaaactaccctcctattctatatgggcgcaatc

SEQ ID NO: 129468 - DNA, 2001 bp, Zea Mays
atgtctcttgttgttaagctacgatacatcttgaagttactatcagctgcttcttgggttgtgattttgcctgtaacttatgcatacacttggaagaatccaactggtcttgcaagagcaattaaaagttggcttggtgatggtcagaatcagccatcattatacattttggcagttgtgatttatttggcaccaaacttgctgtccgctacactatttcttttccctgtaattaggagagctcttgagagatcaaatcttaaagtcgtaacattcataatgtggtggtcgcaggtagtattgattaatctaaaacttatacagcctcgcttatttgttggaagaggaatgcatgagggcgcattctcccttttcaagtatacaatgttctgggtcttgcttttggccactaaattggttgtgagcttctatgtggagatcaaaccacttgtgcagccaacaaaagatataatgaaggagccaatacgaacatttaagtggcatgagtttttcccccatgcaaataacaacattggtgttgtcattgcgctttgggctcctattattcttgtctatttcatggatactcaaatttggtatgcaattttctcaacgctaattggtggtgtctatggggcttgtcgccgtcttggtgagacatctgaggataccagagaacaagaaaaaatagccgcaagatttgctcagatttggaatttaattatcacaagcttccgtgaggaagatttgatagacgacagagagaaggacttgttacttgttccatactgcaaagatcgtgatatggatataatccaatggccaccattcctgcttgccagcaagattccaatagcattggatatggccgcagatagtggtggaaaagatcgtgatctaaagaagaggatgaaatcggatccatattttacttatgctatcaaggaatgctatgcttctttcaaaaacatcatatatgaactagtgatcgattcacgagagagaggttacatacaaaagatcttcgatgcggtggatgagcacatagcagaagagactttgataaaggagctgaacatgagtaaccttcctaccctaagcaagaagttcattgagctgcttgacttactggaaagtaacaacaaagaagatcatgatcagatcatcatattgttccaagacatgcttgaagtggttacaagggacataatggttgaccagctcagcgaactactggaattgatacatggtgcaaataataaaagatctgaaggaatgacatcacttgaccaacaagatcagttgttcacgaaagctattgattttcctgtaaagaaaacccaagcatggaatgaaaagataaaaaggcttcgacttttactcacggtgaaggaatcggctatggatgtccctacaaacctggatgctaggaggaggatatctttctttgctaattctctttttatgtcgatgccagatgctccaaaagtgcggcaaatgttgcccttctctgtcttgactccttattataaagaagatgttcttttctcttcacaagcactagcagaacagaatgaggacggagtttccatccttttttatttgcaaaaaatctacccagatgaatggaaaaattttcttgaaagggtgcattgtgagagtgaagatcaactccacgagactgagcattctgaagagcagcttcgcctttgggcatcataccggggacaaactttgacaagaactgtaagagggatgatgtactacagacaagctttagtccttcaggcttcccttgatatggccagagatgatgaccttatggagggttttagagcagctgacctgttatctgaatctgatgaatcaccactattgactcaatgcaaagctatagctgatatgaaattcacatatgttgtatcatgccagcaatacggtattcagaaacgttctggtgatccacatgcacaggatattctgagattgatgaccacgtaa

SEQ ID NO: 129469 - DNA, 2306 bp, Zea Mays
agggttgcgtacatcgatgaagtcgaagagcctagcaaagacaaaaataagaaaatagagaaggtttactactccgcattggtgaaggcagcagtaacgaagcctgatgatcctggccagaaacttgatcagggatatatataggataaagcttccaggaaatgcaatgctaggtgaaggaaaaccagagaaccagaaccatgccataattttcacacgaggtgaaggtctccaaaccatcgacatgaatcaggaacattatatggaggagactttgaaaatgaggaatttgttgcaagagtttctgaagaaacatgatggtgtgagatatccatcaatacttggtgtaagagaacacatcttcaccggaagcgtgtcttctcttgcatggttcatgtcaaaccaagaaacaagttttgtgaccattggacaacgtgtacttgccaatcctttgagagttcgatttcattatgggcatcctgatatctttgatcgacttttccacctcacacgtggaggtgtaagcaaagcttctaagattatcaatcttagtgaagacatatttgctggatttaattcaacactgcgtgaaggaaatgttacacatcatgaatacatgcaagttggcaagggcagagatgttggtctcaaccagatctcactatttgaagcaaaaatagcaaatggtaatggtgaacagacgctgagccgtgacgtgtaccgtcttggacatcgttttgactttttcagaatgttgtcctgctactatactactattggtttttacttcagcacaatgataacagtttggaccgtttatgtattcctctacgggcgcctgtatcttgtcctaagtggccttgatgaagcattagccactggaaagaggtttatacacaacgagcctctccaggttgctctagcttcacagtcttttgtgcagcttgggttcttgatggcgctgcctatgatgatggaaattggtctagagagaggattcagaactgcattgagtgactttgtacttatgcagctccagttagcatctgtgttcttcacattctctcttgggaccaaaactcactactacggaaccacactgctacatggaggagctgaatatagagctacagggcgtggatttgtggtgttccatgccaagtttgctgagaattatcgattgtattcgcgaagccattttgtgaagggcattgaactgatgattttgcttattgtgtatgaaatatttgggcagtcataccgaggagctattgcgtacattttcatcacattttccatgtggtttatggttgtcacctggctctttgccccattcctgtttaatccttctgggttcgagtggcagaaaattgtggatgactggactgactggaataagtggatcagtaaccgtggaggtattggggtgccgccagagaaaagttgggagtcatggtgggaaaaagagcaggagcctcttaggcattctggaaagcgtggcactgttcttgaaatagtgctttcgttgcgcttctttatttaccagtatggtcttgtttatcatttgaacatcaccactcacacgaagagcgttctggtttattgcatctcgtgggtcataatctttgtcattttgctcgtgatgaagactgtatcagttggcaggaggaaattcagtgcagagttccagcttgtgttccggctgatcaaggggctgatattcataacgtttatctctattatcataatcttgatagcaatcccacacatgacagttcaggacatctttgtttgcatccttgcgttcatgccaactggatggggtttgcttctgatagcacaaactatgaggtcagctatttcacatatggggctatggggatcggtcaaggcgcttgcccgaggctatgagatcatcatgggcttgctgttgttcaccccgatcgcattcctcgcttggttcccgtttgtttcggagttccagacaaggatgctgttcaaccaggccttcagtagaggtctgcagatttctcgtatcctaggcggacacaagaaagaccgggctgcacggaacaaggagtgagtagccgagcagcgtgagcctggtagtgctgacctacatacaattcaaccatgccccacgtggcattatacttgtactggttattatgccaggttgtatattgcaaggaaaggaattcatctctgctaacgtgccagattgtatgtgtggcagcaggtactcgatcggtgagcactcctatagcttttttattattatttatgggtaaagtcaaagaaactaa

SEQ ID NO: 129470 - DNA, 117 bp, Zea Mays
ctgtctttctcattcctccctccccgcaaagcccattctcattccctcgtacatcccacgtctagctaaaattaaaaaaatctcattccctcgtacatcccaagtctagctaaaatt

SEQ ID NO: 129471 - DNA, 215 bp, Zea Mays
gttgtggatgcccttcctgctcctccttgacaccttggcctctcccaagtccttgctgatcctctccaaggttcctaatcaataaaacatacaaggccccaaatgtaagcttgaaaccacaattaactaggttagaacagacctagagatttagctgtcgtgcacgtgagcgtacgtgttatcggttcatgcattgcggtgatgtcctcatcacc

SEQ ID NO: 129472 - DNA, 1068 bp, Zea Mays
caggagagaagaggagtcgcatttcgcgtggtcgagtccgtccgtgtctgtcctccgctgtccgctggctgcgatagtgctgcctgctgctctaacccaatccaaggaggatgccgaggagcccgcagctgagcctgagcggctgcagctctctcttctccctgtccagcaccagtacgagccgcgacagcgccgccctgaaggcgccggtgccagcgccaccggcaggcgcggtgcccccacggcgcacccctctcctgtcgctcagcgtcggcgaggaggaagaggacgagggtgaggacgaggaggagtacctgctgggggccggcgccctggatctgcagctgacggggcccggtggcggcagcaacagcagcggcggctacgacgacgagcggaagaacatccggatgatgaggaacagggagtctgcgctgcgctccagggcaaggaagagggcctatgtgcaggagctggagaaggaggttcgtcgcctggtgaatgagaacctcaagctcaagaggcagtgcaaacaactgaaactagatatggctgcactggtccagcaaagcagcagcaagagcagctcccacatcagaagaacctcctcatccactcagctctaggctgctaccaataggaatatgtatgtgaatttaaagccatatatgaccaaggaagaatgggaggaagacgaacaaagctagctagactagactgcagcccctctaatccatggccattcgctgattaatacgataatatctcttatttgttggcttcttctagcttgcttcaatttcctagtacagcagtttatgtagtatttcctagattgttagcgcaaagctgcctttttcacccatggcatccactctagtggtgtccaggtagtgtcgatccaattttagtatagaggtcactcaaacctctctccatgacagagctttttattcgtttcctgtcttttttttattgttctaatcataataagatacgcacacattcacctgtatgggctacgaccatatacgactaatagttttctctagacagagaaaggcaaag

SEQ ID NO: 129473 - DNA, 1063 bp, Zea Mays
gcatttcgcgtggtcgagtccgtccgtgtctgtcctccgctgtccgctggctgcgatagtgctgcctgctgctctaacccaatccaaggaggatgccgaggagcccgcagctgagcctgagcggctgcagctctctcttctccctgtccagcaccagtacgagccgcgacagcgccgccctgaaggcgccggtgccagcgccaccggcaggcgcggtgcccccacggcgcacccctctcctgtcgctcagcgtcggcgaggaggaagaggacgagggtgaggacgaggaggagtacctgctgggggccggcgccctggatctgcagctgacggggcccggtggcggcagcaacagcagcggcggctacgacgacgagcggaagaacatccggatgatgaggaacagggagtctgcgctgcgctccagggcaaggaagagggagctggagaaggaggttcgtcgcctggtgaatgagaacctcaagctcaagaggcagtgcaaacaagtaacaaatagtagcacactttgtctcttatagctaaaaatgaatgaatactcatctgtttgtatataacatgtaccagctgaaactagatatggctgcactggtccagcaaagcagcagcaagagcagctcccacatcagaagaacctcctcatccactcagctctaggctgctaccaataggaatatgtatgtgaatttaaagccatatatgaccaaggaagaatgggaggaagacgaacaaagctagctagactagactgcagcccctctaatccatggccattcgctgattaatacgataatatctcttatttgttggcttcttctagcttgcttcaatttcctagtacagcagtttatgtagtatttcctagattgttagcgcaaagctgcctttttcacccatggcatccactctagtggtgtccaggtagtgtcgatccaattttagtatagaggtcactcaaacctctctccatgacagagctttttattcgtttcctgtcttttttttattgttctaatcataataagatacgcacacattcacctgt

SEQ ID NO: 129474 - DNA, 116 bp, Zea Mays
aaaaatttatttatttcattatatatctaagtctatatataagagtttataaaaatcaaggtggggccgtggcccccattgcccacccctgcgtccgccactgtaccacaccacac

SEQ ID NO: 129475 - DNA, 345 bp, Zea Mays
atgacagccgccgctccatcaacgacctcgccctccttcctccaccgtcccgctcgcacgaatctccttcgttgcgacactatcgtgggcctgcggtgcaaggagatcgccacgctcgttgttggggcctctgcgctctcctcctggcacgacggcagtcgtggtgagccccgaccctacttcattcttgaaagcttggcacctccgcgcgggattgggtgggttggttttctagcagactggcagcagatccaggattttgatgcactgcagcacacagtctttaaagatatagcggttcacatatgtgggagcgagtcaaaaacaaagacatgcaaatgttga

SEQ ID NO: 129476 - DNA, 648 bp, Zea Mays
aaacacgactagagtgggtgggagactgggaaagacgagacagcgagacaccactgagacgagagtcagccggcaggtgagacatcgcaggggaaccagctctcaagacggccgacggccggcttgcctacctgctcccatccttcccgagggaccgagaaagataagaaaggcggtggtcaacttgtgtcctgaggtgcccgtagaagcccaaggacaagaaacaaggagaagagtagatctacatctactccaccgatgagcgcgtctcggttcatcaagtgcgtcaccgtgggggacggtgccgtcggaaagacctgcatgctcatctcctacacatccaacactttccccactgactatgttccaactgtgttcgacaacttcagtgccaatgttgtggttgacgggagcactgtcaacttgggtctgtgggatacagcaggacaagaagattacaatagactgcgtccgttgagctatcgtggtgctgatgtttttctgctcgccttttctcttatcagcaaagcaagctatgagaatgtctctaagaagtgggttcctgaattaaggcactatgctcctggcgtgcccataatccttgttgggacaaaacttgccacgatagggttctggattctggaaata

SEQ ID NO: 129477 - DNA, 1951 bp, Zea Mays
aaacacgactagagtgggtgggagactgggaaagacgagacagcgagacaccactgagacgagagtcagccggcaggtgagacatcgcaggggaaccagctctcaagacggccgacggccggcttgcctacctgctcccatccttcccgagggaccgagaaagataagaaaggcggtggtcaacttgtgtcctgaggtgcccgtagaagcccaaggacaagaaacaaggagaagagtagatctacatctactccaccgatgagcgcgtctcggttcatcaagtgcgtcaccgtgggggacggtgccgtcggaaagacctgcatgctcatctcctacacatccaacactttccccactgactatgttccaactgtgttcgacaacttcagtgccaatgttgtggttgacgggagcactgtcaacttgggtctgtgggatacagcaggacaagaagattacaatagactgcgtccgttgagctatcgtggtgctgatgtttttctgctcgccttttctcttatcagcaaagcaagctatgagaatgtctctaagaagtgggttcctgaattaaggcactatgctcctggcgtgcccataatccttgttgggacaaaacttgatctgcgtgatgataagcagttttttgttgatcaccctggtgctgttccaatttccactgcccagggcgaagagctgaggaagctaattggtgctgccgcctacatcgaatgcagttcaaaaacccagcagaacataaaagcagtgtttgacgcagcaattaaggtggttctccagccaccaaagcaaaagaagaggaagaagaaggtgcagaagggatgcaccattttgtaactacaaacggtagagggcaacagtctggctgcggcgctgctgccaatgataaccatcgcctccttgctgtataatatatcgcctgatcatgccaccagcatgcacaagggagatggtggttttaggatccttgtcctactgtgttgtgtagaccaccgggtgtagttgactgtatctggttgtttgtatgtatgtacaagacaaaactagcactgcagatggtatggtaaggcgtaagcaaatacaatatgacactggtccagttccaggaatgaatggaatatgacattggtccgagatttgcaatacaatacaatatcatcatccaggaagctcatagctgctgctagtaggatactccggtcggagtagctaggtggagacaaggcaacggaagagcagcacagccgccgctgcggtaatggtgcacatgagctggccggggcgcggcggcgtggcgttgcacgaggggcgatccggagcgctgaagcagccatgggtctggtcgatgcccttgccgccggcctccaggagaaaggtggagttggggctgccgctgctgaagaggaggcaccagaagaagggcccgcggcggtcgaagccggcgcccacctgggtgtgctccttgccgcggatcaccgagagcgcggtggctgatgccagcgcgtcctccgggccgtcgcggtcccggtggcagccgaagaggcggccggagatgacgtccaccgtggggagctccacgccgcagttggcggcgtagacctccgtgatgtgggcctcgggggtctggcacgccatcgtgttgccgctgctgcaggcggcgccgcccgtggtggccgccatgcactcggagatgtactgcagcgccatgcacccgaggcctctgctgttgcgcagcgcaggcagcctgctcgcctccctcttgccgttgatgagggccacgaggtcgttggctgggttccctgccaccaccaccaccgccgattcaatttgagcactggcaaatcgattgagctctgatccagatatttttaccatggatctttgcagaggatacgcccgccggcagcgtcctggtgcagagcagcagaagaatcac

SEQ ID NO: 129478 - DNA, 1236 bp, Zea Mays
gagagtcagccggcaggtgagacatcgcaggggaaccagctctcaagacggccgacggccggcttgcctacctgctcccatccttcccgagggaccgagaaagataagaaaggcggtggtcaacttgtgtcctgaggtgcccgtagaagcccaaggacaagaaacaaggagaagagtagatctacatctactccaccgatgagcgcgtctcggttcatcaagtgcgtcaccgtgggggacggtgccgtcggaaagacctgcatgctcatctcctacacatccaacactttccccactgactatgttccaactgtgttcgacaacttcagtgccaatgttgtggttgacgggagcactgtcaacttgggtctgtgggatacagcaggacaagaagattacaatagactgcgtccgttgagctatcgtggtgctgatgtttttctgctcgccttttctcttatcagcaaagcaagctatgagaatgtctctaagaaggcaataatctttccctgcccactttcttgccccggccccggtttaatgcattcttatttattttagcttcttgacttgcatttcttgcatattacctgtgcatgtcgttttttccagtgggttcctgaattaaggcactatgctcctggcgtgcccataatccttgttgggacaaaacttgatctgcgtgatgataagcagttttttgttgatcaccctggtgctgttccaatttccactgcccagggcgaagagctgaggaagctaattggtgctgccgcctacatcgaatgcagttcaaaaacccagcagaacataaaagcagtgtttgacgcagcaattaaggtggttctccagccaccaaagcaaaagaagaggaagaagaaggtgcagaagggatgcaccattttgtaactacaaacggtagagggcaacagtctggctgcggcgctgctgccaatgataaccatcgcctccttgctgtataatatatcgcctgatcatgccaccagcatgcacaagggagatggtggttttaggatccttgtcctactgtgttgtgtagaccaccgggtgtagttgactgtatctggttgtttgtatgtatgtacaagacaaaactagcactgcagatggtatggtaaggcgtaagcaaatacaatatgacactggtccagttccaggaatgaatggaatatgacattggtccgagatttgcaatacaatacaatatcatcatcc

SEQ ID NO: 129479 - DNA, 930 bp, Zea Mays
cgaatggaatcctcgggtccgtccggccacgcaagcggcggcaccaccattcatctacgaatccatgggaggagattggagtggggccagctaacggatcggagtcggagtccttcttgtgcttctcctgctctgctggtgccgctgccatgggtttccccagcacccccaacctgaagctggagcctcgccctcgcacgcggaggctcctgcgctgcgccctcagctctgagcctgtgcagcctcccatgactgtttccatcactggagccacaggtttcattggacgcagattggttcacaagcttctatcggatgatcacaaggtttgcatcttaacaaggtctgcctccaaggctgcgtcagtttttcctgcttccacctatcctggactcacaatagcccagcaaggggattgggaggcatgcgtcagaggctccactgctgttgtcaacctggcaggcatgcccataagcactagatggtcacccgagattaagcaggaaatcaaacagagccgggtcaatgttacatcaaaggtggtgaagtacatcaaccatgctggaaacgctgatactcgaccctcagtgtttgtgagcgcaacagccattggctattatggtaccagcgaaatccatagctttgatgaatcaagtccctcgggcaatgactacctagctgaggtgtgcagagaatgggaggccacggcatgccaagtaaaccaggaggatgttaggcttgtacttctccggattggggttgttcttggcaaggacggcggtgctctagcaaagatgatacccctttttatgatgtttgctggtggtcctctggggacgggacgccaatggttttcttggattcatctggatgacctagtcaacctcatctatgaatctctaacgaaccctacatacaaaggtgaactca

SEQ ID NO: 129480 - DNA, 737 bp, Zea Mays
tgtgtttcatttaattccttttctcccctcttgtccttttattttccttcctcaagagaaggaccattccaatctacgctgcttattcacctggttcatctgtccatctgcagcaaagatgatacccctttttatgatgtttgctggtggtcctctggggacgggacgccaatggttttcttggattcatctggatgacctagtcaacctcatctatgaatctctaacgaaccctacatacaaaggtgtaatcaatggaactgcacctaatcctgtgcgtttgtctgagctatgcgaacgtctggggcgaatcgttgggcggccctcttggttgcccgtgccgggatttgcgctcaaagcggtgctaggagaaggcgcttctgtggtgttggaaggacaaaaggttgttccggcgaaggccaaggatctgggcttctcctatagatacccctatgttgaagacgctctaaaggccattgcccgagacctatagagctaggttgaggacgatacaggcaacttaatttaattatttcttatcttaactaggaacgtgcccgtgcgatgctacggaatacaaattgcgaccctttaatagacttagggccctgacgacgtgcggcgtgagtacaatagtgacggcaaaatatgtgattgttaaacatagatatagaacgatataaataagtctacccaaatagattgaaatggaatcacacaaatagtttataaagagt

SEQ ID NO: 129481 - DNA, 2030 bp, Zea Mays
ttggcactgtcagcgaagactaggtcagcaaagtaagggcatgcagctatcttagcacggggtcaaactgactgatcgaggctgcaattcccatgtagtaatatatagtatttccaatttgagcttgtcgtcgtcgtcgccaagagttgctcgattccggagttgcagtagtgttgcccctgcgtccccgcgcgcggtcgttccgtccaacgatgcctcgcgccttcgactcctccccatcgcgctcgccgccacgccaacgccatgccgctctccctccgccgcaccaccgccgcacgctctcctccacgcttgtcgaggagagtgttgctgacgccgccgcgctcgtccaaaagtggcaccccgacgtatcatgctccctcttcctccacgacgccaccggtcaatcggaggaggagacccagggcttcctgcgcgccgccgcccagctccaccgagccatgctcgtcttcgccgccgacaccaccaacgccaacgacgcaggcctcgtcaaggcacaggcgctgctccagaccgctatgcgcaggctccaacgcgagctccaattcttactcgacaagcacgaccaacaacaacaacaagccagcagcataagcgcggtggctgaggccatgatggccgtgggctacggcaaggagtgcatctccaccttcaagtcccatcgtcgcacggctctggccaccaagctgcagcgtctgctcggcttctcacctccagcagctgctgctagtggtagcggtaacagcagcacctcgtcgtcccaccacaagctcacctgggactgggagcaggtcgacgacaagatcataccgtcgtggatcgccaccgccacggtcgccttcaactccctgctcacccgagaaaaagacctctgcgacacggtctttctccgcgacgcagctgttcgtgaggctgtgttcgcggccgtcgccaacgaccaggccacgagcctcctcggcgtcgcagaggccgcggtggcaagagcaaggcgcgccccagagcgcctgttccgggtgctcgacgtccacgatgccctcaccgaggtgctgccggcgctcttgtccgtttttggggacaactccgaggtggccaccagggccgccgttgtggtcaccaaggtcggtgaggctgcacgcgggaccttgagcagcttcgaggcggcaatccggaaagagccgtccaaggccaccgtggccggcggcgcggtgcacccgctgacccgctacgtgatgaactacctcgtcttcctcgccgactaccaggaaggcctcgctctgatctatgagcaagctgataatgcagcagacacctcgtcggtttcggttgtcgccgcctctggcacggaacattattcgctgtcgtcgtcgagcatatcgtcgtcttcgtttctttacagttacaacaacccgatccatcggctggtgtcggttcttctaggcaagctggacgccaaggccgggtgctatcgggaggtggcgctgagctacctcttcctggcgaacaacaccaagtacgtggccaacaaggtggccggcagcgccaagctgcaggggatcctcggggaggactgggcggaggcgcagagcgccaaggcgcgggcgcacgtggatgtgtacgtgcgcgcggcgtggggcaaggtgatggctgccatctcctcctccatgtccatgccgcagggacagcagggagaagctaagggtgtggaggcggtggtgctggaagcggtgggcatgcaggatcagtgggtggcggcggacgaggagatgggcgaggcgttgagggcggccgcaacggcagcagtggtgcccaagtacaggatgttctaccggaggcatggcgctgcagtgcggctgacgccaggggatgtggccaccatgatcgccgcactctttggcgggactataagcgttccatggcatcagagccggtgcacagaaccgctgcaacaccatcctgaggatctaagtataaagccagcaaggagaccgcaacaacggctgttcacctga

SEQ ID NO: 129482 - DNA, 1062 bp, Zea Mays
atgaagaaaaccaacgatgaggaccttattgctgacatgcatgttctttcgtcagggttgaaagcctacataacttcatatacagccaagtctataagcgtatgcagagaagcctgtggtggccatggctatgctgctgtaaatcgttttggagctctgcgcaatgaccatgacatattccaaacatttgagggggacaacactgttcttctgcagcacgtcgctggagatctccttaagcaataccaggagaagtttaagggagggacactttcagtcacctggaattacttacgggactccatgagtacctacctgtcccagcctaatcctgtcactgcccgatgggagggcgaagatcatctgtgggatcctaatttccagctggatgcattcagaaaacacatcaagacgcttggaggtttcggtgcgtggaatagatgtctgaaccatctgcttacgctcgtagaatcacacatcgagtctgtcatccttgcaaagttcattgaatcggtgaaaagttacatcaggtacatcgccagcggtggatggatgactggtgtcagtattcgtcactccttccttctgtctaatttcctcaatactgctcgacatcacatcaccaaccagcagcaggtgttcgacctcggcatcggtaggtacaacgagacgtgccacaacatcgtcaccaagtacatctctgagtgggaggccatggtcacacgtgcgaggaggtggattgacttcaagaacgactacaagaccatggacctcaacttcatgtagagcgtttgggtgtttgcatagctctgggagaatgacctcgtctataagggcgtcaaggtcatgccttacaacacaggatgcaaaactgcactgtcaaactttaaggagcactggactatacggttggttgttggcttcctagccgacctatctaacttcattgttgttgtttataggaagttaggaactaatttttaagttgtgtcctagactgttcctgacccgacggtgatggtatccttccctattgttggtgatggggacaacacagttctc

SEQ ID NO: 129483 - DNA, 2342 bp, Zea Mays
ggttttagcctcctccgatgcagccgcctcgccgcgcgcttgtcacatccctcctccgcctccgctccttctcctccattgcctatcctcatccctacccacccgcgcccctgcgacgccaccagttcgtcgccgaccccaccacctccacaaaccgtggtatcgtcgggggcatcggcggcgtcggttccgggaacgggaacctcttggacccgacgcagctcctccgcgatgacccggtggcaatcaccgcttccctttgggtatcctccttccgcgccgccgcctccacctccagctcttgtacccccacaccgccgcagccactcacccccttcctctctcgcctggagctgtgggtgctcgcctaccagaaggcgtacgctgacgagaccggctcctatctgccgcgctcctccatcccggcctccacgctcgcctccctcctaacgctccgcaacgccgtactcgacggccgcttccgcttcggcaaccgcctcacccccatcctccagtccccgcgcgccgccaacgcgccggaccctgccaccctctccaagcgcaagctccgcgccctccttacaacccccggcccatcgcccttccaggaccgcgtcgtgcaggagctgctcctactcctgctcgagcccgtctacgaagccaggttctcgccaaagtccttcgccttccgcccaggtcgatccccgcatgccgcgattcgcaccatccgccgcagctttgctccgtacctctggtatatcaagggcgacctctccccactcctgcactcgcctgatcctgctctcgtggtcggtgcgcttatccgtgatgtgcgtgataaaaaagtggttgatttgatccgttcggccctgctcacctcggtggtgaccgcaagcgatgatgctgcagtaaagaagaagaagaccaagaggaaataccagaagaagaaggtgctgccagagggggagccgaagcctgacccttactggctgcagacgttttttgggtttgcaccagaggaagcacagacacagcctgattggggccattgtggggtgctgagcccgttgcttgccaatgtgtgcctggatgagtttgataagtggatggaagagaggattaaggagttttacaagccatccaagtccgatgttgtgggaggggatgatggtattgagcagggcaatacatcatggccagagtttgttcccacgactggccctgacaagacaaggaaggtggactacattcgatacggcgggcatttcttgattggtgtgagggggccaagagcggatgtggcggtgctccggaagcagctagttgagttttgtgatcagcgattcaggatcaaacttgataacgagagcctccctattgagcacatcacaaaaggagtcatgttccttgaccatgtgctgtgccgtcgagttgtgtacccaacactgcgttacactgctacaggaggcaagatcattagtgagaagggagttggtacactgctctcagtgacagctagtctgaagcagtgcatcaaacaattccggaagcttgagtttttgaaaggagaccgcgaaccagatccacaaccatgcttccgtatgttccacgccacacaatctcacacaaattctcagatgaataagcttttgctgacgatggcagagtggtatcgctacgctgataaccgcaagaaggttgtcaacttctgctcttacattataagggggtcactggcaaagttatatgctgccaagtacaagttgcggtcaagggcaaaggtctataagatcgcgtcaagaaatcttagtcggccattgaaggataagaaaggccagtcgccagagtatcacaatttgctgagaatgggccttgttgattcaattgatggtcttcagtatacaaggatgtcgatggttcctgatcctgattacacgccgttaccatttggatggcggccagatcatgagaagattttgctggagtacataaagctcacagatcaacagacattgaaagagcagagaaactgcaccagggaggacgggcttataacaccacaggacaatatttcgatgcttgtatggggctacaagaaaaatgctgttttacttccttcaaaagtgagtgatgcccaaggatccacagaggaccttggttcagataccgatgaattgaatgaaaaagagctaggaaatgagggtaaccaaagtttccaaaagcttgctgaaatgtcatgagttttggcaaactctgtagtgttcccaaggggtatttgacttgttgactggatggttggtttgtgactttgaaaacacaaaaccatctgctagttctttgtt

SEQ ID NO: 129484 - DNA, 3215 bp, Zea Mays
atggcttggacggctgcgggcacagtttgctggcgcctcctccgcctcccctccgtccgctgccctctctcgtcccgggcccggtgttccgctgcgcagagcctagacgccgtggacaaggagtatgccgacctcaacctccggcctctgtaccccaacgtctgtcgtcacccttcttctcttcgtccctacccccggtgctattccaatcttaccactgattcatctatgtacgcagaggggccatcacatgcgcatacggagcccacggggccgccagagtggaaggaggtgttcgacgaccccttgcttcccctcatggtcgacatcggctgcgggagtgggaggttcttgatttggcacgcgaagaattctggcaagagtcaaaactaccttgggctagaaatccgccaaaagaattttgtcttgtataagtgtccaagcaaaccatttaaatgtgcctttgaactgcacccgttggtggagcgggcacagttctgggtgaatgaattggagcttatctattttatgtttgcaaatgcaacgatgtcttttgagaaaatcatatcgtcataccctggtcccctgtcacttgtttcaatactgtgtcctgatccacacttcaaaaagagacatcacaaaagaagagttctgcagcaaccattggtcgattcaatcataaataatctatgtttaggcggacaggttttcatacaatcagatgtactggaagtagcggtagacatgagggaaaggtttgatgggtactctggtattttggcacatgttaattatgtcgatcaagatcttcagtgtgacaatgaaggatggcttctggacaacccaatgggaatccggacagagcgagaaatccatgcagagcttgaaggagcaacgatatacaggagggtgtaccaaaaggtgtcgcctcaatccgtaccgaccccttcccgctccccgaggcgaagctacgactctgccatagcgtttgagaagatcaaggtctccaacccaatcgtcgaaatggacggtgagatcccatcgcttatctttccatttcttgatctggacatcaagtactatgatttggggatactgcaccgtgaagcaattgatgacaagttggagtttgcgctgaaaagagagttcgacaaaactataaatatcttgcataatgagaaacacaaccaagacaagcaaacaatggataaagccaagaaaaatagagtattttacattagctccagctgcaagaatgtggtcagggctagatccaggtttaaactcctcccgctgctcgccgatgtaaagagggaaggcgacgccgagagacggggaaggagacgcggtgaccatgtctcagatatgggtgttcgagttcagctcgctgatctggaaccaggcatcacccacgacgtccgcgtcgtcggcttcgtcggggactaccaccacgtcttctaccaaggtaacgtccacactgcttacctgcttgaaccttcggatgtaccttttgatatatcatctgttccgaaggagacaaaatcccaaccccttgcggagaaaaagtctacaggcaagaaatcagcaggtccggcatctgctgtcagtgaccctgtttctacagttgatgcttcgtatgagaagcttctttcgtccattccggaattcgctgattttggaaagctttttaagtcatctgcacctgtagaattgactgaagctgagactgaatactcagttaatgttgtgaagcatatttttgatggacatgttgtgctccaatacaactgtaccaatacaattcctgaacaattgcttgaacaggttattgtttttgttgatgcttctgaggctgatgaatttttagaagttgcttcgaagcctttagaatcattaccatatgattctcctgggcagacctttgtcgcttttgagaagccagaaggtgtcattgctaccggcaagttctcaaatatcccgaaattcattgttaaggagttcccaggtgcagtggctgctcttcttacgcccactgcggctgtgtgcaagaaaaatagggtttcagtggcggcagttgtacctccactcacgccgccatcgcctccgaaccccactccccgatccagacaaccaccccgcccagatccggatccacctagtgcatcacgaccgtggctaccggatctcacagcctccgcggatgctgcgccgccgccatccccactgaagtccgaccagcgcctcgtcgaggtcttcacccccttcctcgagaagctcatacgtctaccggatctcacagcctccgcatatgacttgatgagcgagtcaaaggggcgcgacggcgaggaggggaggaggtggagcgcgcggaggaagcagacgaggagcaggagtggagggaaggacgcgacgaggcgggaggccgtggggagcgagagcgggaggtggaggcggctgagagggagcggaggcaagcgcgcgaaagcgttgaggagagccgcgaggtgcatgtggtggacgtggctactgcacgcctccgccgtcgcttgtctagggatggcaattttacccgcgggttcggatatccacggatatccgacccgtcggtttcgggttcggcgatattctcaagtaacaaccaatctgatgtcttactatggcatgtgtgggctggcgaaggagtgcctacatcagcggtacttcagcaaggaatactctgaatttctggatgagtttatggccgcagttaggcagaactatggacaaaaggtccttgtccagttcttgcagggattattgctgctctgaagtctgttggtgggactctagctgatcatacattcttgttcttcagtgcgagttatacgatcaagtgactagtgatgtgatttgccatggtgagaaaacttcttacaagatgggcgcaagagctttcctagtggccattcgcgcttacacagacctgttttgataagacctgagcagcgatgcttccatttcggaccacggccttagctaaggctaatggttcgaaatgtctgaagtaccgaagacagggctagctcctcgttttttgtcatgtcaaataaattgtgtatgattgcaacaatattggcaaaatatcgttgtactttatattttgatatactgtgaacaaaacaagtgccctatgagaccatcgtgatttatgcattttcaaactaaattttacgaca

SEQ ID NO: 129485 - DNA, 2068 bp, Zea Mays
gtcatcatgtgcctcgagactggaggattttcagtggctaacatgttgcatataaagctgacagttgatttacggagtacaaattatttttgggttccttttcaatcctctcatttgggccgagagaaggatagtgtcgtcgtagcccatgtcaattttgaggtcaaaagcatcggtccgtccactatccaagccccgaattacgtcacattctccaaaatggctgcgggtcgcacccggcgctcgtccctccctgccgcaaccaacgccaccgcttcggcgcttacccatcagatcagacagacaaacaaggcaaacgagaccctagcgcagcatggcttggacggctgcgggcacagtttgctggcgcctcctccgcctcccctccgtccgctgccctctctcgtcccgggcccggtgttccgctgcgcagagcctagacgccgtggacaaggagtatgccgacctcaacctccggcctctgtaccccaacaggggccatcacatgcgcatacggtagcacgtgaacccgctcagctcatccttctcggagcccacggggccgccagagtggaaggaggtgttcgacgaccccttgcttcccctcatggtcgacatcggctgcgggagtgggaggttcttgatttggcacgcgaagaattctggcaagagtcaaaactaccttgggctagaaatccgccaaaagttggtggagcgggcacagttctgggtgaatgaattggagcttatctattttatgtttgcaaatgcaacgatgtcttttgagaaaatcatatcgtcataccctggtcccctgtcacttgtttcaatactgtgtcctgatccacacttcaaaaagagacatcacaaaagaagagttctgcagcaaccattggtcgattcaatcataaataatctatgtttaggcggacaggttttcatacaatcagatgtactggaagtagcggtagacatgagggaaaggtttgatgggtactctggtattttggcacatgttaattatgtcgatcaagatcttcagtgtgacaatgaaggatggcttctggacaacccaatgggaatccggacagagcgagaaatccatgcagagcttgaaggagcaacgatatacaggagggtgtaccaaaaggttagagatgcttctttctagctgtttatcagctacagaagttgtccgaggagtaaggtttccaagaatgttcattgcatgtatttcattaagagaagttgggaaaaaacaaagcatccaagtacaaagcctggcgaaccaaaacgaagagaagcccaagcagtaacacacctgatgtcttcctgcttgaaccatgccacaagttgcctttactacatcaagctgcattacatttctgacagtgcgcttgtgcacatctaatctttttttttcacctgatgcaatgagtcagattagccaatgcttttgatgaagatgacaactggcaaaagtgttcctttgttggtcaaattgtacttatggtgtttagcatcaggtgttgtcttcgttctgtccataattcaggtctggaattggtcaccatctatcggtatgcagagagtttgtagaggcaatccagatgaggcaatttgatgtgcgctaggattgttcaaactttggtccgctcaacgttctcttgacttggtagatatacaagaatggacaacgttttcttgacttggtaaagtttggtcattagtttgtgaaacagaatgctgcattgctcttggcatttgataagtgacaggtggataagacgacaccgaggtgtgggcactttttagtgtttgatgtttgctaagtcctctaccatcaggtcaatacatatgttaatcaatttgaataactccttaattgaaattttgttgctaatggtatcgaattaactcaccattgtattcggcgaataatgtttcgttgcaacacagtcatattgtactagtgatagctgatattgttgggttgcccgtgtattttgtaataagacacataaatatatgttctattggttagatgagtgtgaatgctaacaatcaa

SEQ ID NO: 129486 - DNA, 1721 bp, Zea Mays
gtcatcatgtgcctcgagactggaggattttcagtggctaacatgttgcatataaagctgacagttgatttacggagtacaaattatttttgggttccttttcaatcctctcatttgggccgagagaaggatagtgtcgtcgtagcccatgtcaattttgaggtcaaaagcatcggtccgtccactatccaagccccgaattacgtcacattctccaaaatggctgcgggtcgcacccggcgctcgtccctccctgccgcaaccaacgccaccgcttcggcgcttacccatcagatcagacagacaaacaaggcaaacgagaccctagcgcagcatggcttggacggctgcgggcacagtttgctggcgcctcctccgcctcccctccgtccgctgccctctctcgtcccgggcccggtgttccgctgcgcagagcctagacgccgtggacaaggagtatgccgacctcaacctccggcctctgtaccccaacaggggccatcacatgcgcatacggtagcacgtgaacccgctcagctcatccttctcggagcccacggggccgccagagtggaaggaggtgttcgacgaccccttgcttcccctcatggtcgacatcggctgcgggagtgggaggttcttgatttggcacgcgaagaattctggcaagagtcaaaactaccttgggctagaaatccgccaaaagttggtggagcgggcacagttctgggtgaatgaattggagcttattgtcctgatccacacttcaaaaagagacatcacaaaagaagagttctgcagcaaccattggtcgattcaatcataaataatctatgtttaggcggacaggttttcatacaatcagatgtactggaagtagcggtagacatgagggaaaggtttgatgggtactctggtattttggcacatgttaattatgtcgatcaagatcttcagtgtgacaatgaaggatggcttctggacaacccaatgggaatccggacagagcgagaaatccatgcagagcttgaaggagcaacgatatacaggagggtgtaccaaaaggttagagatgcttctttctagctgtttatcagctacagaagttgtccgaggagtaaggtttccaagaatgttcattgcatgtatttcattaagagaagttgggaaaaaacaaagcatccaagtacaaagcctggcgaaccaaaacgaagagaagcccaagcagtaacacacctgatgtcttcctgcttgaaccatgccacaagttgcctttactacatcaagctgcattacatttctgacagtgcgcttgtgcacatctaatctttttttttcacctgatgcaatgagtcagattagccaatgcttttgatgaagatgacaactggcaaaagtgttcctttgttggtcaaattgtacttatggtgtttagcatcaggtgttgtcttcgttctgtccataattcaggtctggaattggtcaccatctatcggtatgcagagagtttgtagaggcaatccagatgaggcaatttgatgtgcgctaggattgttcaaactttggtccgctcaacgttctcttgacttggtagatatacaagaatggacaacgttttcttgacttggtaaagtttggtcattagtttgtgaaacagaatgctgcattgctcttggcatttgataagtgacaggtggataagacgacaccgaggtgtgggc

SEQ ID NO: 129487 - DNA, 1208 bp, Zea Mays
gtcatcatgtgcctcgagactggaggattttcagtggctaacatgttgcatataaagctgacagttgatttacggagtacaaattatttttgggttccttttcaatcctctcatttgggccgagagaaggatagtgtcgtcgtagcccatgtcaattttgaggtcaaaagcatcggtccgtccactatccaagccccgaattacgtcacattctccaaaatggctgcgggtcgcacccggcgctcgtccctccctgccgcaaccaacgccaccgcttcggcgcttacccatcagatcagacagacaaacaaggcaaacgagaccctagcgcagcatggcttggacggctgcgggcacagtttgctggcgcctcctccgcctcccctccgtccgctgccctctctcgtcccgggcccggtgttccgctgcgcagagcctagacgccgtggacaaggagtatgccgacctcaacctccggcctctgtaccccaacaggggccatcacatgcgcatacggtagcacgtgaacccgctcagctcatccttctcggagcccacggggccgccagagtggaaggaggtgttcgacgaccccttgcttcccctcatggtcgacatcggctgcgggaatcttgatgtccagggagtgggaggttcttgatttggcacgcgaagaattctggcaagagtcaaaactaccttgggctagaaatccgccaaaagttggtggagcgggcacagttctgggtgaatgaattggagcttatgtacgttgtcctgatccacacttcaaaaagagacatcacaaaagaagagttctgcagcaaccattggtcgattcaatcataaataatctatgtttaggcggacaggttttcatacaatcagatgtactggaagtagcggtagacatgagggaaaggatggcttctggacaacccaatgggaatccggacagagcgagaaatccatgcagagcttgaaggagcaacgatatacaggagggtgtaccaaaagttgggaaaaaacaaagcatccaagtacaaagcctggcgaaccaaaacgaagagaagcccaagcaattagccaatgcttttgatgaagatgacaactggcaaaagtgttcctttgttggtcaaattgtacttatggtgtttagcatcaggtgttgtcttcgttctgtccataattcaggtctggaattggtc

SEQ ID NO: 129488 - DNA, 1552 bp, Zea Mays
gtcatcatgtgcctcgagactggaggattttcagtggctaacatgttgcatataaagctgacagttgatttacggagtacaaattatttttgggttccttttcaatcctctcatttgggccgagagaaggatagtgtcgtcgtagcccatgtcaattttgaggtcaaaagcatcggtccgtccactatccaagccccgaattacgtcacattctccaaaatggctgcgggtcgcacccggcgctcgtccctccctgccgcaaccaacgccaccgcttcggcgcttacccatcagatcagacagacaaacaaggcaaacgagaccctagcgcagcatggcttggacggctgcgggcacagtttgctggcgcctcctccgcctcccctccgtccgctgccctctctcgtcccgggcccggtgttccgctgcgcagagcctagacgccgtggacaaggagtatgccgacctcaacctccggcctctgtaccccaacaggggccatcacatgcgcatacggtagcacgtgaacccgctcagctcatccttctcggagcccacggggccgccagagtggaaggaggtgttcgacgaccccttgcttcccctcatggtcgacatcggctgcgggagtgggaggttcttgatttggcacgcgaagaattctggcaagagtcaaaactaccttgggctagaaatccgccaaaagttggtggagcgggcacagttctgggtgaatgaattggagcttatgtacgtctattttatgtttgcaaatgcaacgatgtcttttgagaaaatcatatcgtcataccctggtcccctgtcacttgtttcaatactgtgtcctgatccacacttcaaaaagagacatcacaaaagaagagttctgcagcaaccattggtcgattcaatcataaataatctatgtttaggcggacaggttttcatacaatcagatgtactggaagtagcggtagacatgagggaaaggtttgatgggtactctggtattttggcacatgttaattatgtcgatcaagatcttcagtgtgacaatgaaggatggcttctggacaacccaatgggaatccggacagagcgagaaatccatgcagagcttgaaggagcaacgatatacaggagggtgtaccaaaaggttagagatgcttctttctagctgtttatcagctacagaagttgtccgaggagtaaggtttccaagaatgttcattgcatgtatttcattaagagaagttgggaaaaaacaaagcatccaagtacaaagcctggcgaaccaaaacgaagagaagcccaagcagtaacacacctgatgtcttcctgcttgaaccatgccacaagttgcctttactacatcaagctgcattacatttctgacagtgcgcttgtgcacatctaatctttttttttcacctgatgcaatgagtcagattagccaatgcttttgatgaagatgacaactggcaaaagtgttcctttgttggtcaaattgtacttatggtgtttagcatcaggtgttgtcttcgttctgtcc

SEQ ID NO: 129489 - DNA, 1417 bp, Zea Mays
gtcatcatgtgcctcgagactggaggattttcagtggctaacatgttgcatataaagctgacagttgatttacggagtacaaattatttttgggttccttttcaatcctctcatttgggccgagagaaggatagtgtcgtcgtagcccatgtcaattttgaggtcaaaagcatcggtccgtccactatccaagccccgaattacgtcacattctccaaaatggctgcgggtcgcacccggcgctcgtccctccctgccgcaaccaacgccaccgcttcggcgcttacccatcagatcagacagacaaacaaggcaaacgagaccctagcgcagcatggcttggacggctgcgggcacagtttgctggcgcctcctccgcctcccctccgtccgctgccctctctcgtcccgggcccggtgttccgctgcgcagagcctagacgccgtggacaaggagtatgccgacctcaacctccggcctctgtaccccaacaggggccatcacatgcgcatacggtagcacgtgaacccgctcagctcatccttctcggagcccacggggccgccagagtggaaggaggtgttcgacgaccccttgcttcccctcatggtcgacatcggctgcgggagtgggaggttcttgatttggcacgcgaagaattctggcaagagtcaaaactaccttgggctagaaatccgccaaaagtgtcctgatccacacttcaaaaagagacatcacaaaagaagagttctgcagcaaccattggtcgattcaatcataaataatctatgtttaggcggacaggttttcatacaatcagatgtactggaagtagcggtagacatgagggaaaggtttgatgggtactctggtattttggcacatgttaattatgtcgatcaagatcttcagtgtgacaatgaaggatggcttctggacaacccaatgggaatccggacagagcgagaaatccatgcagagcttgaaggagcaacgatatacaggagggtgtaccaaaaggttagagatgcttctttctagctgtttatcagctacagaagttgtccgaggagtaaggtttccaagaatgttcattgcatgtatttcattaagagaagttgggaaaaaacaaagcatccaagtacaaagcctggcgaaccaaaacgaagagaagcccaagcagtaacacacctgatgtcttcctgcttgaaccatgccacaagttgcctttactacatcaagctgcattacatttctgacagtgcgcttgtgcacatctaatctttttttttcacctgatgcaatgagtcagattagccaatgcttttgatgaagatgacaactggcaaaagtgttcctttgttggtcaaattgtacttatggtgtttagcatcaggtgttgtcttcgttctgtcc

SEQ ID NO: 129490 - DNA, 1093 bp, Zea Mays
gtcatcatgtgcctcgagactggaggattttcagtggctaacatgttgcatataaagctgacagttgatttacggagtacaaattatttttgggttccttttcaatcctctcatttgggccgagagaaggatagtgtcgtcgtagcccatgtcaattttgaggtcaaaagcatcggtccgtccactatccaagccccgaattacgtcacattctccaaaatggctgcgggtcgcacccggcgctcgtccctccctgccgcaaccaacgccaccgcttcggcgcttacccatcagatcagacagacaaacaaggcaaacgagaccctagcgcagcatggcttggacggctgcgggcacagtttgctggcgcctcctccgcctcccctccgtccgctgccctctctcgtcccgggcccggtgttccgctgcgcagagcctagacgccgtggacaaggagtatgccgacctcaacctccggcctctgtaccccaacaggggccatcacatgcgcatacggtagcacgtgaacccgctcagctcatccttctcggagcccacggggccgccagagtggaaggaggtgttcgacgaccccttgcttcccctcatggtcgacatcggctgcgggaatcttgatgtccagggagtgggaggttcttgatttggcacgcgaagaattctggcaagagtcaaaactaccttgggctagaaatccgccaaaagtttaagagagaaaagagaagatcagaacagttttagaaacaaagcactgggaacctcaagctcaagcagccccccgccccaaagcatgacacagcacacagactgcaccctcataacacggaacaaagataatgaactgcagaatcgcatgccatcatttcgctttcaaagacacttgctttgctgtttggaacaattctcgaagatgattcagtttcattctttcctgagtcccacattacatagattgccaggccgttgaaatattttggcataaaagatataagcgtatgccagtatcacacggtccattgcgcataatgcaattatcttgatgtggccagccccttaaatccaagttgtctgctgc

SEQ ID NO: 129491 - DNA, 1075 bp, Zea Mays
gtcatcatgtgcctcgagactggaggattttcagtggctaacatgttgcatataaagctgacagttgatttacggagtacaaattatttttgggttccttttcaatcctctcatttgggccgagagaaggatagtgtcgtcgtagcccatgtcaattttgaggtcaaaagcatcggtccgtccactatccaagccccgaattacgtcacattctccaaaatggctgcgggtcgcacccggcgctcgtccctccctgccgcaaccaacgccaccgcttcggcgcttacccatcagatcagacagacaaacaaggcaaacgagaccctagcgcagcatggcttggacggctgcgggcacagtttgctggcgcctcctccgcctcccctccgtccgctgccctctctcgtcccgggcccggtgttccgctgcgcagagcctagacgccgtggacaaggagtatgccgacctcaacctccggcctctgtaccccaacaggggccatcacatgcgcatacggtagcacgtgaacccgctcagctcatccttctcggagcccacggggccgccagagtggaaggaggtgttcgacgaccccttgcttcccctcatggtcgacatcggctgcgggagtgggaggttcttgatttggcacgcgaagaattctggcaagagtcaaaactaccttgggctagaaatccgccaaaagtttaagagagaaaagagaagatcagaacagttttagaaacaaagcactgggaacctcaagctcaagcagccccccgccccaaagcatgacacagcacacagactgcaccctcataacacggaacaaagataatgaactgcagaatcgcatgccatcatttcgctttcaaagacacttgctttgctgtttggaacaattctcgaagatgattcagtttcattctttcctgagtcccacattacatagattgccaggccgttgaaatattttggcataaaagatataagcgtatgccagtatcacacggtccattgcgcataatgcaattatcttgatgtggccagccccttaaatccaagttgtctgctg

SEQ ID NO: 129492 - DNA, 898 bp, Zea Mays
attgagacacagacagagcagctgagcaccgcacacacggacgccataccctagattggagcgcaccacgggcgccggcggccggcggcccgccaccggtgattgacgccccctcctcggtccccagcgcggcgagcaggctatttgaggagatgccgtcattgtcatccttactctctggctccaatactgcgagtgctgagcttcctctaatcccttgcaagctctgcaatggggtggtgattgagcgggtctccaaacaaccagaaaccacgtcgaggaagttctaccggtgcagagccaagaaaacggatgggtcttaatgtgattttttccactggcaagcgagctatgttgttttgttaatcgaggatgggtttgtcagtggtgatcgacgccttgagttgttaatgatcgcacttaatgatcatggcaaagccgttgaatctctaaccaattccatcagagagatgaagaaaaagctgtccaacctggagttagtgatggaagagctggataacgtgaaaaatttgatgaaggcagccatggttgaaattgaggaaaacaagaaatcgacagctgctgcattgaaactgatggagaatgagctgcaaaagctgaaagggtcaactaaagtgaaacctaggaatatggcacagtgttttctgcttttggcattgattgggtggtttgtggtgggacagatgaattggggggaggaagcatccagccgatttctgctgagaggctaatgaacataggatggacttttcaatagctagatgtaatcagaactggtttatattttctctgctaacatggcgtagtagccaggacactttgcttgtcgattattatttttagcaagatgttggtgtgaagttggaaaggcttccca

SEQ ID NO: 129493 - DNA, 1548 bp, Zea Mays
cgattcgatgtgatggattgattccatccatggtttctgttcgtccttttcctcgtattgctactccggattgagccaaaccctaggccgtggggggctgacggagggcgcggtgagcggggtctccactatcgatagcatgcgtggcgggtactctggccgctgtggcttcgctggcggccggcatagcagcagccgcagcaacgatggcaggggataccacgggaacccttgcttgacgatgcaccaaccgtgggcgtccctgctggtgcacggcatcaagcgtgtcgagggccgctcatggccatccccaatcacaggccgcctgtggattcacgcagcatccaaggttcctgaccccgacactatcaaagccatggaggatttctacagggagatttatgccgtcgatggcatcactggcatcaagttccctgatcattaccctgtctcacgcctccttggctgtgttgaggtggtaggctgcctcaggtctgaagagcttgtttgctgggaacatgtgcctgagtctgtcaggcttgaagggctgactgacttttgttggctctgtgaaaatccacagaagttggtggttccattcgagatgcgtggttaccagggtgtctacaatttagaaagaaggatctatgatggggctgtgaggggccttttacctgttcaaggtccactgcctgtcaagttccctcttccagatcccagagaccccttctccttgaagccaggatctcttacatttgctgcttccaaacccactctgcaaaaatctgaaagtgttgctgcagcaatagccggggctcgagctgcagccactcaattctcaaagaaggatcgcaaagctgctgctagtagtgaaattggtacagaagagcaatcctggggaagccatggcggtagcagttcagttgattgcaatggtctgtcaattgtccatggcagctatgcgcatctacagaaccagaatcggccttcaattttcccgagcactcaagcgaattcccaaaatccaaattctgagcctcggagaagccctagactagaatttggagcttccaatagggtgactgattattagcttgttgcagtggcactgagtgaactgaagcagttaagcttgagcaagaaaggaacaggacaagcagttcccagaagctgaccaatgcaagctaacaagtagtaatgcttgtcatagcccatagggcgagagagtgtgtttgtagaaagatgggtgatgtttgcagaattcatggtagcttgtaattaagtatatgctccagtgctggaagtgttgccattgtgtgaattattaatgcttgtcgtcacacgtacgtacgctagcagtgtcatcgctgaggcgggctcttttggcatttggttgtcataggacctacccggctctgacctatatgctcttaggaattttcttaggagtttgtttgtaacgacagaatgggatggaatatgacgattctttaaataaggttgtttgattaagatattggaataagactatcttagtgttgtcttcaa

SEQ ID NO: 129494 - DNA, 1536 bp, Zea Mays
cgattcgattcgatgtgatggattgattccatccatggtttctgttcgtccttttcctcgtattgctactccggattgagccaaaccctaggccgtggggggctgacggagggcgcggtgagcggggtctccactatcgatagcatgcgtggcgggtactctggccgctgtggcttcgctggcggccggcatagcagcagccgcagcaacgatggcaggggataccacgggaacccttgcttgacgatgcaccaaccgtgggcgtccctgctggtgcacggcatcaagcgtgtcgagggccgctcatggccatccccaatcacaggccgcctgtggattcacgcagcatccaaggttcctgaccccgacactatcaaagccatggaggatttctacagggagatttatgccgtcgatggcatcactggcatcaagttccctgatcattaccctgtctcacgcctccttggctgtgttgaggtggtaggctgcctcaggtctgaagagcttgtttgctgggaacatgtgcctgagtctgtcaggcttgaagggctgactgacttttgttggctctgtgaaaatccacagaagttggtggttccattcgagatgcgtggttaccagggtgtctacaatttagaaagaaggatctatgatggggctgtgaggggccttttacctgttcaaggtccactgcctgtcaagttccctcttccagatcccagagaccccttctccttgaagccaggatctcttacatttgctgcttccaaacccactctgcaaaaatctgaaagtgttgctgcagcaatagccggggctcgagctgcagccactcaattctcaaagaaggatcgcaaagctgctgctagtagtgaaattggtacagaagagcaatcctggggaagccatggcggtagcagttcagttgattgcaatggtctgtcaattgtccatggcagctatgcgcatctacagaaccagaatcggccttcaattttcccgagcactcaagcgaattcccaaaatccaaattctgagcctcggagaagccctagactagaatttggagcttccaataggcttgttgcagtggcactgagtgaactgaagcagttaagcttgagcaagaaaggaacaggacaagcagttcccagaagctgaccaatgcaagctaacaagtagtaatgcttgtcatagcccatagggcgagagagtgtgtttgtagaaagatgggtgatgtttgcagaattcatggtagcttgtaattaagtatatgctccagtgctggaagtgttgccattgtgtgaattattaatgcttgtcgtcacacgtacgtacgctagcagtgtcatcgctgaggcgggctcttttggcatttggttgtcataggacctacccggctctgacctatatgctcttaggaattttcttaggagtttgtttgtaacgacagaatgggatggaatatgacgattctttaaataaggttgtttgattaagatattggaataagactatcttagtgttgtcttc

SEQ ID NO: 129495 - DNA, 1533 bp, Zea Mays
actaatttctttgtgtgccgattcgattcgatgtgatggattgattccatccatggtttctgttcgtccttttcctcgtattgctactccggattgagccaaaccctaggccgtggggggctgacggagggcgcggtgagcggggtctccactatcgatagcatgcgtggcgggtactctggccgctgtggcttcgctggcggccggcatagcagcagccgcagcaacgatggcaggggataccacgggaacccttgcttgacgatgcaccaaccgtgggcgtccctgctggtgcacggcatcaagcgtgtcgagggccgctcatggccatccccaatcacaggccgcctgtggattcacgcagcatccaaggttcctgaccccgacactatcaaagccatggaggatttctacagggagatttatgccgtcgatggcatcactggcatcaagttccctgatcattaccctgtctcacgcctccttggctgtgttgaggtggtaggctgcctcaggtctgaagagcttgtttgctgggaacatgtgcctgagtctgtcaggcttgaagggctgactgacttttgttggctctgtgaaaatccacagaagttggtggttccattcgagatgcgtggttaccagggtgtctacaatttagaaagaaggatctatgatggggctgtgaggggccttttacctgttcaaggtccactgcctgtcaagttccctcttccagatcccagagaccccttctccttgaagccaggatctcttacatttgctgcttccaaacccactctgcaaaaatctgaaagtgttgctgcagcaatagccggggctcgagctgcagccactcaattctcaaagaaggatcgcaaagctgctgctagtagtgaaattggtacagaagagcaatcctggggaagccatggcggtagcagttcagttgattgcaatggtctgtcaattgtccatggcagctatgcgcatctacagaaccagaatcggccttcaattttcccgagcactcaagcgaattcccaaaatccaaattctgagcctcggagaagccctagactagaatttggagcttccaataggtggcactgagtgaactgaagcagttaagcttgagcaagaaaggaacaggacaagcagttcccagaagctgaccaatgcaagctaacaagtagtaatgcttgtcatagcccatagggcgagagagtgtgtttgtagaaagatgggtgatgtttgcagaattcatggtagcttgtaattaagtatatgctccagtgctggaagtgttgccattgtgtgaattattaatgcttgtcgtcacacgtacgtacgctagcagtgtcatcgctgaggcgggctcttttggcatttggttgtcataggacctacccggctctgacctatatgctcttaggaattttcttaggagtttgtttgtaacgacagaatgggatggaatatgacgattctttaaataaggttgtttgattaagatattggaataagactatctta

SEQ ID NO: 129496 - DNA, 1300 bp, Zea Mays
actaatttctttgtgtgccgattcgattcgatgtgatggattgattccatccatggtttctgttcgtccttttcctcgtattgctactccggattgagccaaaccctaggccgtggggggctgacggagggcgcggtgagcggggtctccactatcgatagcatgcgtggcgggtactctggccgctgtggcttcgctggcggccggcatagcagcagccgcagcaacgatggcaggggataccacgggaacccttgcttgacgatgcaccaaccgtgggcgtccctgctggtgcacggcatcaagcgtgtcgagggccgctcatggccatccccaatcacaggccgcctgtggattcacgcagcatccaaggttcctgaccccgacactatcaaagccatggaggatttctacagggagatttatgccgtcgatggcatcactggcatcaagttccctgatcattaccctgtctcacgcctccttggctgtgttgaggtggtaggctgcctcaggtctgaagagcttgtttgctgggaacatgtgcctgagtctgtcaggcttgaagggctgactgacttttgttggctctgtgaaaatccacagaagttggtggttccattcgagatgcgtggttaccagggtgtctacaatttagaaagaaggatctatgatggggctgtgaggggccttttacctgttcaaggtccactgcctgtcaagttccctcttccagatcccagagaccccttctccttgaagccaggatctcttacatttgctgcttccaaacccactctgcaaaaatctgaaagtgttgctgcagcaatagccggggctcgagctgcagccactcaattctcaaagaaggatcgcaaagctgctgctagtagtgaaattggtacagaagagcaatcctggggaagccatggcggtagcagttcagttgattgcaatggtctgtcaattgtccatggcagctatgcgcatctacagaaccagaatcggccttcaattttcccgagcactcaagcgaattcccaaaatccaaattctgagcctcggagaagccctagactagaatttggagcttccaatagggtgagtattggatttatttttccgtccagtttcaatttttagttacattagagaagtgggtcagtggtggagatgtgacttcgtactagaattcagctggcatgggtgttgcaacgaaatgaatggcaaaccgctagaacaaattaggcaggcatgtttatttgcttatcatggctaacctatttgtttgtgataaaaa

SEQ ID NO: 129497 - DNA, 1341 bp, Zea Mays
tctgttcgtccttttcctcgtattgctactccggattgagccaaaccctaggccgtggggggctgacggagggcgcggtgagcggggtctccactatcgatagcatgcgtggcgggtactctggccgctgtggcttcgctggcggccggcatagcagcagccgcagcaacgatggcaggggataccacgggaacccttgcttgacgatgcaccaaccgtgggcgtccctgctggtgcacggcatcaagcgtgtcgagggccgctcatggccatccccaatcacaggccgcctgtggattcacgcagcatccaaggttcctgaccccgacactatcaaagccatggaggatttctacagggagatttatgccgtcgatggcatcactggcatcaagttccctgatcattaccctgtctcacgcctccttggctgtgttgaggtggtaggctgcctcaggtctgaagagcttgtttgctgggaacatgtgcctgagtctgtatgttctcttactcgcctatttcccttcctttgctccagtagcattttacctgcaatgcatttcatttagctcatgatgcaacatcctactctcaaatgcaggtcaggcttgaagggctgactgacttttgttggctctgtgaaaatccacagaagttggtggttccattcgagatgcgtggttaccagggtgtctacaatttagaaagaaggatctatgatggggctgtgaggggccttttacctgttcaaggtccactgcctgtcaagttccctcttccagatcccagagaccccttctccttgaagccaggatctcttacatttgctgcttccaaacccactctgcaaaaatctgaaagtgttgctgcagcaatagccggggctcgagctgcagccactcaattctcaaagaaggatcgcaaagctgctgctagtagtgaaattggtacagaagagcaatcctggggaagccatggcggtagcagttcagttgattgcaatggtctgtcaattgtccatggcagctatgcgcatctacagaaccagaatcggccttcaattttcccgagcactcaagcgaattcccaaaatccaaattctgagcctcggagaagccctagactagaatttggagcttccaatagggtgagtattggatttatttttccgtccagtttcaatttttagttacattagagaagtgggtcagtggtggagatgtgacttcgtactagaattcagctggcatgggtgttgcaacgaaatgaatggcaaaccgctagaacaaattaggcaggcatgtttatttgcttatcatggctaacctatttgtttgtgat

SEQ ID NO: 129498 - DNA, 552 bp, Zea Mays
atggcgacatgggcgagcgcagatcggtgccagagaagccgagcgcacgatgtcaacaacagaggaggtggacgtgagctggacaccatgagtgagctgctcggccaccagcgagggagtacttcgagcggggaaaatacacagggctcgcacgagctaagcgacggcagggcagacagatcggcgccatgggcgaccaggggaaaagcaggggcttgggcgagcacagggagggaacaggcacggctgggctgggtgaccatggcgagggagcagagacggcgcgctgagcaagcagccatgggagcaggggagctccgagctgggacggcgggggtcgcagcttggacagagcagagggaactgctcggctggtgtccacgctggaccgaggtgattcacctgcgcaggggcatgcagggcgctccggccaggcgagtagggagagcgcgccatggctggaagccaagcgctggggcagggcagagcgtggacgggcgagactccggctgggcgcgcgctggacaccaaggagatgaggcgctcgggtag

SEQ ID NO: 129499 - DNA, 3042 bp, Zea Mays
gttggtagccccggagatttggagaaggatttgcttccacatttcagtcaagacatccaggaatatttatgtaccgagaaatttatgctaccagaaacttccttccagatgctaaaacaagttgacccattgcttacatctatggccctacaatcccaaatggagcacaatgacactgaacaatgtgacaatgatcagtcactgcgcagcagccacagatgtgtaaatatagagaagcctgtgtttgtgttccctacagatgtagtcaatgaaagtgaaacaggaaatctccaaaaggatccgcctgcaccaacttctgtttttcaccaaccatgtatgccccaaagcaggtcttacgtccctccgcaagaagatactattgatgctgttggtctaggcactaggtcctcagaaaggattcctattgtggaggggaacatgtctgttggatctgtgcttgcttcagatggctgtgatgcacctttgcagggaagcattactgagcccttttcccagcaggataaacatgaccatactgctacagttgaaccaaaatcttgtaagcaaaaatctccaagtctatctcactgtgctgatggagatggggcaaatgatggtggctccagcaatcagtcatctaaggtttccattcatgaaggactgagctctcatgccacggtaacttcaggttttgacagaatcagcgatgtcttaccaacagatgcatctggacctgagcatttgcctgagtgcataacagcacaggatacaaacatgatttcacagcttgacagcaggaaagctcatttgagtgctctgcaacaggataggggtgagaaagtaacccaagatctggaagatatctctgcaaatattgggctagtggaaaaggaccatgttcatggggatctgactttgcaatctgccagtgttttgctttctataagctgcaatggtgctaatcaaggaagtaaatctgaaaccaaccttcaaccagggattgttgctacagaggataggatggctttggaagagcagaatgcagacaagtctcacttagaattcagcgataccaacatggctaatcaagctctgcatgatgattgcagcgtcatgaaaaataatgcggtacatggcgggctgactgcacagactgctgcagtgtctcaaaactgcaatgtaaccttacatgataaaacttcagaagccaattgtttttctgagccggaaaatgaaaagaacattcaaaaaaataattgtcatacttatgttccaggttcttctcaggataggggtggagaaagtgcaaaggagacatcaaatgagctaaagtctaaggacgcttctccagaaatatttgtccatttcgaggatcaatacatcattgatactttggagggcttgtctcaacaagatttgtgcttgaaatgtggcaaaggtggtcagttgttggaatgcagccgctgttttttagctgttcatagtagctgtttgggttcatcagcgacatttgaagggacaaatttattctactgcccaatatgctcttataagaaagctattgaagcatgtaaaaaggcaaacaaaacatattgcgaagctaggaagaaccttgctgctttacttagcaaaacacaagtcaccaagcaagttcagccaggagatgcccatgaaaatgaagtaaataatcttgctcatcaggttaaagagcctaatcagcagaggaggaagcagaaaataaatgctataggtaagggttatcctaaggaggtactcactgagaaggttcctttccagaactctggttcgtctgcatccattaatatacattcagtgctccagaataacaatgaaatacaagttaaggattcagagaaaaggcggcaagcagtagacgaagaaggtcgcaaagaagctagtaatgacaactcatctcatgaaacaggatcttcatctcagataagatgtgattctcctttgaatcaggacgttgaggctgaccaggatggtaatcttacagcttctaaccaacctggtggttctgatgaatcagaagcaacatcttctgatgactctggcaggccatcatcttcttggcagtcatcacgttattggcgttgtacgagacacaacaaaaaaggattgcaagataaggagccagctgtatcaagtaaatctaaggaggatcaacaaatgcctacttcaccagcgaaaagaaagtctgcaaacccgcaaaagcactattccaatcctgttgcgagagctcgaagacgcagaaaactctggtggacagcagaagaagaagcaatgttgaaggatgggatggcaaaattctctccacataatgatggtcaaatttcatggacccagatactgcaatatggccgtggtgtgtttaacatcgcgcgcctgccatgtgatttgagggtcaagtggaggaacatgcagatgaaggagaggcgggcagtctcttacacacacatataactgttgtgtgtcatactaaattactaaccatgccttcatttgtttgtgtccatctgcagatataattgatgtggcagatataaccttgcctttatttgtttgtggcaatcttacacacacatataacactgatgtggtactagaacatagcgaatatgcaagtaggaatggaagtgggtttctccgaaataggatgacagaggtatagtttttcccttcttttggtaagtacggcgttgattggttgtgtgatttggtgaacctagacctactatacccgtagatgatgtaaagagattggtagacactcactatgtactctgaaaagaggtatcagagtcgacttccttttgtttcttttgggattgaatctaacagtttagatgataacatccggcagctgtgtttcatccggcaactgtgcatagcaggctcagggacacgcaatgttcttgcatgagtttagggttcaattcgtaatactccctccatttcaaaatagtatttgttttagagtattaatagatttatacaatatttggtgtatgtgtttta

SEQ ID NO: 129500 - DNA, 306 bp, Zea Mays
atgccgcccggttccgcctccgccgccgccatcgccacccgcttcgcgacccactggatagctgacgccctcgccggcgacgagtacatagacttctccgtgctcaagggtgaggctccaaatcctaaactccttcgccgttcgcctggacgctttcggtctcagggtctctcacctgggatggttaattggcttgttggcggtctgcagttctggtgggggcctcgtcgaagcccctcgcgggcgccccggagtttacgcgtgagcgggtcgcgctccggtgcattcaggaggtgtcgtccgtga

SEQ ID NO: 129501 - DNA, 243 bp, Zea Mays
atgaagtgggatgcctcacaccacgcgtatggacaccgaagaaagcggcgacacagcaccgcgcaacgtgctgacgaggaacttgagcggggaggaggtctggaccttgaagacgattgggaaggatgtgtgcagggagcggaggcagaggtcgacatggcacttggagttggcttgaagtcgatcaccacttcatcctcctccacctccaggagaatcactccccccgcctcatatctatag

SEQ ID NO: 129502 - DNA, 592 bp, Zea Mays
gtaaaaaaaaaaaaattggggtcctccgcctcccgcaatgcctcccccttccgcctccgcctcccgcttggcgacccactggatagctgacgccctcgccgacgacgagtccctcgacttctccgtgctgaaggctctgttgggggactcgtcgaagtccctcgcgggagccccggaggccacgcgtgagcgggtcgcgctccggtgcattcaggaggtgtcgtccgtgatagcctctgggggtgatgccgcggccccggcgggggtgcctagggttgatggcgcttggtcatgcgaggatgtgttgtttcggcttatcagagacgttggaagctccggagaattggagaaggatttgcttccacctttaagtcaagacatccaggaatatatatgtaccaagaaatttacactaccagaaacttctttccagttgcttggaagttttggagaattggaggatttgctttccacctttcagtcaagacatccaggaaaatatatgtacaaagaaatttacactaccagaaacttctttccagttggcacccccgaatcccctgcgtccagcacctcatccaaccatcccggt

SEQ ID NO: 129503 - DNA, 1665 bp, Zea Mays
atggactacgtggtcgcccggatgcaattgcaacaagcagcagtgccgccgcctgttcactccatcgccgaccaccgtcctccgcctgtgtcgcagaggacgcggggcagcgcgacgatgcaacgacagcggcgtgaggcactcgaacaggaggtggcagagctgaagcagcagctatccaacgagcagacggtgcaccagatcctggagcgcgccctgcagcccagcagctccatggccctcgccaacatccccgccttcatccccaccaaggccaaggagctgctcgcggagctgctgctggtggaggaagagatcgccaggctggaggaccagataaaaaggatgaagaagtccgccgccacgcagcagcagcagcagcagcagacggagcactgcaagtccatgttcttcatcagccaggccatggacggcgaggcgtacctcagcacggtggtgaacaacaagaggcattccctggcgtcgtcgtcagatgggcatgcggtgttggagaagaagatcgcccagcacgagctgcccatcaccaagaagagccccacggtgatagcaaagaggagggcgagagaccagcagcagccgcccaacaagctgtcggagaggatcctcaagtgcctggtgtgcatcttcatgcggctgctccggtcgtcccgggcgtccgagtccgccgcgggcaacctcggcggcttcaggatggacatggggctcgtcaacgtggctgcagctgcggcggccaaggagaaggagaggggccagcaggatcactacggcatcttcggcatccaggactccatggtgagggacatcgggccctacaagaacctcgtcaggttcaccacctcggctggctccggctccggctccggctccggctccctggacctccacctcctcagcagagggttctcggcgtcgcccctggtaagcaaactgagggagatgctggaggcgctgcagcaggtggatgtgcgctccttgaatcaccaccagaggctggcgttctggctcaacatctacaacacatgcatcatgcacggcattctgcagcatggtttgccctcaaactcggacaagttactcgcactcaagaacaaggcaacaatcaacgtgtcagggcaaactttcaatgcgttggtgattgagaattttatcttgaggcagccgtcaagtgtgaaacagcatatgcatgaacgaataatccagcaggagttgtggcaatgcgacgtggatgtggaagaagaacaggcggtgagggaggtttatgggctcaagacttcagaacccaacattctctttgcactctgctgcggcatcagatcatcgccagcacttcgcatctacaaagcagatcgtgttcttgtggatctggacaaggcaaagcttgagtacctgcaggcatcgctggtggtgacatccaccaggaggctcatgatcccaagcctcctccactccaacatgcatgactttgcaaaggacacggagtcgctgcttcgatggatctgcgagcagctgcccacgtcctggtccatcaggaaatccatggtggattgcctcgccgccattaccaacaacaacaacaagctggaggaggtggtcgtggatgtcattcccttggactacgacttccaatacctgctgcccatgtga

SEQ ID NO: 129504 - DNA, 2569 bp, Zea Mays
tcccctctcttgcctgcctccctccctccctccctccttctccatctccgctttccctcctcgcctaggcctagccgcccccgcacgccacgccacgccacgccacattcgcatctctggatccccctcccctcgccctctcccattacccgccgccgccgccgcctcgcgcccgcgacccacccggcctcccacttcgatcccgccccgattccctgcccccgccccgattccgattcgtcactgtatcgcgcgcgcgggtgggaagacagcgatggctcgtggcgggggcctctcgccccgccgcgggtgatctctcctctagcggggagccttcccgcgttcccaagcggaggatcccgtcgcagctggtgcctcacctatccctctccttcgcatctccgccgtgctctctcgcgcaccccctcgaccctaggtttgctccttccctcccttcctcgccacccgattcgatctcgctccctccggcctccggctaggctgctccgtctctcctccgccatgttctcgcacggcgctgattccgcccacgacgccggggccgtcggcgtcagcagcggcggggctaccgtccccacccgcttcgtctggccctatggtgggaagagggtcttcgtctcaggctccttcaccaggtggtcggaacatttgccgatgtctcctatcgaaggctgccccactgtatttcaggctatttgcagtctgtctcctgggattcacgagtacaaattctttgtggacggggaatggcggcatgatgagcgtcaacctaccatatctggggagtttggcatagttaacacactttacttgacaagggaatataaccaaataaataccttatcaagtccaagcacacctggaagcaggatgaacatggatgtggataatgaaaattttcaacgtacggttacgttgtcagatggtaccgtttcagaaggtactctgagagtttcagaggctgcaatacaaatatctaggtgtcgtgtttctgaatatctgagtttgcatacatgctatgatttactcccagattctggcaaggttattgccctagacattaatttacctgtgaagcaatcattccatattctccatgaacaggggattcctgtagctcctctctgggactcattcagaggtcaatttgttggtctccttagcccattggatttcatactcatattgcgggagctagaaactcatggctcgaacttgacagaagagcagcttgaaacacacactatatctgcatggaaagaggctaagcggcaaactaatggaagaaatgatggtcagtggcgaccgcaacagcatctagtgcatgccaccccttatgagtccttgagggacattgcagtaaagcttttgcaaaatggcatttctacagtgccagttatttattcatcatcatcagatggatcattcccgcagttattgcatcttgcatcactttctggaattttgaaatgtatttgtagatacttcaaaaactcaactggtaatttgcctattctgaaccaaccagtgtgctccattccgctgggttcctgggttccgaaaattggtgatctgaacagtcgtccattggctatgttgcgacctaatgcatcacttagctctgcccttaacatgttggttcaagctggagtaagctcaataccaattgtggatgacaacgactccctgcttgacacttactctagaagtgacatcacagccctagcaaaagacaaggtctacacacatgttcggctggatgagatgaccattcaccaggctttgcagcttggacaagatgccaatacaccttttggattctttaacggccagagatgccagatgtgcctccggtctgatcctttgctgaaggtgatggagcgactggctaatcctggggtgcggcgggtgttcattgtggaagctgggagcaaacgtgtggagggcatcatatcactaagtgacattttcaagttcttgctgagcttgtgaggagaggagggcatggcggagtttttttaacagtagcaaccctctgggcctttgggtccttgcggataattggctatcgtcagggttcatggtctgtaaagttccttttttttttgtttcgttttttaccatttggcccctcccgcttgtataacctcaattaatataatggcaaccttcatttaatatgaggttacttgagggttacttgaaaaattacaagagatgttctttgcgaatagtctctttatacagagccttatacttgtaatatgcggttttttagctgtcccttgtatttagaaaattaatccgatgtctttggattgtatatgctcttagaacaattttaataatagcccacaacggattttataatgttgccatgtcacatatagttaaataaaagtctactcacataattttatgactaaacaacattttttttttgtcttcggtccgccatttacgttttggtctccatagtacggtaaggcatttttggtcatccgtgagtttttctgatcgattaggcattttaagtcttcggtctgcc

SEQ ID NO: 129505 - DNA, 2309 bp, Zea Mays
tcccctctcttgcctgcctccctccctccctccctccttctccatctccgctttccctcctcgcctaggcctagccgcccccgcacgccacgccacgccacgccacattcgcatctctggatccccctcccctcgccctctcccattacccgccgccgccgccgcctcgcgcccgcgacccacccggcctcccacttcgatcccgccccgattccctgcccccgccccgattccgattcgtcactgtatcgcgcgcgcgggtgggaagacagcgatggctcgtggcgggggcctctcgccccgccgcgggtgatctctcctctagcggggagccttcccgcgttcccaagcggaggatcccgtcgcagctggtgcctcacctatccctctccttcgcatctccgccgtgctctctcgcgcaccccctcgaccctaggtttgctccttccctcccttcctcgccacccgattcgatctcgctccctccggcctccggctaggctgctccgtctctcctccgccatgttctcgcacggcgctgattccgcccacgacgccggggccgtcggcgtcagcagcggcggggctaccgtccccacccgcttcgtctggccctatggtgggaagagggtcttcgtctcaggctccttcaccaggtggtcggaacatttgccgatgtctcctatcgaaggctgccccactgtatttcaggctatttgcagtctgtctcctgggattcacgagtacaaattctttgtggacggggaatggcggcatgatgagcgtcaacctaccatatctggggagtttggcatagttaacacactttacttgacaagggaatataaccaaataaataccttatcaagtccaagcacacctggaagcaggatgaacatggatgtggataatgaaaattttcaacgtacggttacgttgtcagatggtaccgtttcagaaggtactctgagagtttcagaggctgcaatacaaatatctaggtgtcgtgtttctgaatatctgagtttgcatacatgctatgatttactcccagattctggcaaggttattgccctagacattaatttacctgtgaagcaatcattccatattctccatgaacaggggattcctgtagctcctctctgggactcattcagaggtcaatttgttggtctccttagcccattggatttcatactcatattgcgggagctagaaactcatggctcgaacttgacagaagagcagcttgaaacacacactatatctgcatggaaagaggctaagcggcaaactaatggaagaaatgatggtcagtggcgaccgcaacagcatctagtgcatgccaccccttatgagtccttgagggacattgcagtaaagcttttgcaaaatggcatttctacagtgccagttatttattcatcatcatcagatggatcattcccgcagttattgcatcttgcatcactttctggaattttgaaatgtatttgtagatacttcaaaaactcaactggtaatttgcctattctgaaccaaccagtgtgctccattccgctgggttcctgggttccgaaaattggtgatctgaacagtcgtccattggctatgttgcgacctaatgcatcacttagctctgcccttaacatgttggttcaagctggagtaagctcaataccaattgtggatgacaacgactccctgcttgacacttactctagaagtgacatcacagccctagcaaaagacaaggtctacacacatgttcggctggatgagatgaccattcaccagtgccttgttgactttgtttatttcggtaataagagccaatgctgataagatttgaccaggctttgcagcttggacaagatgccaatacaccttttggattctttaacggccagagatgccagatgtgcctccggtctgatcctttgctgaaggtgatggagcgactggctaatcctggggtgcggcgggtgttcattgtggaagctgggagcaaacgtgtggagggcatcatatcactaagtgacattttcaagttcttgctgagcttgtgaggagaggagggcatggcggagtttttttaacagtagcaaccctctgggcctttgggtccttgcggataattggctatcgtcagggttcatggtctgtaaagttccttttttttttgtttcgttttttaccatttggcccctcccgcttgtataacctcaattaatataatggcaaccttcatttaatatgaggttacttgagggttacttgaaaaattacaagagatgttctttgcg

SEQ ID NO: 129506 - DNA, 1095 bp, Zea Mays
atggacgccaagccgcgcaacctgggcggctcgctgccggtgcccaacgtgcaggacctggccgcgcgccccggcgacgaactcacgccgcccgtgctaagccgctacctccgcgacgacgtcgacggcgcagacgccaacggcgacgcggcctcctcggtgccggtagttgacctcgcgaggctcctggacccgtcgtcgcacggagacgaggagtccgccaaactgaaggcggcctgcgaggagtggggcttcttccaggtgatcaaccacggggtgcccgacgcggtggtcgcggacgtgaaggcagacctgcaggccttcttccgcctcccgctcgccgacaagcgcgcggtggcgcaggagcccggcgggatcgaggggtacgggcaggccttcgtggtctccgaggaccagaagctggactgggccgacatgcttttcctgtccacgcagccgcccgagtaccgggccccgcgcttctggccggcgcgcccggccacgttcggggactcgctggcgcgctactctgccgaggtgcagcgcgtggccgcccgcctgctggcgtccatggccgcgaacctgggcgtggcggacgccgcgaggctggccagggtcgccgacgcgcaggccgtgcgcgtcaactactacccggcgtgcccgcacggcaggggcagggtgctgggcctgtcgccgcactcggacgccgccggcctcacgctgctgctccaggtcagcgccgtcccggggctgcagatcaggaggcgcggcgcgtggatcagcgtcgaccccatccccggagcgctggtggccaacgtcggcgacgtcgtcgaggtgctcaccaacggcaggtacaagagcatcgagcaccgggcgctggttagccccacccaccaccgggtgtccgtcgcagccttccactccgccaggttcggcgacacttacgcgccgcttgaggagacgattgtcgatggtgatgagccagcgaggtacaggagcattggcgtcgaggactacgtccgcctggtgctgtctagtaagctccaaggaaagaacataatggacgccatgaagatcaatccggtcactgaatga

SEQ ID NO: 129507 - DNA, 1192 bp, Zea Mays
gagctggaagaaggtgaaccaacacaaccatcgcgatgaccatgagatcaaaggcaacctttcatgagtgggccgggccacttagaccaacatggggtagggagggaggagcccaggcccaggaaggactccgtccgggtacggcggcggcgttgggcgcgatgcaaaaggcgaaagaagcgaagaagataaggagggaccaagaccaacccagtgcaccacacaaggcattgtcagcggcggcggcggcggcgggccggcggagactcccaggccaggagcagtctgccgattggaaggggagatgaaggccacgctcaagggccgctacgagggcgacaaggccacggccgccaccaccctcgccgcccccgccggcgacctccgcctcaaggcctccgccaccgaggccgccttcaccaacggtccttccctgcgaggcctcaccctcaccctcgagaagcccggcgccttcctcgttgacctcaagccccacaaccaggatgtgcgctttcagttcatgaactccgcgctcgtgctcgacaagcgcgtcagcctcacctacactcactccactagcctcgccgcggcccccgccgccgcgccgccctcccgcaccgcgctcgactgcaccgtcactttcgaccccgccaacaaggtcagcctctcccactcgctaggctccggcggctgccgcctcaagtacacctacgcgcacggggtcgaccgcctcaccaccatcgagcccctcttcgacaccaacaagaacgcatgggagttcgccatcaccaggaagttcgccggaggggacgccgtcaagggcacctaccaggcctccaccaagctgctcggcctcgagtggagcagggactctctcgccggcggctccttcaaggttgcgacgacattcgatttgtcggaccaaagcaaagcaccaaagctaatagcagagagcacgtggaactacgaaatatgaaaaatggaagtgtccttctcatatcatacatactgcttgattgctgtatcctcctgaactatggagctattgttttttcggaacccttggtggtggtttacatctgattcttttgatcattttttcggctgtcgtgtcatgggagttttcactgagctgcggtcgtgccattggagttttctgttgagaatgaatgaacgacgagtatggtctatg

SEQ ID NO: 129508 - DNA, 309 bp, Zea Mays
atgaccaactccatgtccgaacgaggcactttcgtggaaatagcagcaaaaagcatcgaaaagggcatccatggtgaggagggggcccttggagcacgccccagcctaggtgcttcttgttcgacaccacaaggcgcgaacctatcctccttggttagattgtctcgagaaccagaacttatgatctcagatatgttgggcacgctatccttcaagcccgaacattcattggtcacgagaggtgcttggacaataacagcatattcagcatatatgtgtttatgcacattagcatcccatacgatgtaa

SEQ ID NO: 129509 - DNA, 2905 bp, Zea Mays
tattttattgcagccagagatccaaaatggacattcctagatggatggaaaaacgtactaccagtagagtggagcatagcatagcatagcattacaaagtggcagttgaacatcacaagagaaaagattcttaaacgttgctatctatacctcctcttcttcaccgtgtcctctctattttttttttatatatttctcgagacagcaactgagatgaagtgcaagtgtgcaacccgcgatgcagttggctgatcagactgcggcgacggcggccgatgaggtgagcgcgtgcagcctccagaacacctccccggcggcatcggtgctgttggcgtcgacggctacggcgccgacgagcgccctgagcgcgctgcagacgacggtcggcgcggccgcgctggtctggccagagacgcgcacgacgtccgggatcccgatccgcgccccggccctggcgcacgcggggccggacgcggcctcgctggcggcgcgcgacacggcggagggcgcggcgtccgcgtcggcggcgagggcgcgcagcgcggcggcggactccgccgccgcgaggcccaggacggcgagcgcgcggccgttctcgtgggagtaggaggagtgcgtcatggcgcggcgtaacagggccggcgcgcggaaggcgtagcccacccgcgactggagcgcggccagcgcggcatcgaacggggaggcggaggccgtggcacgtgggggggaagggaaggaggcgacgaggagcaggaggataaggacgagcggtggtggcgtcggagtcgccattgctggttggtggttgctgcggcgttggtggaggagaggtggtctctctctttgctgggctgggctgggctgggttcctggcgacctggactggaggtcgcctctcggcccgagagcgccgggtgggtcacgttccccttttacacaaacgcccccgataataaacaactatttaaattgcggcgcccaaccagcaaccacggcatatccaagcctcttcttccttctcgcatcgccaattccaattcccaacccctttcctctccctccctccaatcgcaaacagcggcggcggcgccgggccccgaaaaccctctcgagctcctcatcaatagcgagcgatccccaccgccctctcctccgggtccgccgaactctagccgtcccgggcaggcgaggcgtgcgttcggatcgcgcgggcgggagatgcagggcggcggggtggccgccgccgcggtcccggtgcacgcggccgtggggggcgacggaggaggggcggccgccgcgccgccgccgccgttcctcatgaagacgtacgagatggtggacgacccggccacggacggcgtcgtgtcctggggccccgggaacaacagcttcatcgtctggaacacgcccgagttcgcccgagacctcctgcccaagtacttcaagcacagcaacttctcctcgttcgtcaggcagctcaacacctacgggtttagaaaggttgatccagacagatgggaatttgcaaatgagggttttctgagaggacaaaaacatctgctgaagactatcaacagaaggaaaccatccttgcagggtaacagccaaccacagcaacctcagttgcagaacgctcctgtgccttcgtgtgtagaggtgggtaagtttgggttggaggaagagattgaacggctgaaaagggacaagaatgttcttatgcaagagcttgtaaggctgagacagcaacagcaaacaactgaccatcagctccagactttgggcaagcgtcttcaagggatggagtcacggcagcaacagatgatgtctttcctggccaaagcaatgcaaagtcctggtttcctagcacagtttgtacagcgaaatgagaacagcaggaggagaatagtagctgcgaacaagaaaaggcggctgcccaagcaagatggtggactcgagtccgaaagttctgctgcttcgttagacggtcaaattatcaagtatcagccttcgatcaacgaagcagccaaagcaatgctaaggaagatcctaaacgtagattcttcgcataggtttgaatctatgggcaattcagataatagtaataataataatattctgctggaggattatatgccggccgcccaagcttttgagagctcttcgtcgacaagaaattctggggtcacccttgcagaggttccagcaaactcaggcttggcgtatgtcggcacgagctcggctatctgttctcctccagcggcccctgaaatgcagtgcccagtggtgctggataacaaggcgtacaagcaagtggccagcatgagtgctgtgcctcctgtttcaagtgacatgggtattattccggaattctcagatctggcagacttggtctctgtggatattcttggaggggcctttgagatgatgcctggtcctgagttccccctgccagaagaaggtgatgatgggaccaccatgtacaacaacaacgacgaggaggctcagagccttccaggcatcatcaactccatctgggagcagttcctggtaggcagccctctatctaccgataatgaggaagttgattcagcaggcggactatatgcgcaggaggatggatggagcaaagtggggaacatcgctaatcttacagaacagatgggacttgtatcatcaacaaatcaccgggactcagggaatgggctgtactagtatcttaattaatacagtagactgaggattctggtaataagtgttgcatgctcttttcttatttaattattttcccccttttcgccaactcaatatgggaggtgggggtgaggagattcaaaggcatgtttggctcgttacctaagttgacacactttgccaaacttacttttatgactaaggttagttattt

SEQ ID NO: 129510 - DNA, 1606 bp, Zea Mays
agcgcggccagcgcggcatcgaacggggaggcggaggccgtggcacggcggcggggtggccgccgccgcggtcccggtgcacgcggccgtggggggcgacggaggaggggcggccgccgcgccgccgccgccgttcctcatgaagacgtacgagatggtggacgacccggccacggacggcgtcgtgtcctggggccccgggaacaacagcttcatcgtctggaacacgcccgagttcgcccgagacctcctgcccaagtacttcaagcacagcaacttctcctcgttcgtcaggcagctcaacacctacgggtttagaaaggttgatccagacagatgggaatttgcaaatgagggttttctgagaggacaaaaacatctgctgaagactatcaacagaaggaaaccatccttgcagggtaacagccaaccacagcaacctcagttgcagaacgctcctgtgccttcgtgtgtagaggtgggtaagtttgggttggaggaagagattgaacggctgaaaagggacaagaatgttcttatgcaagagcttgtaaggctgagacagcaacagcaaacaactgaccatcagctccagactttgggcaagcgtcttcaagggatggagtcacggcagcaacagatgatgtctttcctggccaaagcaatgcaaagtcctggtttcctagcacagtttgtacagcgaaatgagaacagcaggaggagaatagtagctgcgaacaagaaaaggcggctgcccaagcaagatggtggactcgagtccgaaagttctgctgcttcgttagacggtcaaattatcaagtatcagccttcgatcaacgaagcagccaaagcaatgctaaggaagatcctaaacgtagattcttcgcataggtttgaatctatgggcaattcagataatagtaataataataatattctgctggaggattatatgccggccgcccaagcttttgagagctcttcgtcgacaagaaattctggggtcacccttgcagaggttccagcaaactcaggcttggcgtatgtcggcacgagctcggctatctgttctcctccagcggcccctgaaatgcagtgcccagtggtgctggataacaaggcgtacaagcaagtggccagcatgagtgctgtgcctcctgtttcaagtgacatgggtattattccggaattctcagatctggcagacttggtctctgtggatattcttggaggggcctttgagatgatgcctggtcctgagttccccctgccagaagaaggtgatgatgggaccaccatgtacaacaacaacgacgaggaggctcagagccttccaggcatcatcaactccatctgggagcagttcctggtaggcagccctctatctaccgataatgaggaagttgattcagcaggcggactatatgcgcaggaggatggatggagcaaagtggggaacatcgctaatcttacagaacagatgggacttgtatcatcaacaaatcaccgggactcagggaatgggctgtactagtatcttaattaatacagtagactgaggattctggtaataagtgttgcatgctcttttcttatttaattattt

SEQ ID NO: 129511 - DNA, 2173 bp, Zea Mays
accgatctggccggtcttgggcttccacacgacctcgatggaggccttctcggggttctcgcccttccgggttcccgacttgggcccgtacacagcggccagcacgacggtgtcgccctgcgcccaccgcgcggagccgtgggcgcggtggagcgggttcccggtgcaggtgaacggccggagctggttcggattccgcccatccgcgcggctacctccctccatcatcccctcccactacgctccggttgtccacggcggcggcggcggcgcagggagaaaccagataggcgctagaaccctactcctcgaccgactggagtggaacagtaagggtaacctagcctcgctggacgatgtacagagcacagaataatcctagccgttggtagtccatcggacggctgggaattcatgaggctttcccgaccccacatctattccgagccacccaacgaggaggacaaggtgttttgccctcttcttcgcgagcccccccgccgcaacccgcagccgcatcgggagacccgcagccgccgatggcgaagaagcacagggacccagcctctgaggccgcgagcggcgactccccggccgcgtccatccgctccctcttctccgcggacaacccgttccgccggaaggcctctacggaggagccccccgcgactcctgcacccgccacgacgcccctccccatgcaacccagccgtgacgccagggatgccgagccgtcctcgaagaagaataagaagagcaaggaggagggcccgcggcgcaagcggaagcgggacgagttggaggccggccgggagcggcggcgaggcgcggagaatccgtcgagagttggggagaagaggaaggctcccgacgacgcggcacagggggccggggaggacgaggaggaggcgttcgacgacgagagcaagctgctcaggaccgtgttcgtggggaacctgccgctgcggaccaagcgcaaggtgctcatcaaggagttcgcggcattcggcgagatcgagtccgtcaggatccgctccgtgccgctggtcgacaccaaactttcgaggcgaggagccgttttacaggggaaggtcaatggattggtcgacaatgtgcatgcctatattgtcttcaaggatgagcagtctgcacgcgctgctttgtctcataatatggcactgttcggcggcaatcacattcgtgttgatatggcatgcccccctcgtaagaaacttcgaggagaagggcctctatatgacagaaaaaggactgtgtttgttgggaaccttccatttgatgtaaaggatgaagaggtttaccaggcgttctgcagctctagtggatcagaaggtgatgttgaggcaatacgtgttatcagagatccaagttcaagcctagggaagggtatcgcatatgttttattcaaaacgagggaagctgctaattctgttgcacgaaaacgggatatgaagataagagaccgcgtgttgaggctcacccatgcaaaaccggtggacgcagcaccaaagaaaacagaagtcaagaaaaggagccgcgtgccaaaccacaaggaggtttcgacaccaggcagcaaatctaatgaaggcagtgacaaagccaaacgtaaagcatcagtgctgtcgtatcaaggcctgaggtcgagcaaatctggtgttgtgaagaaggtgaaagtgacccagcaacccagcaaccaagggaagcagaggaaaactgatgaaactggagcaactgctcgcaaagctaagcgacccgccgtggctgcaagaaaagcaaagcagctggccaagaaacgcaaggtggatgcatcaacccctgagaatacacacaggagcaagaaaccaaggaagtaagttgtccattgcgctggtcgtttgcccttgcttcgcattgtaacaggagcttcactaaatcaaattctggacgatcttgtcagatgattgtgttactaggtagaggcaatgtgcgacctcaagtcaggttagggcaaatacaagagcgctctcgctactgtaaaccttgtaaccttatgtggcacttgttttgttttactatttccctccacaaacatttgcattttactatctccggcacaaagttccttcctaagtcaaactatcgtattacaattacaaatgagcatcattattccctc

SEQ ID NO: 129512 - DNA, 297 bp, Zea Mays
atgccgtcaaaactagagacccagctgctgtctacacaccattgccatcgccatcgcctatcacaggcaggcagcttctcagtcgtgctaatacatttgctactcaggtcaggcatccctggaagcctccttctgcagtgtcttcctcatgaaatccgagatcctcgaggacgccatgacacccctctctatgcagttgaaatagtcatcctcggacattgctccatgcgtgatgcaagttatcaatcctcgctcggactcctcatctcgctgtgtcgtgtccttcgattcgactga

SEQ ID NO: 129513 - DNA, 947 bp, Zea Mays
ctcctgcctgtcgagtccacttgccttgccctggccggctcagaccacgggatctattgtcctatattacgtcggccgcggaaggatctattgatttttttttgttctaattttgcagcgcaaatcggcagatgcttggtcaatatccggcggcggcatatgtcaactctccccttatgcgatggaactgccaactcgccgtgctggtcggagtgctctggatcgaggcttgctgctgcgcgccgtgttgggagggaagctgccgtctcctgccgctgggagaagccggggaccctctgtttgctgagggcaaaatctccttccttgcgcaggcactcgaggaaggtgcaatgggctatcagaaccatgtccgacgacagcggtgaccaatcaggcaacagcactcgcctcttcagcgcgatccgttcattctggaaccagttgtctgccaagctgaagaaagcaaggagagggttgccagtgaagatcctattctttctgatcgggttctactgcgctaccgcgttcgctaccgtcatcgggcaaacgggtgactgggacatattgtcggccggacttgctgttgccatcgtggaggttatcggtgcgctgatgtatagggcctcctttgcattcctcggtaggatcgggaacatgattaccgtgtttaattactggaaagctgggcttacacttgggctgttcttggactctttcaagtatgaagtggatgaatttcttgaatcgtgtaacccattcaactttcagattaatatatttactgggttttgttggtgaattctcgtccaggtcctgttactatttctaccaatgggaaatgttggtgtacccaacatgtagcattcctatcatgtctgcttttttgtttccttccatgtgatctttgagttctctaccactgatttttaaaaagaagaaaaaaaagg

SEQ ID NO: 129514 - DNA, 1880 bp, Zea Mays
atgctacagactgcaacccaagcctgtcaaatctcatggaagagttatttgccactctgcctgtctgattgactgattaggtacctaaattcatacactgtgaagaaagtaatcccgatttcggttccttagcaacgtgatcgtatagcagaatgtgcgtatgattacagagacgagatgatccaatttaatctcaagttcacagagtttaaaaaaaaatagacacccttgtgggggtccaagcatattgagcaaaggtaccgtggattgaaaatttggaacagaagggaaacgttgcaattgcaaaggtaccagataccacaacaaatagctgttgggatggggctacgattgaatccatctttcgtggtattccataagacagtgcctagtttatcttactaccactactggtacgcaaaaaggcattaggctgcttttctgatgttgtagcagagtgatttggatattttatacaggtttgtaggggcagtagcgtgtttatcgttgtaccttggcgtggttccaggtgttgccgacggtgaggggcccatggtcggagaggatctggaggagtcggccggaaatggcgacggcctcctccttgggcaccttggggttgatccgcctcacgtccacggaccgcttcttagagaagtgccgccgcaacacctcccacgccacccccgggaacccaccgcccccgcccccgccgccgctgcctcggaggaactgcatcacgccgctgacgcctgggtcgctggggttcagtgtaaagccctcttcctcctcaccccctgggagtgggctagaggataaaatgctgtccatttgggcccaacaggcccaggcccagcccaacaattgctgactcgggctcggccagctggtccattcgccgcccagccctcacagactcgtctcgtcgtcggccactcccgtccgcgagccgctccatccaaccacctcatccctctccgacacgggccgcggccgaccgccggctccgtggccttgacaccagttgacgaggagcatctctactctacagcgcaaatcggcagatgcttggtcaatatccggcggcggcatatgtcaactctccccttatgcgatggaactgccaactcgccgtgctggtcggagtgctctggatcgaggcttgctgctgcgcgccgtgttgggagggaagctgccgtctcctgccgctgggagaagccggggaccctctgtttgctgagggcaaaatctccttccttgcgcaggcactcgaggaaggtgcaatgggctatcagaaccatgtccgacgacagcggtgaccaatcaggcaacagcactcgcctcttcagcgcgatccgttcattctggaaccagttgtctgccaagctgaagaaagcaaggagagggttgccagtgaagatcctattctttctgatcgggttctactgcgctaccgcgttcgctaccgtcatcgggcaaacgggtgactgggacatattgtcggccggacttgctgttgccatcgtggaggttatcggtgcgctgatgtatagggcctcctttgcattcctcggtaggatcgggaacatgattaccgtgtttaattactggaaagctgggcttacacttgggctgttcttggactctttcaagtatgaagtggatgaatttcttgaatcgtgtaacccattcaactttcagattaatatatttactgggttttgttggtgaattctcgtccaggtcctgttactatttctaccaatgggaaatgttggtgtacccaacatgtagcattcctatcatgtctgcttttttgtttccttccatgtgatctttgagttctctaccactgatttttaaaaagaagaaaaaaaagg

SEQ ID NO: 129515 - DNA, 1954 bp, Zea Mays
tgtcttttcaatttttagcaccatttgacaatgtacgctattatttgcagaccttctctctcatttcgtggcaaaacagatttcttttccccaaagcatagatggcctgaagatatagcttggcatccagctggtgagacaatttttgctgtatacactgctgataatggcgattctcaggtttcaatgacaaaccttatatcaggacaacggaaagttactttcctgccagagaagcctcacacaaagggaatcataaataacataagtttcatgccttggtctgatgcatgctttgtaactggaggaagtgaccatgctgttatactttgggaagacaaagatgattcatggaaaccgaagagagtgcataaggatttccattctgctgctgtcatgggtgttgctggattgcaacagaaaagaacaattttgtcagttggctgtgacaagaggataataggatttgatctctctgctggaaggacagagttcaagaacctacttgatagcaaatgcatgagcgtattagcaaatccatgcgatttcaacctatacatggtgcagacaggggatccaggcagacagctgcgcttgtttgatgtgaggctcaggcaaaccgaggttcacgcgtttggttggaagcaagagagcagcgagtctcagtcagctctgatcaaccaatcatggtctccagatggctggtacgtgtcatctggttcagcagatcctgtgatccacatcttcgatatcaggcaccatggccagaatccttgccagtctgttgaggcacaccagaagcgagtgttcaaagctgtctggcaccaaacgctgccatatctgacctccatatcatcggacctcaacattgggatccacaaatattcatgaaagcgacatcacgtttttggtgctcagcaatcccatgaaaacctgtggacatttgtttgctcaaagcagaacttggcatcaattgaagaaaacagcaaaatcggtgtgctttgagcttgtttcactggccctgcttcgacattgaccttcggtgcagaagaaccatgctgcgagagagctccacagttggatgtcttgctccagttgatggaaacattcccacctgcttttttgagctgctgctgcagttcattcaccagaacactctttggctcaatgagctgcttcggttacttttgggaaaaaaagagtcagctatacacattatgtccaatattttcggcaacgtattccctcgtctgttactgctttttttttttttttttttgcccttgttgggaaagtgcacggatgtactagataaaccgttccagatggctgcagggacaagaacattgcggatctacactaaacatgatctagtctaactgcacgattgctaatggtaatattgttctaagacaggagatcactctacgccttcttgggggacttagcggccttcttgggctccttggccgccttctcggccaccttcttggggaggagcacagtgtggatgttggggaggacgccgccgtgggcgatggtgacgccggccagcagcttgccgagctcctcgtcgttgcggatggcgaggagcacgtggcgcgggatgatgcgcgtcttcttgttgtcccttgccgcgttgccggcgagctcgagcacctcggccgcgaggtactccaggacggcggcgaggtagacgggggcacccgtgcctacacgctgcgcgtaccggccctttttgaggtaccgcccgacgcggctgacggggaactgcagcccggccctggaggaccgcgacaccgacttcttcgtcggcccgccggccttgcgccccgccgcgcccttcttcgccttaccgcctgctccgctcacgtccatggctgctactgcggcgcttccagatcgagaaaaaaaaagggaccttgggagttgagagtcgaaatgtatgagtgcc

SEQ ID NO: 129516 - DNA, 1435 bp, Zea Mays
tgtcttttcaatttttagcaccatttgacaatgtacgctattatttgcagaccttctctctcatttcgtggcaaaacagatttcttttccccaaagcatagatggcctgaagatatagcttggcatccagctggtgagacaatttttgctgtatacactgctgataatggcgattctcaggtttcaatgacaaaccttatatcaggacaacggaaagttactttcctgccagagaagcctcacacaaagggaatcataaataacataagtttcatgccttggtctgatgcatgctttgtaactggaggaagtgaccatgctgttatactttgggaagacaaagatgattcatggaaaccgaagagagtgcataaggatttccattctgctgctgtcatgggtgttgctggattgcaacagaaaagaacaattttgtcagttggctgtgacaagaggataataggatttgatctctctgctggaaggacagagttcaagaacctacttgatagcaaatgcatgagcgtattagcaaatccatgcgatttcaacctatacatggtgcagacaggggatccaggcagacagctgcgcttgtttgatgtgaggctcaggcaaaccgaggttcacgcgtttggttggaagcaagagagcagcgagtctcagtcagctctgatcaaccaatcatggtctccagatggctggtacgtgtcatctggttcagcagatcctgtgatccacatcttcgatatcaggcaccatggccagaatccttgccagtctgttgaggcacaccagaagcgagtgttcaaagctgtctggcaccaaacgctgccatatctgacctccatatcatcggacctcaacattgggatccacaaatattcatgaaagcgacatcacgtttttggtgctcagcaatcccatgaaaacctgtggacatttgtttgctcaaagcagaacttggcatcaattgaagaaaacagcaaaatcggtgtgctttgagcttgtttcactggccctgcttcgacattgaccttcggtgcagaagaaccatgctgcgagagagctccacagttggatgtcttgctccagttgatggaaacattcccacctgcttttttgagctgctgctgcagttcattcaccagaacactctttggctcaatgagctgcttcggttacttttgggaaaaaaagagtcagctatacacattatgtccaatattttcggcaacgtattccctcgtctgttactgctttttttttttttttttttgcccttgttgggtggtttacagggcatttatctaaggccaaaatctatgtgcgccatgcgtagttttatttttctcacacatgtctcgccaacaataatatatgtattgcttgtttttatgtaatgataatattttatcaagtattacgtgaaaaa

SEQ ID NO: 129517 - DNA, 171 bp, Zea Mays
aggtatcctgcacacataacccttctgcgtggaaatcatgaaagtaggcagttgacacaggtgtatggtttctatgatgagtgttagaggaagtatagcaacgccaatgcatggcggtattgcactgatgtttttgattaccttatctatcagcaatcattaatggtcaag

SEQ ID NO: 129518 - DNA, 927 bp, Zea Mays
aactcatctgaccgtggcaccgtgcggcacgctgggtttccaggcccagacttgcggctcaagccaactgccatccatggcccatgggcctgtcgggtatcgactcggcctgctgccttgactcgcatcctcctccacgagccacggccaactggttagttattccgtgccgtcccaactcacccgcggctccgtgccatccgtcgccgccggcgcaccgcgatggccgcctccgccccggccgtgaggcctctcgcccgggccgcaatccctatcccgctctctgcgcggccgcggaccgccagggtctccttgctccccctggctcctcttgctccggcccagcgcctcgctctcgggcggaccgggcaagcgcggctgccagcgcgcagccggtcggtgcggtgcctggcggcgctgagcccagagatgcgggagacgctggacaaggtcgtggggtccagcaaggtgttgctattcatgaagggcaccaaggactttccgcagtgcggcttctcccacaccgtcgtgcagatcctgcgctcgctcgacgtgcccttcgagacgctcgacgtgctcgctaacgaggcgctccggcaggggctcaaggagtactccagctggcccaccttcccgcagctctacatcgacggcgagttcttcggcggatgtgacatcaccgtcgaggcatacaagagtggagaactgcaggaaactctagagaaagcaatgtgttcgtagaaaaaaaatgaacaataagcagatggcatacaattaatcaaaatgttatagtatttgctgtacaattcaggcttgtcatcaactggagatgcaagttgtggataattcatgtccaaatgttcagtgcactttcgactggaaatacatctttctgcagtttgtgactagtcatccagtttgaacccc

SEQ ID NO: 129519 - DNA, 1723 bp, Zea Mays
ctgttgactgcctaccagctcctgctctcgatcgagaagagcaagtagattgtttggctgacgcctgcttgcctaacaacaaggttggccataaccatcatcactatgagccaagccaaccccccgccggccgcgcggaaacccctcgcatctcgccgccgctacctaacctaccccgccggcaccgggttccgtttcgtttgactaccacttggcctggccccccccgatccctcgcgtgttaaaagggaactcggattgcctcgttcctccgcatgccccccgtaccttgcggattgttgcgcccttccgttcggttccttcctccgcgcccgccccacgcctcgcggttcgccacgcccgccccacgcctccaagttgtagccgatgaagggcggcgacatgagcagcgtcagcccgctggtgtccttcgtgctgggcgccgccatggccaccgtctgcgtcctcttcttcatgtccgccgcgcccgcgcgccgcctcgtcgacatctctgccttcacctccaactccaactccaccgccgacctcctcctcgactcctccgactcgccggcagcggcggaccttgccgaggcagcgccgccggctcccgcgcccgtccaggccccgccgtctccgtggggcgacctggaggaggtgctggcgcgcgcggcgaccaaggaccgcacggtgatcatgacgcagatcaacgcggcgtggacgcgcccgggctcgctgctggacctcttcttcgagagcttccgcacgggggaaggcggcgtggcgcgcctcctggaccacctggtcatcgtcaccatggacccggccgcctacgagggctgcagggccgtgcacagccactgctacttcctccgcacgggcaacggcgtcgactaccgatcagagaaggtgttcatgagcaaggactacctggagatgatgtggggacgcaaccgcttccagcagacggtgctggagctgggatacaacttcctattcacggacgttgacgtgatgtggttccgcgacccgttccgccacatctccatggcggccgacatcgccatctccagcgacgtgtacatgggcgacccctacagcctgcgcaacttccccaacggcggcttcctcttcgtgcgggcgtcggacaagaccgtcgccttctaccgggcgtggcagcaggggcggtggcgcttcctggggaagcacgagcaggacgtgttcaacctcatcaagcacgaggaggcgcccaggctggacctcgccatccagttcctcgacacagcctacatcagcggcttctgccagctcagcaaggacctcaacaggatctgcacgctccacgccaactgctgcgtcggcctcggcgccaagctccacgacctccgcggggtcctcgacgtctggaggaactacaccgccggcacacccgaggagcgacgcgcgggaaagttccagtggaagctaccgggcatctgcatccactgatatccattctttctcagccggcctctcgcctccttggtagtaaaagatccattcttttgattccatcatcaacaaattaaaggttatatatatactagtaacagatagttagaatttcatagctataagtacgggcagggcttcttccacgtgagaacagtgatcgatatggtccagaaatagacctaccatacactattttttatatataaatatcaatttaaggactagaaac

SEQ ID NO: 129520 - DNA, 526 bp, Zea Mays
cagcagtgtgttcttaactggaacacaacaatgtttagtatactgatgatagaccctttgttagcagtaaaattttagtgctattgtagctatgactatccattgttttattctagaatttgaccatggtgaaagaaacgccttttcttataggaccgtgttgaattcactgttctgctgcttccttgcaggcttgctcatgcttcagttggttcaggaactgatgcttccttgcatggttgctgatgcttctgctggttcagcagctgataggtgccgttgaagatttggatgaaccagtgccgatcgtatcattttcacatgagctgtagtcccatcgtgttctccctgttgtgatgctgtgtggtagcaggacgtgccagaacttgactttgagaagctgaggttcagtagtttgagctgtttttgcaacatgcggtttgtttctccatagaatagaatccttaaatcaacatcctccctcacaagaatcctgaaatcgctgggatttttattttattttatt

SEQ ID NO: 129521 - DNA, 1233 bp, Zea Mays
gagcgagcagtgaccactgcgccacattcagaccacaccacccaccgcaatcaggagcggagccaaggaaggagggggcagcgggcggcgacgaagcagcggcaatccgacggcgtaatggcggcggggagggggtgaggcggcgccctgagccgtaaaggagccggctttcgtagctcttcctgggagtgaccttctccgacgaaacgaaatggcccatcaaggaccaggagtgcctaagtttggaagttgggaggatgagggcgatcacccctacacacagtacttcgaaaacgctcgtaagggcaaatctccaggcagatctgctactcagaacgagcacagaactggagatccggaagcgctcttcaaagaagacacgacgccatctgctaaagcttctcccctgcggactgggtcggaggatcctgtggcgccaaagcccaaggacgcggcctttgctcgaggcaagccgtatgctgagccagcaacccataaacacggtgctaataccagctatgaaagaaaaaccggcatggagagatcgcctctgcatcctcaccaccaagcaaggctcgtaaacagaggaggtgtttcgtctccttcatgggaacgcaggggttcgtccgaaggaaaccgtggagctgcgcccaccacacctgggaggtcgtccaagatgaggccaggcggccgtggagacgagacgcctgagagaggatctgccgtgcccaagtttggagaatgggacgagaaagatccctccacaggtgaaggcttcaccgacatatttaacaaggtgagggaggagaagcagtccggcgatgctcctgtcatcaccagcggcaacgcaggtggtggttatagccgctccaaccaaggccgcaaatacgaatcttcagcttgctcatgcttcagttggttcaggaactgatgcttccttgcatggttgctgatgcttctgctggttcagcagctgataggtgccgttgaagatttggatgaaccagtgccgatcgtatcattttcacatgagctgtagtcccatcgtgttctccctgttgtgatgctgtgtggtagcaggacgtgccagaacttgactttgagaagctgaggttcagtagtttgagctgtttttgcaacatgcggtttgtttctccatagaatagaatccttaaatcaacatcctccctcacaagaatcctgaaatcgctgggatttttattttattttatt

SEQ ID NO: 129522 - DNA, 1428 bp, Zea Mays
gagcgagcagtgaccactgcgccacattcagaccacaccacccaccgcaatcaggagcggagccaaggaaggagggggcagcgggcggcgacgaagcagcggcaatccgacggcgtaatggcggcggggagggggtgaggcggcgccctgagccgtaaaggagccggctttcgtagctcttcctgggagtgaccttctccgacgaaacgaaatggcccatcaaggaccaggagtgcctaagtttggaagttgggaggatgagggcgatcacccctacacacagtacttcgaaaacgctcgtaagggcaaatctccaggcagatctgctactcagaacgagcacagaactggagatccggaagcgctcttcaaagaagacacgacgccatctgctaaagcttctcccctgcggactgggtcggaggatcctgtggcgccaaagcccaaggacgcggcctttgctcgaggcaagccgtatgctgagccagcaacccataaacacggtgctaataccagctatgaaagaaaaaccggcatggagagatcgcctctgcatcctcaccaccaagcaaggctcgtaaacagaggaggtgtttcgtctccttcatgggaacgcaggggttcgtccgaaggaaaccgtggagctgcgcccaccacacctgggaggtcgtccaagatgaggccaggcggccgtggagacgagacggtaatgttagctgcggctttaatccggctgcggtcctacagtattttgttttcatggattacaccagctgtgactgcagggtaatgcgcttatgatagatagcagatatacggatgcttgagtcatgagtgtgaagggaactgaagcagttaagttgaaactgcatttgagtaattctttcccatctgtactgtacagcctgagagaggatctgccgtgcccaagtttggagaatgggacgagaaagatccctccacaggtgaaggcttcaccgacatatttaacaaggtgagggaggagaagcagtccggcgatgctcctgtcatcaccagcggcaacgcaggtggtggttatagccgctccaaccaaggccgcaaatacgaatcttcagcttgctcatgcttcagttggttcaggaactgatgcttccttgcatggttgctgatgcttctgctggttcagcagctgataggtgccgttgaagatttggatgaaccagtgccgatcgtatcattttcacatgagctgtagtcccatcgtgttctccctgttgtgatgctgtgtggtagcaggacgtgccagaacttgactttgagaagctgaggttcagtagtttgagctgtttttgcaacatgcggtttgtttctccatagaatagaatccttaaatcaacatcctccctcacaagaatcctgaaatcgctgggatttttattttatttt

SEQ ID NO: 129523 - DNA, 1194 bp, Zea Mays
gccccgtggtcacgcatcaggcctgctgcttgtctcgttcactcctgcgtgatctctctcccttccggcgacgcctgggccaccgccgcggccgccctacgccaggtgcccaggttctcgtccggctcttcgccggcgatgagcacccaccaggccaatacgctgcggttgtacctcacctgcatccggaacactctggaggcggcgatgtgcctccagaatttcccttgccaagaagtcgagaggcacaacaaaccggaggtggagctcaagacaagccctgaacttctgctgaatccggtactgatatgccgcaacgaagcagaaaaatgcttgatagagacttcaatcaactccatacgaataagcatgaaggttaagcaggcagatgaattggagaacattcttgccaagaagttccttaggtttttgtcaatgagggcagaggcattccaagtgttgaggagaaaaccggttcaggtttccaacttaacgttgattaccttgagcagtgttttatgtactaaacatgaactacctgtaaggcacagggatacatcattgtggacagctggatgatggaccatatttttgctaacatttgttgtactagttttctctctctcccctcttatcttgccgtattcccacatagagctcagctttaccaagttatcaacataactgcttatcccttcagaaatctaaattgttcacgactgaactggtggcaaattatgccttatgtttcagggctatgatatcagtttcctgataacaaactaccattgtgaggacatgcataagcacaagctcatagatttcatcgtgcaatttatggaggatattgacaaggagatcagcgagctgaagctgtcagtaaacactcgtggccggctagtggccactgaattcttgaagcagttcttatgactcggccatggccgtagtcagtgttgattatcatggcctgcaactaagctgccgttctgcaacagctttaagtttttttttatacgacagctcttgtaaatgccttgccaaagatgcattcgtggccctgggccacctgattaacagctgacaattgcagtatcaggacgcacatagcgctctgagattgttcatgtgatcaattcctgtgttttttaattattctttcatttgcaaggccttcattgtttttcaccgact

SEQ ID NO: 129524 - DNA, 2697 bp, Zea Mays
cccaggcccaagcaagccttttcttctcccgttcacctcctctctctctccccccactctcggcgaccgactgggctaccgccgccgccgacgccgccatccgccagtcgtcaggtgcccaggtcttcacccccgggcaccaggtacgcgcaccccttctcctacctcccgttctcttcccgctgcgcgaaaccgagcatccaaaccctaacacaggtccgcccctggttcccgttcttcagcgcgcaatatcagtctcgccagccggttgtccaagttgaaagaggatggggcaggagacggaggtggtgcagtcggtaagcgacctcccggtgcaggaccctccaggagaggagttctccgccgccgacctcgcctgggtcaagtacgccacctccgagcaccaccgggacgacgtcgccctcataccctacgaccggatggaggccttcatcgccggcgagagcaacaaccccgagtgccccacgcgcttccacatcgagcgcggccgcaagcgtgagaggggcagcctcagggagtaccggagtgacgagtacctcctctacaggatgtattggtgctcctttggccctgagaattatggggagggagggacaatcttgcctagcagaaagtacaggctcaacacgaggaaccgtgctgcacgcccgcagtcgatgcgtggctgcacctgccatttcaccatcaagaggctctatgctcgcccttccctgctgctcatcatctaccacgagaggcgccatgtcaacaagtccggcttcatatgccatgggcccctcgacagggatgccatcgggcctggcgctaggaaaatgccctacattgggagtgaaatccagcagcagaccatgtcattgatctacctcggtgttccagaagagaacatactgcagacacatatcgaaggcatacagcgctactgtagcaaggatgccaaggttgataaccttgcctctcagtatgtccagaaacttgggatgatcatcaagagatcgacacatgagttggatctggatgaccaagctagcatcaggatgtgggttgacagaaataggaagtctgtattcttctaccaggattcaactgaggcagatgcctttattttggggattcagacacaatggcaattgcagcaaatgatgcgctttggccatcagagtcttttggcttctcattcctcatttggtgtaagcaagctaaagtatcccttgcacacgctccttgcattcgactcaaggcagcacgctcttccagttgcatgggtcataacccgctcagttactaagaaggacacattgaaatggatgagcacacttactgatcgaatacattctatagattccacatggggaattggtggttttatcattgatgacccggcttcagagctgggtccaatcagggaggtgttcgcctgcccagttctgttctccatgtggcacatcagaagaacctggcttaaaaatgtaatcaagaaatgcagcaatgttgaggtgcagcgggaaatttttatcctacttggcaaaaccatatgcaatatatggagtgagaaaaaccctatggatgccctagggcaattgtttcaagactttgttgatcaaacagcattcataaaatatttcaagtcattttgggttcccaaattggagatgtggatcgactccatccgaaatctgccattagcaagtcaggagtcatgcggtgccattgaaggttaccatctgaagctgaaggtaaaagcatatgatgacgtgcagctggatgctcttcaacgtgtggactggctagtgcataagctcacaacagagctgcattcgagctactggatcaacctatttgcagacgaaagcgggtcatttcccgaggtgaaagcagactatatcgcatccacgtcatggcaaagggcactccagatacctgacgatgctgttaccttcgacgacaaggatcctcttgtagctagagtggtcagccagaaggaaaccagccagacacggactgtgtggagccctggttctgaattctctctttgcaattgctcgtggtcgatgcagggtaacctatgcaagcacgtgctaaaggtcaacatggtctgcggagcacgcaaagactttcagccctcgctgtcgttccagtcgttccagcatgtcctgcttgatctgtggcagaaaccattggacgattcgttctcgcttgacctctcggtagcgcgggtcatgcagatgcaggagaagatcaaacatgtggctgagctcgccacctccagtggtatcgcccaagttgcagggaagttgccgatgcaatggacaaaaaagagagggagaagagtaggcgtcaagcccacaagcgcgctgctgcttcctcgttctaagggcagtttgcagaaggacttgaccccgaagaacagcaggaagaggaagaggctatctagatttaaagggtaaaatgcgccgccttttcttgtggcgtctctgtaattagagtattagacgactactttttttgtttttgtttattttttgcctgctgtattccatttcctcaattacctcggggctgactgagaacttgctcagcgacttccacttcccttatgtctcctagttttaggaacaaatacaatagctgtgcaggctgtaatgcgaagcgactggatgggtggatgttttgatagtt

SEQ ID NO: 129525 - DNA, 2200 bp, Zea Mays
ctccggcctccatcctacccgccgtgctatataatccccacccggttgtcctctgtccggtttcctctcccgttcccctcttgccgcggcggtgtgccccaatcggccaatcctcctattctccccctcacctcctcaaccctactccgacaacagcgggcgctgggagcaaacgaaaactaaaacgagtgagatcgcggcgcccgattctgtcgcggtcgcgcgggtggccggattggattggatcctcggacccccgcgcgcgcgcggagggcaattcgggcacagatccccgcgattccgtcgccggaggcgggcatgagaggccggagggcatgcctgtggtggttcctggcgcaggacgagtgagccggtggcggcgggtggaggaggacctgttgctttgagcctgagaggtgcagtcgtcaaggaggaggaagaggcggcggcggcggcggcggcggcggcggcgggggtgggtaggtgatccgaggcccgaggcggccgtgccatgtctcgctgcttcccgtttccgccaccaggatatgccaagaccgcgcgccccgacggccagctagcctcgcacctgcagcagcagcagcagcttgacaaggagaaacaaaaggagaagaagcataagaaggacaagaaggacaaagttagaaaagaaggtaaagaaaagaaggacaaggacaggagtaaggataagcacaaagataagaaagaccgaaaagaaaaacacagagacaagaaaaaagacaagagcaaagataaaagcagggattcaggtgaaggaattgaaagaaatgacgaggctcaccatggtcagaaggttggagagagcagcaggagatccgaagaaattaaggatcttaaattcagggaggacttggtcagagacgtacaggatgagaaaggggcggcgagtcgacctagtgaaaattatggtgtttcaaatgatcgaaatcgcaaaggcttcagtgcttcacccgcgatggagactgaaaggtttgcgcttaataaagtgcatattcagtctagtaatgctccaaggaaaaatgagggactggtacaacagagcatcagtgccaatcgacaaaagaatgggacatcaatacggcattctgaaagcctcaccacttttgctcaaagaactgtgggtggctttccaccagcaccttcaacggaggaaaaattcaaagctgcaaggcctttatccaatactgaagctgcacccagaaaagaggggattggacagcgaatcagtaacattagcatattggttccaaagagaactgaaaacacaaacagagatgttgcgaagaaagaagttgggacctcctctccattgcctccaaatcctgctaatgctatgcataagggaaatgacaaggttggtaggccaatggagaacacacaagtacccatgcagagatttggcagcccatcgatgtcaactgcagcagtggggatggacagaggaacacctaggtcatccatcccaagcccgagcattacaatccggagaccgaatggaattgtacggccgcctaaaaacatttctgtctcttctaagaaacctgatgcaggagacgtttcacctgctattggtaaggaaaaggaacaaggtggaaggttgctgcaagcaaatatttcaactgatcagaaactggttatgtcaaaaccaccagctgtggagaaagctgcacacggaagtgctgaaaggacggagaaggtcagcagagatggggtgcctgatgttgccaagaaagaggacaaaaagagtgaccggcatgagaaaaagaaaaggaaagagaaagataaacacaaagagaggaaaaaggagaaagaggcaaagaaggagaaagagaagcataattacaaggagcatgataagacaagagagaacaatataagttatccggtagatagtcttaacttgaagccctcggcccctcctgtagccccaccagttgatggtggaaaatctgttgtgcccgatgagaacctgaagaagcgaaagaatcatgaaacgaatggttacctacaaagtgagttcctaactttcttttctttttggcacttaaaaagcatatgtagtattgtatgacaccactatccttttttttatggtgctttatatattatataagacttctgatgctatacagaccatcttgaaatgcggcctacaaagttg

SEQ ID NO: 129526 - DNA, 1245 bp, Zea Mays
aaaaaataagcggtcgtcaggcgccgggcgagggaagcagggaaacaaggagcgagcgagcctgcgccgctaagacgggcgccgaccggcgagcgatgcagtccccttcaccttttcttcattcttccgcatcgtaagaggattaggaatttaggatcggggccgacagagcccgacgaccagcatggaccactcgcccgatgatctgtcgttgatggcgctcggcgaggacggggatcacggcgccgccctgcccctcattgcggactaggcaaagcatgacgacgatggcatcatccgaaaatgagcatgttgatggcgtcagcgcacatggtcacggaggtgaaggcgaccacgtcagccatggcagatgaggagcatccggagagaagagaggaggcctcagaagtgagctgtgtattctccatcgttgcgctgatagtgtttctgataattatagtgttgttcgcctgttcggttgcttgccttgattcatagcggttccagctagggttgagcttgcgagttgtgggttacatttaaggttctattccactacatgttcatgtatctatattttttcttctcctacgacttgcccccttttgatccgacaagaagaagaaaattaaggaggtcgtcatccaaaaaccttctgatggaatggacaactttgcagagaagacagaaaaaacactggcagtcacagaatccggtgtacttaacttcactagaatgaggaagataaacaggcacaacagatacactcattgggagctagactagacaagtttaagaatcagaaaatgaatcgaggctttacatttagtcattgtgcaagtttaaaaatcaaccagtgaattaaggctttacatttgttcatcctacaaaaatttcaggtggattttaattcaacttgagtacttttgcaatatctggctctccctgcttttcagatgatcaagttgtacaggaactaggggaaggcattatgctttgaagtgtcccaacatacccttgggagggaactggccgagattataactatgaacagggtgttcaacattattcgcgacaacaaccaggtcttgctgggataggtgtaggaccattatgaggccaccacatgttcttaggaagggaacaaggaagataattttttgttacttttataaatttgtgtaaaatgtaagtttcaacataattgtgacaacatatttttaattggtagtccctcaccttttt

SEQ ID NO: 129527 - DNA, 370 bp, Zea Mays
caccggagaaaaatacaagcgggcactggaaccaagctgtgcgaagccttactctaaatgttcaccagccatgatcctggactatttaccgagtgcctgcggaaatactgaggaagagaaagcgaaagagaaggagattaagttgaagcaagaatccacatggaaacgccttgaagagattgcatcagcgcaagcgacgagcggtgcagcagttctcgtctctctctacccttatcccgtcaatcttcagctgtgtagcaaaaccatatcgtttcactttgttagtttccaagtttgggatctcgaatttctaggtgttcatgaaacattgtacaggattgagttgtatatagtatacgaggtatattaa

SEQ ID NO: 129528 - DNA, 2742 bp, Zea Mays
atgcagcccagcccaaccacctcccagcttatccttctcccggtctccctcggctccgctctgccgcagccgcgggaaatggtcgcgctccacctccacgccaagcaacccacgcctcgtctcctccccgttccaccgagccatgcccgtacccgtacgcccacggcggcggcggtcaacgtgagccacgctgcgcctccgcccgacgtcgtcctcgactgcaaacggctggacgggctgatgaagtccgggaggctgggggacgccctggacctgttcgatcggatgcctcgcaagaacgtcgtcgcgtggaccacggccatctccgggtgcacgcggaacgggcgccccgaggcggctgcgaccatgttcgcggacatgctggagtccggcgtcgcgcccaacgacttcgcgtgcaacgcggcgctggcggcgtgcgcggccgctggcgcgctcggcctcggcgagcaggtgcactcgctcgccgtgcgggcgggcttcgcggccgacgcctggatcggaagctgcctcatcgagctctactcgaggtgcggctccctgcgggcggccgaggaggtctttcgccggatggaggcgccggacgtcgtggggtacacctcgctcgtctcggcgctctgccggaacggagagctcgcacgggctgtggatgtgctctgccagatgacgaggcaggggttgcagccgaacgagcacacgatgacgagcatgctggcagagtgccctcgtggaattggtgagcagatacatggatatatgctcaaggtaatgggttcgcagagcgtctatgcatccactgcactgatcgacttctactcgaggtacggtgactttggcacggcgaaaacggtctttgaaaatcttgagtccaagaacgtggtgtcgtggtgctccatgatgcagctgtgcattagggatggaaggttggacgatgcgctgcgagtgttcagtgagatgatttcagagggcgtccagccaaatgaatttgcgttctcaatcgctcttagtgcctgtgggtctgtttgtctggggcgtcaaattcactgctcagccatcaagcgtgacttaatgactgacatccgagtatctaatgctttactctctatgtatggtaggagtggttttgtttcagaactcgaggctgtgcttggcaagattgaaaatcctgatcttgttagctggacagctgccatttctgcgaacttccagaatggtttcagtgagaaggctgtagcattgcttcttcagatgcattcagagggttttacaccgaatgactatgccttctctagtggtctgagttcttgtgcagacctggcattgctgcatcaaggaaggcagcttcattgcctggcactgaaactggggtgtgacttcaaagtttgtactgggaacgcactaattaacatgtattccaagtgtggtagaattggatctgcaaggcttgcatttgacgtcatggatactcatgatgtcatgtcttggaactcattgattcacggtctcgcacagcatggtgacgcaaacttggcactggagacattcagtgagatgtgctcaagcgattggcggccagacgattcaacatttctgtcagtcttggtagggtgcaatcatgcaggtctggtaaaggaaggggagacctttttcagacaaatgactgaccggtatggtctcacaccgaccccttctcactacgcatgcatgatcgacatgctgggtcgaaatggcaggttcgccgaggcgctacgcatgatcgagaatatgccattcgagcctgatgttttgatttggaagacactattagcatcatgcaagctgcacaggaatcttgacatcgggaagctcgcagcagataagctgatggagctttcagaaagagactccgcgagctacgtgctcatgtcaaacctctatgcgatgcatgaagaatggcgggatgccgagagggtgcgtcggaggatggatgaaattggggtgaagaaggatgccggttggagctggattgaggtcaagaacgaggttgaagcggctcgatttgttcaccagaaattcagattttcgagtggaacggagggagtaactgatagcatctattcttgtccaggctcatgcttgggattgggcttggatgttgatgtgacagcggttactccgtctgaccccccctcggacgtggaaggcgctgctgatactccgtctgagaccatctcaagatttcaggggccattattattagagtacaatggaacagcgaggagggctgacgcagactcaactgttccactcaggcatgaggtggtagcctttgatgacagttccaggcagaattttggggattcatgtgactcctcattggatccattatcttctatggaatctagaagaagatcattcatggctaagataacaatggcacattcacagctccttgctgctcctgtcctccccaagcggtcaaggggtgccacaaaacatggtactgcgctacgacggagccgacgggttgcaggggcaggggtggaatttaacatgcaggatctggagaacagagccacaaaacaagtaatgcggactctgagagtcatcacagagaatgcaagcatcaaccagcaagctgttaaggattatgagaatctttttcagcatcccttaactcaaagtcatgttgaagcgttagcggctctctttggatgggagactccggggaatctcttcccgtag

SEQ ID NO: 129529 - DNA, 3289 bp, Zea Mays
aaatgtaggtgtaactccaaaatcctacttactgctgggccccaagaattcgatgcagcccagcccaaccacctcccagcttatccttctcccggtctccctcggctccgctctgccgcagccgcgggaaatggtcgcgctccacctccacgccaagcaacccacgcctcgtctcctccccgttccaccgagccatgcccgtacccgtacgcccacggcggcggcggtcaacgtgagccacgctgcgcctccgcccgacgtcgtcctcgactgcaaacggctggacgggctgatgaagtccgggaggctgggggacgccctggacctgttcgatcggatgcctcgcaagaacgtcgtcgcgtggaccacggccatctccgggtgcacgcggaacgggcgccccgaggcggctgcgaccatgttcgcggacatgctggagtccggcgtcgcgcccaacgacttcgcgtgcaacgcggcgctggcggcgtgcgcggccgctggcgcgctcggcctcggcgagcaggtgcactcgctcgccgtgcgggcgggcttcgcggccgacgcctggatcggaagctgcctcatcgagctctactcgaggtgcggctccctgcgggcggccgaggaggtctttcgccggatggaggcgccggacgtcgtggggtacacctcgctcgtctcggcgctctgccggaacggagagctcgcacgggctgtggatgtgctctgccagatgacgaggcaggggttgcagccgaacgagcacacgatgacgagcatgctggcagagtgccctcgtggaattggtgagcagatacatggatatatgctcaaggtaatgggttcgcagagcgtctatgcatccactgcactgatcgacttctactcgaggtacggtgactttggcacggcgaaaacggtctttgaaaatcttgagtccaagaacgtggtgtcgtggtgctccatgatgcagctgtgcattagggatggaaggttggacgatgcgctgcgagtgttcagtgagatgatttcagagggcgtccagccaaatgaatttgcgttctcaatcgctcttagtgcctgtgggtctgtttgtctggggcgtcaaattcactgctcagccatcaagcgtgacttaatgactgacatccgagtatctaatgctttactctctatgtatggtaggagtggttttgtttcagaactcgaggctgtgcttggcaagattgaaaatcctgatcttgttagctggacagctgccatttctgcgaacttccagaatggtttcagtgagaaggctgtagcattgcttcttcagatgcattcagagggttttacaccgaatgactatgccttctctagtggtctgagttcttgtgcagacctggcattgctgcatcaaggaaggcagcttcattgcctggcactgaaactggggtgtgacttcaaagtttgtactgggaacgcactaattaacatgtattccaagtgtggtagaattggatctgcaaggcttgcatttgacgtcatggatactcatgatgtcatgtcttggaactcattgattcacggtctcgcacagcatggtgacgcaaacttggcactggagacattcagtgagatgtgctcaagcgattggcggccagacgattcaacatttctgtcagtcttggtagggtgcaatcatgcaggtctggtaaaggaaggggagacctttttcagacaaatgactgaccggtatggtctcacaccgaccccttctcactacgcatgcatgatcgacatgctgggtcgaaatggcaggttcgccgaggcgctacgcatgatcgagaatatgccattcgagcctgatgttttgatttggaagacactattagcatcatgcaagctgcacaggaatcttgacatcgggaagctcgcagcagataagctgatggagctttcagaaagagactccgcgagctacgtgctcatgtcaaacctctatgcgatgcatgaagaatggcgggatgccgagagggtgcgtcggaggatggatgaaattggggtgaagaaggatgccggttggagctggattgaggtcaagaacgaggtcaacacctttgttgcaggagacatgtctcatccagactccacatccatctatcagatgcttgcagagctccttgttgtgatgcaagatacagatttagatgttcatatgcagatttagatgtccaaaaagagaacataccacttgcagacattacatgtacagggtacaacagcacatagcgcctgattggttgctcatctgggtggagcctggtccaaacctggatgcaggctgagaccagcctatatgtgtggatgcaagtgccaagtttgcttgcatgtttggttggatgtaccaaagcagccatgatttaatgggcacatgtttggttaaacaacaccaagtcggcgaatgttttttacaagaggttgcggagcgggcgttatttttgtggaataatgaccatatcgagagtctgatcaaacagaatagtagggttatacatctaagtggcttttccttgccatctgggatggcctatggtggtgcaacaacagtcaaaatcttctatcaacggcgtcgaaaaaccactgctggaaataatattgctacaattaatgatgatgatattgcggaggctcatgcttgggattgggcttggatgttgatgtgacagcggttactccgtctgaccccccctcggacgtggaaggcgctgctgatactccgtctgagaccatctcaagatttcaggggccattattattagagtacaatggaacagcgaggagggctgacgcagactcaactgttccactcaggcatgaggtggtagcctttgatgacagttccaggcagaattttggggattcatgtgactcctcattggatccattatcttctatggaatctagaagaagatcattcatggctaagataacaatggcacattcacagctccttgctgctcctgtcctccccaagcggtcaaggggtgccacaaaacatggtactgcgctacgacggagccgacgggttgcaggggcaggggtggaatttaacatgcaggatctggagaacagagccacaaaacaagtaatgcggactctgagagtcatcacagagaatgcaagcatcaaccagcaagctgttaaggattatgagaatctttttcagcatcccttaactcaaagtcatgttgaagcgttagcggctctctttggatgggagactccggggaatctcttcccgtag

SEQ ID NO: 129530 - DNA, 3422 bp, Zea Mays
atgcccctcgaccccgactcctcgtcgccgccgccgccacaccgcgactggttcttcccgccggcgccgccgttcctcgcctcctccaggtcccggacccccagtgcgcccttcccctccacctaccgctcctccaagccctactcagcctaccccctcgccgaccgccgaccgcctcctaccccacgctcccgctcccgctctccgcacccaccgccggagcagcagcagaagacgccgacgccgcctactcctacgtccgcgccgcgccgccgtgaccctcggtacgccggcgtccgccgcgaagatgcccgtacggctgcctccgagcaagcggcggccccgatggccgcgccagtgcacgggaggaagcccgcagcgtcggcgatcgctccacggtggtcgggggtgctctccgtggcggttattttactgtgcctggcctcccttctccgcaggaacttctctttgcacgaccaggtttaccttctgcaggagcagctggctgtagctactgcaaaacttcagtcctgcactgtagattcttcattgaatacaagcatcattaatctgttctatcaggatgctgctaacagtaccacgcagagcagaagccttaagaacctttccttgcttatctcgctttcggtattatacgcaccactcctcattctcaagtacgtggaccttgtgtcaaagataaggaggtcacgtgactctgaacaagttccaataaacaagcggttcgcatacagggtcgatatatttttgtcacttcatccgtatgctaaaccattggtcctacttgttgctacgttgttactaattgctcttggtggactggctctgtatggtgtgacggatgatagcttatctgattgtctttggctgtcctggaccttcgtcgctgactcagggaaccatgccaatgctgtgggtcttggacccaagctggtttcagtttcaattagtattggtggaatgttggtttttgctatgatgcttggtcttgtcactgattcaatctctgagaagtttgattctttgaggaaaggaagaagtgaagtcatagaacagagccacactctaattcttgggtggagtgataaattgggatctttgctgaaccaaattgccattgctaatgaaagcttgagaggtgggaccattgtagtgatggctgagagagacaaagaagaaatggaagcagatattgctaaaatggagtttgacatgaaaggaacagctgtaatatgtagaagtggaagccctttgatacttgctgatttgaaaaaggtctcagtttcaaaggcgcgggcaattgttgttttagctgaagaaggaaatgctgaccagagtgatgcacgagcactgcgaacagtcctgagtttaactggagttaaagagggactaagtggtcacatagtagtggagcttagtgatcttgacaatgaagttctagtcaaacttgttggtggagatcttgtggaaacagttgtggcacatgatgtgattggacgattgatgatacagtgtgcacgtcaaccaggccttgcacagatatgggaagacattcttggttttgagaactgtgaattctacattaaaagatggcctaaattggatggaatgcgatttgaagatgtgctgattagctttcctgaagctgttccatgtggcataaaagtggcatcttatgggggcaagattattttaaaccctgatgattgttatgttttgcaagagggtgatgaggtgatagtaattgcagaggatgatgatacatatgctccagcaccattgcccaaggttaaagaggctgtttacatagacattgttcatcctgaaagaaagcctcagaagattcttctttgtggatggcgacgggatatagatgatatgattgcggttaggagagggtatctgcctaaagattttgttgttccaaagtctccagaaagaatattgttttgtggttggcgccgtgatatagaagatatgataatggtacttgatgctttccttgcgccaggatcagagttgtggatgtttaatgacgtccctgaggttgacagagaaagaaagctaattgatggaggtttggacttcagtcgcctcgataatattactttggtgcatcgtgagggaaatgctgttattcgccgtcacttggagagccttcctttagaatcattcgattctatcctgattttggcagatgaatctgtagaagattcagcaatccaagctgactcaaggtcacttgcaactttgctgctgataagagatattcaggcaaaacgtcttccatgcaaggaatcattgatttcacatgttccccgagggaccttttctgaaggttcttggataggggagatgcaacaagcatctgataaatctgtcataatcagtgaaattttggaccccaggacaaaaaatttgttgtcagtgtcaaaaattagtgactacgttctttcaaatgaattagtgagcatggcattggcaatggtcgcagaagatcggcagataaataatgtcttggaggagctcttcgctgaacaaggaaatgaaatgcaaatacgaccttctgatatgtaccttagagaagaagaggaattaaatttctttgaggtcattctgcgagctaggcagaggaaagagattgtcattgggtaccgtcttgaggcagctgagcgtgccataatcaatccaatagacaaagtttcaaggcgaaggtggtcacccaaggatgtttttgttgttatatccgagaaagaatgaggtttatcagatcacagttgacacaaaagcaagctcctgaccagtgaccacacctaatgaagaacaggcagctgcgccgcagcacacacacacacaccgaccagcgcagagagctatttgattcagatgcgcatttggctgattcagatgcgcatttggcagaaggcaatcgctgagcgcgaaggagtaaaagcatgatcagatattcagatcttggatcagtctagactgacaccttaggtcgccctttacaaatatgacttaaaaaggatgtgaacagagtagtacagcacatgctttggaagtttggatattcttgtccgtgtaacttcccacatgaacaacgagcaaagcatcgcctgcatgcatcaattaatggcttaaagctattgagtgctgatactgagcagttttccagtgagcctgttacaccctcccatagagcgtagacgacagcgatagttcagcattctgtacattgcataggcgcattctgttgccagtccatgtaaacaacatgagatgtcggccagtccatgtaaatatgtaatctggaagatcatctgtaggtactgttgcggtgttggatcttgtgaagaatgcagagagcaatgccgaagcgtgtcaccttgcctcattgt

SEQ ID NO: 129531 - DNA, 3178 bp, Zea Mays
agcaacgttcccgggaattccccaaaatgcccctcgaccccgactcctcgtcgccgccgccgccacaccgcgactggttcttcccgccggcgccgccgttcctcgcctcctccaggtcccggacccccagtgcgcccttcccctccacctaccgctcctccaagccctactcagcctaccccctcgccgaccgccgaccgcctcctaccccacgctcccgctcccgctctccgcacccaccgccggagcagcagcagaagacgccgacgccgcctactcctacgtccgcgccgcgccgccgtgaccctcggtacgccggcgtccgccgcgaagatgcccgtacggctgcctccgagcaagcggcggccccgatggccgcgccagtgcacgggaggaagcccgcagcgtcggcgatcgctccacggtggtcgggggtgctctccgtggcggttattttactgtgcctggcctcccttctccgcaggaacttctctttgcacgaccaggtttaccttctgcaggagcagctggctgtagctactgcaaaacttcagtcctgcactgtagattcttcattgaatacaagcatcattaatctgttctatcaggatgctgctaacagtaccacgcagagcagaagccttaagaacctttccttgcttatctcgctttcggtattatacgcaccactcctcattctcaagtacgtggaccttgtgtcaaagataaggaggtcacgtgactctgaacaagttccaataaacaagcggttcgcatacagggtcgatatatttttgtcacttcatccgtatgctaaaccattggtcctacttgttgctacgttgttactaattgctcttggtggactggctctgtatggtgtgacggatgatagcttatctgattgtctttggctgtcctggaccttcgtcgctgactcagggaaccatgccaatgctgtgggtcttggacccaagctggtttcagtttcaattagtattggtggaatgttggtttttgctatgatgcttggtcttgtcactgattcaatctctgagaagtttgattctttgaggaaaggaagaagtgaagtcatagaacagagccacactctaattcttgggtggagtgataaattgggatctttgctgaaccaaattgccattgctaatgaaagcttgagaggtgggaccattgtagtgatggctgagagagacaaagaagaaatggaagcagatattgctaaaatggagtttgacatgaaaggaacagctgtaatatgtagaagtggaagccctttgatacttgctgatttgaaaaaggtctcagtttcaaaggcgcgggcaattgttgttttagctgaagaaggaaatgctgaccagagtgatgcacgagcactgcgaacagtcctgagtttaactggagttaaagagggactaagtggtcacatagtagtggagcttagtgatcttgacaatgaagttctagtcaaacttgttggtggagatcttgtggaaacagttgtggcacatgatgtgattggacgattgatgatacagtgtgcacgtcaaccaggccttgcacagatatgggaagacattcttggttttgagaactgtgaattctacattaaaagatggcctaaattggatggaatgcgatttgaagatgtgctgattagctttcctgaagctgttccatgtggcataaaagtggcatcttatgggggcaagattattttaaaccctgatgattgttatgttttgcaagagggtgatgaggtgatagtaattgcagaggatgatgatacatatgctccagcaccattgcccaaggttaaagaggctgtttacatagacattgttcatcctgaaagaaagcctcagaagattcttctttgtggatggcgacgggatatagatgatatgattgcggtacttgatgctttccttgcgccaggatcagagttgtggatgtttaatgacgtccctgaggttgacagagaaagaaagctaattgatggaggtttggacttcagtcgcctcgataatattactttggtgcatcgtgagggaaatgctgttattcgccgtcacttggagagccttcctttagaatcattcgattctatcctgattttggcagatgaatctgtagaagattcagcaatccaagctgactcaaggtcacttgcaactttgctgctgataagagatattcaggcaaaacgtcttccatgcaaggaatcattgatttcacatgttccccgagggaccttttctgaaggttcttggataggggagatgcaacaagcatctgataaatctgtcataatcagtgaaattttggaccccaggacaaaaaatttgttgtcagtgtcaaaaattagtgactacgttctttcaaatgaattagtgagcatggcattggcaatggtcgcagaagatcggcagataaataatgtcttggaggagctcttcgctgaacaaggaaatgaaatgcaaatacgaccttctgatatgtaccttagagaagaagaggaattaaatttctttgaggtcattctgcgagctaggcagaggaaagagattgtcattgggtaccgtcttgaggcagctgagcgtgccataatcaatccaatagacaaagtttcaaggcgaaggtggtcacccaaggatgtttttgttgttatatccgagaaagaatgaggtttatcagatcacagttgacacaaaagcaagctcctgaccagtgaccacacctaatgaagaacaggcagctgcgccgcagcacacacacacacaccgaccagcgcagagagctatttgattcagatgcgcatttggctgattcagatgcgcatttggcagaaggcaatcgctgagcgcgaaggagtaaaagcatgatcagatattcagatcttggatcagtctagactgacaccttaggtcgccctttacaaatatgacttaaaaaggatgtgaacagagtagtacagcacatgctttggaagtttggatattcttgtccgtgtaacttcccacatgaacaacgagcaaagcatcgcctgcatgcatcaattaatggcttaaagctattgagtgctgatactgagcagttttccagtgagcctgttacaccctcccatagagcgtagacgacagcgatagttcagcat

SEQ ID NO: 129532 - DNA, 2618 bp, Zea Mays
atgcccctcgaccccgactcctcgtcgccgccgccgccacaccgcgactggttcttcccgccggcgccgccgttcctcgcctcctccaggtcccggacccccagtgcgcccttcccctccacctaccgctcctccaagccctactcagcctaccccctcgccgaccgccgaccgcctcctaccccacgctcccgctcccgctctccgcacccaccgccggagcagcagcagaagacgccgacgccgcctactcctacgtccgcgccgcgccgccgtgaccctcggtacgccggcgtccgccgcgaagatgcccgtacggctgcctccgagcaagcggcggccccgatggccgcgccagtgcacgggaggaagcccgcagcgtcggcgatcgctccacggtggtcgggggtgctctccgtggcggttattttactgtgcctggcctcccttctccgcaggaacttctctttgcacgaccaggtttaccttctgcaggagcagctggctgtagctactgcaaaacttcagtcctgcactgtagattcttcattgaatacaagcatcattaatctgttctatcaggatgctgctaacagtaccacgcagagcagaagccttaagaacctttccttgcttatctcgctttcggtattatacgcaccactcctcattctcaagtacgtggaccttgtgtcaaagataaggaggtcacgtgactctgaacaagttccaataaacaagcggttcgcatacagggtcgatatatttttgtcacttcatccgtatgctaaaccattggtcctacttgttgctacgttgttactaattgctcttggtggactggctctgtatggtgtgacggatgatagcttatctgattgtctttggctgtcctggaccttcgtcgctgactcagggaaccatgccaatgctgtgggtcttggacccaagctggtttcagtttcaattagtattggtggaatgttggtttttgctatgatgcttggtcttgtcactgattcaatctctgagaagtttgattctttgaggaaaggaagaagtgaagtcatagaacagagccacactctaattcttgggtggagtgataaattgggatctttgctgaaccaaattgccattgctaatgaaagcttgagaggtgggaccattgtagtgatggctgagagagacaaagaagaaatggaagcagatattgctaaaatggagtttgacatgaaaggaacagctgtaatatgtagaagtggaagccctttgatacttgctgatttgaaaaaggtctcagtttcaaaggcgcgggcaattgttgttttagctgaagaaggaaatgctgaccagagtgatgcacgagcactgcgaacagtcctgagtttaactggagttaaagagggactaagtggtcacatagtagtggagcttagtgatcttgacaatgaagttctagtcaaacttgttggtggagatcttgtggaaacagttgtggcacatgatgtgattggacgattgatgatacagtgtgcacgtcaaccaggccttgcacagatatgggaagacattcttggttttgagaactgtgaattctacattaaaagatggcctaaattggatggaatgcgatttgaagatgtgctgattagctttcctgaagctgttccatgtggcataaaagtggcatcttatgggggcaagattattttaaaccctgatgattgttatgttttgcaagagggtgatgaggtgatagtaattgcagaggatgatgatacatatgctccagcaccattgcccaaggttaaagaggctgtttacatagacattgttcatcctgaaagaaagcctcagaagattcttctttgtggatggcgacgggatatagatgatatgattgcggttaggagagggtatctgcctaaagattttgttgttccaaagtctccagaaagaatattgttttgtggttggcgccgtgatatagaagatatgataatggtacttgatgctttccttgcgccaggatcagagttgtggatgtttaatgacgtccctgaggttgacagagaaagaaagctaattgatggaggtttggacttcagtcgcctcgataatattactttggtgcatcgtgagggaaatgctgttattcgccgtcacttggagagccttcctttagaatcattcgattctatcctgattttggcagatgaatctgtagaagattcagcaatccaagctgactcaaggtcacttgcaactttgctgctgataagagatattcaggcaaaacgtcttccatgcaaggaatcattgatttcacatgttccccgagggaccttttctgaaggttcttggataggggagatgcaacaagcatctgataaatctgtcataatcagtgaaattttggaccccaggacaaaaaatttgttgtcagtgtcaaaaattagtgactacgttctttcaaatgaattagtgagcatggcattggcaatggtcgcagaagatcggcagataaataatgtcttggaggagctcttcgctgaacaagtataattctcaaagcttatagttgcatgttcaatcactttttactgacctagaaa

SEQ ID NO: 129533 - DNA, 1642 bp, Zea Mays
agcaacgttcccgggaattccccaaaatgcccctcgaccccgactcctcgtcgccgccgccgccacaccgcgactggttcttcccgccggcgccgccgttcctcgcctcctccaggtcccggacccccagtgcgcccttcccctccacctaccgctcctccaagccctactcagcctaccccctcgccgaccgccgaccgcctcctaccccacgctcccgctcccgctctccgcacccaccgccggagcagcagcagaagacgccgacgccgcctactcctacgtccgcgccgcgccgccgtgaccctcggtacgccggcgtccgccgcgaagatgcccgtacggctgcctccgagcaagcggcggccccgatggccgcgccagtgcacgggaggaagcccgcagcgtcggcgatcgctccacggtggtcgggggtgctctccgtggcggttattttactgtgcctggcctcccttctccgcaggaacttctctttgcacgaccaggtttaccttctgcaggagcagctggctgtagctactgcaaaacttcagtcctgcactgtagattcttcattgaatacaagcatcattaatctgttctatcaggatgctgctaacagtaccacgcagagcagaagccttaagaacctttccttgcttatctcgctttcggtattatacgcaccactcctcattctcaagtacgtggaccttgtgtcaaagataaggaggtcacgtgactctgaacaagttccaataaacaagcggttcgcatacagggtcgatatatttttgtcacttcatccgtatgctaaaccattggtcctacttgttgctacgttgttactaattgctcttggtggactggctctgtatggtgtgacggatgatagcttatctgattgtctttggctgtcctggaccttcgtcgctgactcagggaaccatgccaatgctgtgggtcttggacccaagctggtttcagtttcaattagtattggtggaatgttggtttttgctatgatgcttggtcttgtcactgattcaatctctgagaagtttgattctttgaggaaaggaagaagtgaagtcatagaacagagccacactctaattcttgggtggagtgataaattgggatctttgctgaaccaaattgccattgctaatgaaagcttgagaggtgggaccattgtagtgatggctgagagagacaaagaagaaatggaagcagatattgctaaaatggagtttgacatgaaaggaacagctgtaatatgtagaagtggaagccctttgatacttgctgatttgaaaaaggtaaatacatgcattgaaacatactttttctcagttttgaattttgatcttttgcgacccgttgtggtctattgacagttgatagggtgactgcaatgtacatgttagttagtgcttgaatagcacttcaccttttccctatatgtgcctattttcaactaataaaccttcatgcacaaggtctcagtttcaaaggcgcgggcaattgttgttttagctgaagaaggaaatgctgaccaggtaagtgtcgctgatcaagctatgctgttcttgaaatctgttccttacatcattgcacactttttgtagagtgatgcacg

SEQ ID NO: 129534 - DNA, 1134 bp, Zea Mays
cgcggcctttcaggcactccctggcggcggcccctagccagcctctcgcgcgtgcgcagccggcaccctgtggctcactcagcagctgcgcgcggcaggccagcagtggtagtggacagcggcagcggctgtgctcggcggcccctgtgttgatgtgcgctgctcagctgctgtgcccagcggccgacacctctgcggctctcctttgctcgacgtcgagttcgtccctgatctggctcaacgatttactggtttttttgccgatgcttcatagttggcgagggagaaattccagcaatgcttgtcgtgcaactgccgccacctgaggtagcgggtgaggatgagagcaatagccgtggtgtcttcgtggagttcatgaccaaggtcgctcagttcaatgagcttgttgaatctggggagcgattgcttgggagatttcgtgaggagcttgagtattttcgtaggccgcagatttctaaggaagcagatgtaatgaatcagatacttaaatcaaactgcactgtcagaatgaggtcctatattgaaactggctgcagggtccactgccaaaacatctcaaacattaatcagctgagctcatgcgaaaatggacttaaagatcatataaagaaagttaagaccttgcttgaagagcttgaatgtctggttgagaatgtctatggcatcacactaacagccagtttaagtgctctggaagtttcagacagtcagtgccttgacagcatgctaagtaccgatcgctgctccgtggagcaggaggacagaagtgcagatcggttggacagggatgtgtcgtttgctacagtaatggtcatggttcgcaacgcgctgaaggctgactacacgatgcaggaaaagattgtctgtgcattgtccttgaaaacaccatcatcagagctcgagggatactgcctcatgtggaatttacgcccgtacatcgatgacgatgtgatgcgtcttgcgtggaaaatgtgtccttagtaggcgcaaggttcgtcattctagcaacaagtaccagaagccggtacggattaaagccaagcttgtttaagctgtttgtcttcaaaaactcacagcagttcacgattacccaaaacattgtttgtattgtac

SEQ ID NO: 129535 - DNA, 2381 bp, Zea Mays
ccgcctgagcctcctctttctgaggaaaaaatcacctccaaactccgaccgagcatcttccccgggccggtaggccttatccggtttcttcttgcacctctccagtgagccagtcaccgccagtccacgccatggcttgtcgcgccactctcctgcctctcttcctcttcctcctcgtggcgcccgagcctgcgctcgccacatccggcaccatcgtcttcaccacgctgggccggagccgctacgcctttgacgtcttcgcgctcacgatcgccccgctctccgccgcctccgcggagctgcgcctcacggacggcgcctccgtcaactacaacggcaacttcgcgccctcctcctccggaccgccctccctcctcttcgtctccgagcgcaacggctcgctcaacctctacctcacccccgtccccacatccgcctccgcccgtcgccgcgacgcgctggaggaggaggaggaggactcggcgccgcccacgccgctgctcccgtgggaccctatcgcgctcaaggaccggccttcgctcacccccgacggcgcccacctagtgtacgtctccacggcggagcccgcgggggcgccgcgccggagctgggcggccgtgtactccacgagcctggcccccggccgcgccacgcgccgcctcaccccgcggggagtcgccgacttcagccccgccgtgtcgccgtccggggtctggaccgccgccgcgtcacccggcccgcgcggctgggccggcgaggtggaggacctccgcaccgacatctacgtcttccggacctccgacgggtcgcgccgggcgctggccgtcccggacggcgggtggccgacctgggccgacgacaccaccgtcttcttccaccgccgggacgccgacggctggtacggcgtgtaccgcgccaggctcaccttcacggacgacgacgtcgcgtccgtcgtcgaccggatcaccccgccgggtttccacgcgttcacccccgccgcgtcgcccggcgcgccggggctcgtggccgtggccaccaggcgcccgggttccgactaccgccacatcgaggtcatcgacttgtccggcggcggcggcggcgccaacaacaggagcgcctactacgaggtgacccggcccgtggccccgcgcgcgcaccacttcaacccgttcatctcgccggacggcgagcgcgtcgggtaccaccggtgccggggcagcgggaacggggactcgccgctgctgctggagagcatcaagggccccgcgccggacacgttctcgctcttcaggatcgacgggtcgttcccctccttctcgcacgacggcaagaggatcgccttcgtcgggctgccggggctgtacgtggtcaactccgacggctccggtggccgccgccgggtcttctcgggcaacgcgttcccgacgacatgggactggaagaggaaaggggtcatctacaccagcgtcggcccagacttcgcgagcgagagcaccgaggtggacgtggtcgccgtgtcgctcggcgacggcgacggcgacgaccccagcgtctccatcaagaagctcaccgtgggcggcgagaacaacgcgttcccgtccccttcgcccgacggcaagtgggtggtgttccggtccgggcggtccgggcacaagaacctctacatcatggacgcggaggacggcgaggccggcggcatccggcgcctcaccgagggtccttggtccgacaccatgtgcaactggtcccccgacggcgagtggatcgcgttcgcctcggaccggcacaacccgggcggcggcagcttcgccatctacatggtgcacccgaacggcaccggcctgcggagggtggtgcacagcgccgacggcggccgcaccaaccacccctggttcagcccggactcgaagacgctggtgttcacgtcggactacgccgccgtgtccgcggagcccatctccaacccgcaccactaccagccctacggggagatcttcaccgtaaacatcgacgggtctggcatccgccggctcacgcacaactccttcgaggacgggacgccgtcgtggacgccgtaccacctcaaggcggaggacgtgggcgagacgctgcaggcctccgggacgtgcgcgttcgaggactgccactggctcaacatcgctgcccggcctgatggcctcatgtgtggcaagcacgcctagttatagtatctgtggaagaaatgggactcacgtatatatgtgtgtgtgtatatagtgcggtgatgccatcttgtttgcttgcatatgcatactactgaacatacgatgatgaataaggtcatgccaactttagggcaaaaaataaacatacttatgatgacgctttacatttatactggc

SEQ ID NO: 129536 - DNA, 2175 bp, Zea Mays
gaacaggacccccccccccaccccacccccacgacgagatgccatataagtaaatactagcaagtagcaagggagaaagaagaaggcaagccatcccccacctcctctgcctgcctctttcacacggagcaagcgcgcagagaaagagaggccgttccgttcccttttgtcgctgggcagcatggccatcccgctgccgtgcaaggcgctgccgcggcatgacgggacgaagggcagcgggcaggcgtacgacggcgacgaccagccgtcggtggctgcggagctgcgcgcgctgtggggcatggcggcgcctgtcactgctctcaactgcgtggtgtacctgcgcgcgatggtgtccgtgctgtgcctggggcggctgggcccgctggacctggcgggcggcgcgctggccatcgggctgaccaacatcacgggccacagcgtgctgttcgggctggcgtcggggctggagccgctgtgcgcgcaggcgttcgggtcccgcaaccacgagctgctgacgctgtccctccagcgcgccgtgctgctgcttctcctggcggcgctgcccatcgcgctgctgtggctgaacgtgggccccatcctggtggcgctggggcaggaccccaccatctcggcgcacgccgcgtcgtacgccgcgttcgcgctcccggaccttgccgcgggcgccgtgctccagccgctgcgcgtgtacctccggtcgcagggcatcacgcgccccatggcggcctgctccgccgccgccgtggcgctgcacgtcccgctcaacgtcggcctcgtcttcggcttgggcctcggcgtgcgcggcgtcgcggcggcgcaggccctcaccaacgccaacatgctgctcttcctgctcgcctacgtgcgctgggcgcgcgcctgcgagcacacctggaagggctgggcgcgccccgccgacgtcgccgccggcctcccggccctcgccggcctcgccgtgcccagctgcgtcggcgtctgcctcgagtggtggtggtacgaggtcgtcaccgtgctcgccggctacctccccaaccccgccgccgcagttggcgccgccggggtgctcatccagaccaccagcctcatgtacaccgtgcccatggcgctcgccgccagcgtctctacccgggtgggcaacgagctgggcgccgggaagccgcggcgcgcccggatggcggcgctggtggcgctgtggtgcgcgctggcggtcggcgtgctgcacgtggcgtggacggtggcgctgagcaggcggtgggtggagctgttcacggcggatcccggcgtggtgcggctggcgtcggcggcgatgcccgtggtggggctgtgcgagctgggcaactgcccgcagacggcgggctgcggggtgctccggggcacggcgcgcccggccgtgggcgcccgcatcaacctcctctccttctacctggtgggcacccccgtggcggtgtacctggcgttcggcgcccgcgccgggttccgcggcctctggtacggcctcctgtcggcgcaggccacgtgcgtggcgctcgtcctcgtcgccgtcgtctggcgcacggactggcgcgtcgaggccatgcgcgccaagaagctggcggggctggagctcaccaacgacgccgaggaggagagcaggcgcctcgtggccgccaccggcgagcaggcggaggatactagctagtagtggcgtaggtaggtaagctagctagctagctagctaggtgctgacagcggcgcgacgtgcgtgcgtgcgtgcagggtcgccgtcatcgtctttgaggccccagcagccagcatcaatggaccatactactagtaccatagctagagtggcttggccttttcaattcgctgcaggctagagcttcgtggggcgtgcaggggcctgacggattacaattgattatacctagctttgcgatggcggtggtggtggctgctgtcgcggctcgcaacttgtaggaggacagggtagggcatcccgcgccgtcgctgtcgccttttaatttcctcctgcgcggcgagcggacggagctgcctgcctgaatcagcctgatcgtgtcgccgccgctgtctgatcgggtgcggttttctccatcggcaacttaacggcagcgcgtcgtcttcatatatatctatcttgtttcttcgatcgct

SEQ ID NO: 129537 - DNA, 670 bp, Zea Mays
attgtgtggtggccgggccctgcatgccatgaagcgttcggcggcgtccaccgtgcccctcgccctcgtcctcatcgccgtcgcgacgacggcggcggccgccgacatgaccggcgccagcaactacctcgtgtacgtcgagccacacccgccgggcgtcgactgccaggcgtaccagctcggcatcctggccgccgccctcggaggtgaggcccaggcgaaggcggcgatgctgtacaactacaggaacgtcatgagcgggttctcggcgaggctcacgccgccggagttggaggccgtcaagaagcaacctcaggtgagccgggtgctgccgagcgcgaccttgtctctgatgagcagcaagttcgacggcgtcagctgatcccgcttcttccatccatgcaccagccagagcaagctcatccgtcgacaaacccctaaaataaatacatgttttagtttgttaattaatatatatatcattatggaataaagataccaggatgtggacccatgaagcagaagcagatcaaatactgctacatgacgggggcatgccctaatgcagcaacggggaatgaagagcagtctgacgagtgtcaataaaataggatatcatgtattttcaaacaaaaacaataatcaaaccgttttcaattctgatttttaa

SEQ ID NO: 129538 - DNA, 378 bp, Zea Mays
atgactgatgagtcactgaagaattacaagggtgagagagatggtatctacggccaagccaaggttgctggagccagtgtagaaaatgcacttgttggcatctacggtgttctgaagcagaagagagggcatgtctttgaggagatgcagaggccggccaacatgatgggctctgatcctttggaggccggctcccaggctgctcagctagtgctggatatccgcaagaggaagggtctcaaggaacagatgacccctctttctgctctaaggcttgtttggttcgtggctaactgtgtcacactttgcctaaagttagtcattcgaattgaacaactaactttaagcagaaaagttaggcaaagtgtgacaagttag

SEQ ID NO: 129539 - DNA, 977 bp, Zea Mays
aagccggatgcatgccggcagctagtttcttctctgtcccttattccccactccaagtgtttgtctggtcagtaggtaagattacggatggggatccagcacctaccgcacctgggctggttttctagtctggaaggagagcaccatgacacgctcgtgctggaatatattgctcttgcggtagttcccccaactgtcaccatgcagaacgaggagggtaagactgtggacctctatgtccccaggaagtgctcggccacaaacaggatcatcactgccaaggaccatgcctctgtccagatcaacattggccacttggatgcgaatggcctgtatgatggtcacttcacaacgtttgctctctctgggtttgtccgtgctcagggcgacgcagacagctccttggacaggttgtggcagaagaagaaggttgatatcaagcagtagattttacatctagtttaccaagaattggacactgccttagctatgttttgaattcatgtcactatatgcaatgttgtgatttcagctggtaccttaaatctgaagatttagtatctttgttgggttccttctgagtttgatgtgtggtgttcaattcaaccgtccagtggcaccgaaatatgctgttggggtagtttcattcaaaaaacgtgccattcaattcaaccgtccagtgccattcaatgaattactatgttttgaattactatgctgcttataggacacacatagcacaagtaaaataaacaagtgggcgacaaataatttatgtcaatgatctgcatcttctcttcaaacaaaaagaaaaaactatatatgatttgaggtgatttaagtattgttattttcctttattttctttgcttagctacaactattgtactttttgaagaaaaaaaaatatggtacaacaaattgcatggttctgtttgtataaaaaataaaataaacatgtgtacctatgaagaaac

SEQ ID NO: 129540 - DNA, 864 bp, Zea Mays
gtgctaatcaaagcgaggcacaggcaactaatcaattcagttcactagcagttagcacatcgaagactaacacgactgcccgcgtaatgaatagaaaaaagaaccaatttgactagaatcaatatgttctggcccatgtaattatatgggccagtcgccgtttggcccattagaagctataaaccctacctctggccacctcccccagtctctcgcccctctccctctctcccaccccgcagccgccgcgcaggtagccctagcacccgcgacgagcaggatctgcccagttgctcttgcggtagttcccccaactgtcaccatgcagaacgaggagggtaagactgtggacctctatgtccccaggaagtgctcggccacaaacaggatcatcactgccaaggaccatgcctctgtccagatcaacattggccacttggatgcgaatggcctgtatgatggtcacttcacaacgtttgctctctctgggtttgtccgtgctcagggcgacgcagacagctccttggacaggttgtggcagaagaagaaggttgatatcaagcagtagattttacatctagtttaccaagaattggacactgccttagctatgttttgaattcatgtcactatatgcaatgttgtgatttcagctggtaccttaaatctgaagatttagtatctttgttgggttccttctgagtttgatgtgtggtgttcgtttaattccccattacaaccccatttagggggtgtttggttgctcctgctaaagtttagcccgggtcacatcaagcgtttgacttttaaataggagtatgaaatatagacccaaccaactggactaggttcgtctcgtctttt

SEQ ID NO: 129541 - DNA, 1893 bp, Zea Mays
gtgctaatcaaagcgaggcacaggcaactaatcaattcagttcactagcagttagcacatcgaagactaacacgactgcccgcgtaatgaatagaaaaaagaaccaatttgactagaatcaatatgttctggcccatgtaattatatgggccagtcgccgtttggcccattagaagctataaaccctacctctggccacctcccccagtctctcgcccctctccctctctcccaccccgcagccgccgcgcaggtagccctagcacccgcgacgagcaggatctgcccaggtaaatcgtcttcaagccggatgcatgccggcagctagtttcttctctgtcccttattccccactccaagtgtttgtctggtcagtaggtaagattacggatggggatccagcacctaccgcacctgggctggttttctagtctggaaggagagcaccatgacacgctcgtgctggaatatagtgcgattttatgttcctgctacgttgcgactgctcatagaatatatgccaattttcatcttcctgctatgtccgtgtatcatgttttttgaaaaataatatctccatatccgcatccttctgataccgcccatatccatgcatacatatggtttgcttgctatatgcaagcgcctcgaacccggattgctatattttgatgatttcgtgtctctcatttgatctttttttaaagaataagttggtgccgtgattgtagatctaagatcaacgtggttgcaacctgtgttcaactaagacacatcgttcccagtttacttttttcttagcttttgtgcttgcaatcctgtgaagtgtgacgtaactaatggaatagtgtatcctgacaaataatgcatggtgaaacgttttttatccagattccttgaatcctctaaattgtgtttgtttattgttagaaatgaacttcatctaccaaacaggattcgaacatgcctttctttaccatgtttcgtgcaactatgcactgctaacatatcagtaccatggtttgcacctgctagaatatcagtttattaccgttttggtgcaatcgtgactgaggtggatggggttattgaacaacgtatttgaatatttgatgttttagctgcatggaagtattcattccaatccttctgttgaattgcaaagaattgcttaaatttgagatctgtatagttctgttttagttatgccttttcatttgagcctgaattagacttcagttgtttgcatagttatagttataaatatagaatagcttgcttgtccatcaattttgaattgttacagtactgaatgagtcctcagagtgcatagtgttgttctctttttatgtgcctgatagttggtcctcttgtatttcagttgctcttgcggtagttcccccaactgtcaccatgcagaacgaggagggtaagactgtggacctctatgtccccaggaagtgctcggccacaaacaggatcatcactgccaaggaccatgcctctgtccagatcaacattggccacttggatgcgaatggcctgtatgatggtcacttcacaacgtttgctctctctgggtttgtccgtgctcagggcgacgcagacagctccttggacaggttgtggcagaagaagaaggttgatatcaagcagtagattttacatctagtttaccaagaattggacactgccttagctatgttttgaattcatgtcactatatgcaatgttgtgatttcagctggtaccttaaatctgaagatttagtatctttgttgggttccttctgagtttgatgtgtggtgttcgtttaattccccattacaaccccatttagggggtgtttggttgctcctgctaaagtttagcccgggtcacatcaagcgtttg

SEQ ID NO: 129542 - DNA, 1882 bp, Zea Mays
aataggacaagccccagcagtttgccactcccacgcgaaacagaagccccagcagggcggcactcccgacgcgacgcccctgcttgccggccgggaggctcactcgactctgcctccacttcctcgtctgtccgttggagcacggcgccgatggcggcggcgccagcgctcgcgcgggagctgctggacgcggcgcgggagccggagttcgcggagtggcagcgcggcgtgcggcgccggatccaccagcacccggagctggccttccaggagcaccgcaccagcgcgctcgtgcgcgccgagctcgacgcgatcggcgtcccgtacgcctggcccgtcgcgcagacgggcgtcgtggccaccatcaccggccccgccgcgggccccgtgttcgcgctccgcgccgacatggacgcgctccccatccaggaaatggtagaatgggagttcaagagcaaggaagacgggaagatgcatgcgtgcggccatgacgcccacgtggcgatgcttcttggagcagctaggttgcttcagtctcggagggacgatttaaagggtacagtgaagctcgtcttccagccagccgaggagggacacgccggcgcataccacgtcctcaaggaaggcgtcctggacaacgtgcaggccatcttcggcgtgcacgtggacacggcgttgccggtggggctcgtcgggtccaggccagggccgttcctcgccggatcggcgcggttcacggcgaccatcacggggaaaggcgggcacgcagcggggccgcagcacgtcgtcgacccgatcgtcgcggcgtcctccgccgtgctcagcctccagcagctcgtcgcccgcgagaccgacccgctacagggcgcagttgtgtcggtgaccttcatcaaaggaggaggcggagctttcaatgtcatcccagaatccgtcaccatgggcggcaccttgaggagcatgacgaacgatggcatgtcctatctcgtgaaaagaatcagagaggtgatacaaggacaagccgccgtgagccgctgcgccgctacggtggacttgatggaggagaagatgaggccgtacccggccaccgtgaacgacgaggccatgtactcccacgccaaggcggtggcggagagcatgctgggcgaggccagcgtgatgctgtgcccccagttcatggcggcggaggacttcggcttctacgcgcagcggatcccggcggccttcttcagcgtcggcgtccgcgacgaggcgacggggaaggtccaccacgtgcactcaccgcacctggacatcgacgaggccgcgctccccgtcggagccgcgttgcacgccgccgtggccatggagtacctgaacaaacacgcaccatgcaaataaacacaaggctctggccatcccgataatacatgtcattcttattgaagtgactgcatgccgcaaaatcttccctccttggagcggtaagaatttgctaccccgcatccgtgctctgtacgtcgaaaataaatgtgtccagacatccctgaaagattggtttggttgtactgcgcctgttccaccaattgtatgtaaacgcatgtgcctgaaattcatgtaatgattaatttagattgcaaacggtaatagtaaatatgaacaacatttgaaattaaattacagccccgagaaaaatattcaagggggccaattcaaatatgaacaacgatattctgaattcaagggggccaattcaactaaaaaacacacactcggactatattttgtatttttctctttattttcaatagtatattcaagcaactcaatgctcgtccctcttttctttgaaaagtctaataaatatgttcacattaaacattgaatgactcacataatttctatc

SEQ ID NO: 129543 - DNA, 2201 bp, Zea Mays
aaaacgaataaatcgaaacttcagtgttcagtcaattactgaagcacccacatgtagagaagtattactgtataaccgaactctgtgacaacatattgagggtaaatcagcattcctgcttcaagtaatcataattaaggacgtgaatttccgttatgatcaacatatactagtactctagcaccgtaagggcttgttcgtttaatccatgtggattgggtgcgattgagtttcaatcccaagtaatttaaaatctttcatattttttacaatctcatccaatccatatgaaaaaattgagataggaataaccgaacaaagtctaacttgacatgtactgtatataccaccaaaatccactacaacacaagcacggcataaatggggagatcattaattaaatcgccaggaaacagcatacataattaagaaaccccaacttcacagcgtgccaggttatccagtagtaaaaacataccacaaaccgaaacggatgtaccagttccacaagagagcgggactgcgggagtaacccagggatccgacggccacgtcgacgacggactaccaaatgcgagccaggaactcaccgggagagggagaaaggaaatctcaccgtctcatatcacgccgcggacgcagattaggggaaccgacgtgggacgcggggtggggaggggagagccgggtccctcttccgattccttgataccaccgatccaacgggttccagcttgcccgcccgtccgcccgccacgctttgactgccgctactcctactcctccactccttggttggctgcagtttcgcagcagccgaaagggaaattcccctgttggatttcagtttcttagattttcttcgtcctattttgatggtgaatttctttttcctttccctcacggcgccgatggcggcggcgccagcgctcgcgcgggagctgctggacgcggcgcgggagccggagttcgcggagtggcagcgcggcgtgcggcgccggatccaccagcacccggagctggccttccaggagcaccgcaccagcgcgctcgtgcgcgccgagctcgacgcgatcggcgtcccgtacgcctggcccgtcgcgcagacgggcgtcgtggccaccatcaccggccccgccgcgggccccgtgttcgcgctccgcgccgacatggacgcgctccccatccaggaaatggtagaatgggagttcaagagcaaggaagacgggaagatgcatgcgtgcggccatgacgcccacgtggcgatgcttcttggagcagctaggttgcttcagtctcggagggacgatttaaagggtacagtgaagctcgtcttccagccagccgaggagggacacgccggcgcataccacgtcctcaaggaaggcgtcctggacaacgtgcaggccatcttcggcgtgcacgtggacacggcgttgccggtggggctcgtcgggtccaggccagggccgttcctcgccggatcggcgcggttcacggcgaccatcacggggaaaggcgggcacgcagcggggccgcagcacgtcgtcgacccgatcgtcgcggcgtcctccgccgtgctcagcctccagcagctcgtcgcccgcgagaccgacccgctacagggcgcagttgtgtcggtgaccttcatcaaaggaggaggcggagctttcaatgtcatcccagaatccgtcaccatgggcggcaccttgaggagcatgacgaacgatggcatgtcctatctcgtgaaaagaatcagagaggtgatacaaggacaagccgccgtgagccgctgcgccgctacggtggacttgatggaggagaagatgaggccgtacccggccaccgtgaacgacgaggccatgtactcccacgccaaggcggtggcggagagcatgctgggcgaggccagcgtgatgctgtgcccccagttcatggcggcggaggacttcggcttctacgcgcagcggatcccggcggccttcttcagcgtcggcgtccgcgacgaggcgacggggaaggtccaccacgtgcactcaccgcacctggacatcgacgaggccgcgctccccgtcggagccgcgttgcacgccgccgtggccatggagtacctgaacaaacacgcaccatgcaaataaacacaaggctctggccatcccgataatacatgtcattcttattgaagtgactgcatgccgcaa

SEQ ID NO: 129544 - DNA, 654 bp, Zea Mays
atgtgcgacgactgcgagtactgctgctcctgctgcaccccgtaccagcgcttcgcgtgcggcttctgcatcggcctcgtcgtcatcgccttggtcgccgtcatcgtcgtgctcatcctcggctacggccacgcggcgcagcccaggttcgaggtcgacgacgcctcgctcgcgcgcttcaccgtcgccacctcgccgtccgggggcagtgccaccgccatctcctacaacctgacgctcacgctgggcgtgcgcaaccccaactgggccatgggcgccaccttccggtccctcgaggccgactacctcttcgaggaccagcgcttcgaccgcgtcgacgtcgtctccgcgcccccctacgtcctgtccgccaggaagaccgccgtgttccgcctctccagcggcgccgacgccgtcagcgtcgtgctcgggagcgccggcgtcagggcgtacaggaggcagagcgccaagggggtgttcgacgtcgaggcgaagctctccggcgaggtcaagtaccaactgcacaccacgtggtgcaggctggaggccaagtgcccactcagtctgcagctcgggtcgccggacggtggcgccgccgtcgtcttccagaagacaacctgcgaggtgctccgatcatcgcagaagggatgctaa

SEQ ID NO: 129545 - DNA, 1385 bp, Zea Mays
agacatttcgtcgagcatcggctagacgacgcgcagcgatgccagcgtctgcgcgagcgtgtcgtcctccccgagccgcggctggtcgccttgaggacgcgtctcctcgtcagtcatccctcatctccctgggagaaggcgcgggccacgctgtggcagccttcctgtcgaccaccgcatcatggccgtcggggtggagcttccacgcagcagcggtgcacctggcctcggtcgcgacattcgcaaccgagcgctcgagccagcagaaggaccacggcctcgaagactacgacggcctcgatgtcgcacgggcagaggcagccagtccgccgccctcgatgtcggcgagctgttccagccaccgctccaagctgcagccatgaggtggtggtacatcacgcgaaaggcgctcgacgaaatgctcaagccgctgtgaagctataaaggactgttctgatcgcaatgtgcaagcgcaacaacttgagggcagagtgttggcggcagctcgctcgactcagtttgacggctgggaaggctttctgggcctgtgctgctcggcttccactcgcaattgaggcccattgggccgccgcctcagacccctttcgccaaccccttcctcctcgagccgccgtcgccagatctcccccagggacgcgctcatccttttgcctctcaactgtgctgtgcaggaacctgcggggaaggcggtcgctcgctcgctgagagaatgcctctggggctgacgctgggctcgctggggcggtcgatgcgccggaagcggctgtcctcgctcgacatcctctcctccaagcgggcgccgcgggattactacaagggcaagaactgcaagcccaccgggttccacacccgcaaaggtggatatgtgattgttgatgaaaagttgccaagatttgtggtccctgacttgactgatttcaagctgaaggcatacgtgtcacaatgcgccagggacctcacagcgtcgacagcatcctctacttcagcagaaagtactgaaagcaagagctgatctgatctttgcttgcggggaggcagcccaactctgaagttatgtttccctagactgcccatgttccgaggattagcatcagcattctagctacaaacatttcagatatctttcttgtaagggcaaacattatggcatacctagattcacttttcctgcttgtaattttgatcttcattttgaagtaataagtacttgagttaaggggacatttcttgtggaaaaaatgacgggaaatagctggacgttcctcttgtgagctacggtgtgcttctgacttcgatttagttgggtctcgtctcgtccacttcgacttctttaagatcattaagaaattttctttcagttaatt

SEQ ID NO: 129546 - DNA, 169 bp, Zea Mays
agaagccgttttgaaaatcaaataaaactgcacattgataatcgtgttgcaatggctaaggagatcaaatctactgaggatgaaggctatgattattattcctatgaagtttttagacgaaggcttttttacttcgttctaatgtggaatgccaccagcatcaagaatg

SEQ ID NO: 129547 - DNA, 97 bp, Zea Mays
tgctgtagtcatgctggccttactgagcgattcgaactttccatttgtggtcgtgagattggcaatgcattttctgagctcagacccaattgatcag

SEQ ID NO: 129548 - DNA, 1404 bp, Zea Mays
cccacgccataggccgcctcctgaaacgcctgtcccgccgccttgtcgcttctctccgctctgcttctccgccgccggccgtcgcctctctagcgccgctcgcccactccggctccgttacgcgcggggcgcaaccgcgcctgcggcctgcccagctgcccccctctccaaggtccagccgactgccgtgacgccgtccggccggcgtcgagcgcgtctccgcgccccccaccacccctctccgcgcaatcgcgcctccgcggcccccgtcctctgcctccgacgactgaacgtggtgagtggtgacgcgactggcggagtggtgattgacgcgcttgccggcgagttgcgaactggagttcagccctgcctgctattttagtctggatctgccactggtcaaggttcaagtatggcttctgtagggttggctcgggtgagtggtgtggctcgccctctcatgaggcttgtcaccatgagccgcatgccgatcctgcagcagctgcacctggaggagcagctcctgcgacgcacatcagacaactggtgtattatcaacgatggcacggcccctgctaccatcgttatgggcgtgtctgggagagtctcggagcttgtcaatatacagctggtcctccgggacaaggtgccgattgtgaggaggttcagtggaggtggcaccgtcattgttgatcagggaacggtgtttgtgactttcatttgcaacaagaatgttgttgctgggctgcagccctttccacgggacatcatgtcatggagtggtcagttatatggcaaagtttttgacagatttggtgaatttcatctacgtgagaatgactatgcatttagtcatcgaaagtttggtggaaatgctcagtcaataacaaaaaatcgttgggttcatcacacatcgtttttgtgggattatgatgtaaaaaatatggattatctcaaaatcccaaagcgtgcacctgaatatcgactggcaagaaaccacacagatttcttgtgccgcatgaaggagtacataccttcgcgatcagttttcaccgatggggtcattgctgccctgggagaacacttctcagttcagcccatggatctacaagcaattctttccggtgatgaagaatttgtgccttctacaaagctgctgtcacaacaatacctagaagaaattgtttcctccaaagaatcccttgaaattatagaaagctgaagcatgacctgatgaccatggttgtcgtttttgttgtgaaatgtgagcaattttattgtgaaatccgagcaattatcggcgagctgtgaattcattcaactttgagtccgacattatttcactgaaccacttacattgttttttaagacccagtacatttttgtggttactggttacatgcc

SEQ ID NO: 129549 - DNA, 369 bp, Zea Mays
atgtcagatgcagatgctcgtgccttgcgggacgagctgggagagcaaatttgtggcaactcttatagacgcagatctggtatcaatctatctgttatcactgatcgactgcagaaaaggattctcactggggagctgggcctgagagcctttttcatggctgcatttcagcgtctgctattctccaacactgacactcgcatcaggattgatgatgtaaagtatactcaggacatccagaacatggccaacaagaactggtgcaaagcggtagttgacaggctcagcatagttgctcgtctttataaaaaggattttgcggagaaaggcatcaacgcaaccatcagtggatgcgggatctttgtagtt

SEQ ID NO: 129550 - DNA, 334 bp, Zea Mays
atgtgacaattctgtccactttatgactttttttttcattaatctggaattcaacccccacacacaaatgtgtgttgtagcattagtgtgtattgcaactattttttgttcctctttgtactgtgtgttttagtttgttgattaacaatttttggttatgagatctgtaccatgtgcttgtgccctcacgtttttttcattcccattttttcagtgatttttataatggacaagaacataatgtcacaggccagcaaggcgctgacactgtccgtcgctctcctcgtgtacaaaacaagagaaaggaattagataaaaatgaattgaaggaaag

SEQ ID NO: 129551 - DNA, 760 bp, Zea Mays
aaagactgggtaagaaaaatatgaaacttgattataattgccttggcatttacgccatggaaattttgactaaagtgtttgcttaatcgaacaaaccaccagaatagtttgctcagttcaattggattatccatatttcattgaattattgttcaaaggagttctcgaagcttcactttgatctgtcttaagaaatcctttgaattttatgacaaacttgatgttgctgtattcagaactccccagatccaagcagtcacaggttggcaagcacatcatttgtgtcccagcttatgattcaagaacgaggtagctgaaaactgcacactctggcaacttgccaggattggaagttgaaccatcgctttctgtcaagaatcgagataagtgtagctgtgctggcgtttttacccccatccagtgcgcagttggtggccaacttcatgaatcatgagtgactcaactttttttttttgtcaaaagttgtaattagggtgtgagggtaaaatatcactttaagaccataaataagctgaaattagctagtattgggtagcttattttagcttatttgtaattctaaagtgatatttcatctttctaacatttcaccataatccagcttatataatctaggagggaaacaaacagggtctcagtaacacggctcaatggttcatgaagccccaaaaaaatactgtttttttttgcctccctttattaagcagtttcaattagaagacacaaaaagtgtcccccc

SEQ ID NO: 129552 - DNA, 3587 bp, Zea Mays
atggcgctgctggtgcgcgcgcggctgtccccgctggacgacgacgacgacgcgtccacggcgtcctcgctctcctcggcggcctcctccccgccgctctcgcccgcggccgcctccacgccgctaccgctgtacgcgcgcgccgcggtgctcgtcgccccgcggatcgccgcgcagctctcgtccacggaggaggacgtcagcgagtccttcgatgacaccaccagctccggcgaggacgtcgacctgccggaggaggtgtccaacggcttcttcttcagcgtcgccagggtgccgccgacgccgacgtccgaggacccgatcctggtccccggcggcggggtggcggggatcgccgctgcggaggcgcccgaggccgagggcggggacggcttgggcgccgcggaggagccgctggaggggggcatcttcgtgagcgccaagaatgggttggatggcgtcgagggttcgctgggtggcagcttcctcaaatctgggagctgcattggcgcgcacaacggcggggaggctgctgcgtcaggtgattcggtgatcgtttcagatggcaccgtgctgaatgaggaggatgataagcagggggagcaggctgtcaatgacgcggcgtctgggcctttactgatgcctgttgctggggtagatggcctcgtcattgtggatgctttggaggggatgcttgatcgtgaggctgctgaatcgcttcctattcccagtgctactgctactggtacagaaggagaggaggctgctgccgagcttcgcagcgatgcagtaggtagtgcagccaagcttgatgctagtcctgaatatgctgccacaggagatgtcatatctgatgccatgcaagttcttgatagtgtagatgatgaagctgatggtgatcatgaaggttccgacgatcttacatccatgccaatctcttcaagtgactatgctgtggaacttgcaaaagaactggagaacaacgtgcctacttccataggcgcacgctttgttgcggatgattcagatgatgcagagatcaacggtgatgatgaatatgaagaagagatgaatggaaaggagaacgagctttttgatcatacagctttaattgagcttctaagagctgcaagcagctcgcctgaacaaggcaaggccaaggttttcccagttgaatcttctgaacctagggatctgcctcccactttagccagcaatgctaggatgaacgtggcttctgctcctgtgccacaagcaatcgctgaccctgagaaacagatgaccgatgaggaaaagaagatttacggaaaggtggacatggcacgaatcaaatacatgcgtcttgttcatagattggggtatgatactaaccatcaggtaccagtacaagtgttgtttcggcttagtcttgttgaaagtttcaggtgcgtaaggatgacaaaccattcctcagagatcgagaatgcctggaagagggctttgcagcgtgaggcagagggaactgagaaccttgaattctcctgcaatgttttggtccttgggaagactggagttgggaaaagtgcaacaataaattccatcttcggggaagataaatccaaaacaaatgcttttctaccggcaacatcatctgtgaaggagattaatggagttgttaatggtgttaagtttcatgtcgtcgacacccctgggcttgggacttcagccgaggatgaaaaatcaaataggaaaatgctcaatgctgtgaagaagtatatgaagagatgccctccagatattattctgtatgttgataggcttgatacaccgcgggaggaggcaaatagcctatccctcttgcgatgcattaccagtgtgctaggcctgtcaatatggcccagaacaattattactctcactcactcaggagcagcttcccctgaaggccctaatggtttggaagtgaactatgatatggttgtgtctcgtcgaactcatgccattcagcaaagcatccggcagataactaatgatcctcaaattcagaatcctgtggctcttgtggagaaccatcatctgtgtcggaggaacgcagaaggtgaaaagatgcttcctgatggccttatctggaggcggctcctcctcctcctatgcttctcactaaagatgattgctgagattgacagtctctcaacccgccgtgcttcttctgcaagtttcttaggccgccttctccaagtgcctccaattccttacttcttatcatctttgttgaaatctagagagcaccctaagcgttccaatgaccataatgttgtgagtgtggactcagatttttacctagatgaattgttgaatggggaccaagaggatgaagatgactatgatcaacttcctcccttcaagccactaagtaaatcccaggttgcaaaactctccaaggagcaacagattttgtattttgatgaatctgattaccgaactaagctgcttcagaagaagcagctgaaggaacagctcaaaggatttaaggaaatgaagaagaaagagggtgatgataatgatatactttctgatgatgatcatcccgatgatggatatgatacagatagatatcctatgccagaatggaccttgccatcttcatttgattctgatgatcctgtgtaccgctatcgttgccctgtgtctacaccaaaccttctggtgcgtgctgtttacaatcctgatggatgggatcatgattttggatttgatggtgtgagtgtccaacacagccatgatgttgctaacaaatatccagcatctctgtgggttcaagttaacaaggacaagagagagtttaccatccatttggattcctcaatgtcagttaagcatggagattatgcctcgagcctggcaggctttgacatccaaacaattatgaaccagctttcttacaccctcagaggggagaccaaatttaaaaacttcaagaaaaacatcactactggtggtttatccatgacctttttgggaaattccatggtggctggagcaaagcttgaagacaagcttttagttggtaacaggttaacactatcaggcaacactggtgctgtgtccatgagaggtgatgctgcatatggagtgattatggaagcaactcttcgtgaaaaaagctatcctgtaggtcaaggcgttgccactttgggtgcatccttagtgaaatggcataaagagtggaccatggccgcaaatttggattcccatgtctctgttggaaggtcttcaaacatgtcagttcatgttgatgtaaacaacaaactaactggacgggtcagcatcaaggccaacacttcagaacagttgaacattgcccttttaggtacatgttcagtgataatgtatgtgtggaacaagatgcaccctagtgcagatcctaatgctgagtagcactggttagtatgacaattttgaattcttaacattttgtatcttttccttgttccttctgtttttctacttgttataacaactactgttgaagcttgttagtcattcctccattcagtctcttccctgtgccttccacaccaatgtttggctattgtatttcatgtata

SEQ ID NO: 129553 - DNA, 369 bp, Zea Mays
atggccgaccgccttgacgtgttgctatatctcggccccttcgtcgattcgcttaacatcagcccgcacgatagtgtccagacgcttgtcaagtttctcggttgtgtttctacgaagatccaaaattccttggaccaaaagcttcagcttccaatagtcggtgctgaagaactgactgaattatgtacaaaggttgcagacctgggcactgtgcatcttcttaagggccttgtactgcgaactctggacaaagtttcatgctgctacaaagggagttgccgagctttctcaacaatagcgatcgtggaaggcgtcaaccagattgtggatgttgaaactattctatctacttttggatctaagttatag

SEQ ID NO: 129554 - DNA, 2733 bp, Zea Mays
atggatgtggagaaacctgcttccaaggggcatggtttctttgcgctcttcgattggggaaagaagtctaagaagcgcctgttcgtcgggagcacgggcagttctccaaatctgaagaatgctgcagatgggaaggatattgatgatagtacaccaagcacacggtcaaatttgatccttgaagacaccccaagcttgaaggaaagcactgaacatagctgctcatcttcagtaattgatgaagaggctcattcaagaaggagcccgactgttgtggctaggcttatgggcttggattctatgcctgcggcaagctcaaccgaatccaatcccatgccattaaccgtgcaaccacctttccaaaccaacagccatgaagattttattggcagaagttatgttggtagtccccttaagacgccgggtagtcctattgatcggtttaaagtggaagcactgcctcctagacttgccaagaggacagtatctgttgcacagtataagttgctgtctcccatgaaaaatcctaacaatatatcaagcaggaatgcagctgatataatggaagcagcatcgaggatcatcagacctggagtagaaaatatcagtccctacagagttcatgatgttgggagtgcaattgctgcacgtgcctacaacccaggagagctcataggagcccaacaaaggtcacagaaacttaatgaagcactgagaaaatgtgatggccctgcatcttttaggccgccaagtggaaaaccttcagatggaaggttgagaggttcggagggcacctcgacgtccaggatctcacaggcaaatgtatgtgttccagttggtccaaaggtaaaatccggcgatagattagatactgctcgagctatgcatgcccaggaaaaaagaggcatgagaaaaggtggtagaaagcttgaaactctcaagaaccctgaaaataacatggctaaaagaagtgggttgaaccgacaaaaggatagtaaccaaatcggcacaacaagttcatccagtgtgctcatgccaaacagcagaaaacagaatgctacagccaccaaacataaggtgaactcgaacccagcaacccccagtagacaacggagcaatatccaccagataaatgcccatccaagaaaggtgagggtggccagcacatttgctggaaacagtagtcaaggtagcagaaaagtggacttgcagccaaatgctcatgctaacgtaagaaataattctgtacccaaagcaatcccgaagccaagaagattacaagacaggagagcgtactctgatacaagccagtcaagtgatagtattaattctgagagaagccagaggcggattcggcacaatattgtgattgatgagcagtcatctttttcaacaaacaaaaagaaagtcagcactgagattgtttcattcacatttacctcaccagttgataagtcactacatggcatccacttccccaatcattcagtatttacctcaccagttgataagtcactacatggcatccacttccccaatcattcagtggaaaaacagtttttagggaatctgaacactgtgtcaacttcaagcaatacatcaaacactaaacttgatgtcattgatggtgattttttgggactcctgttggagcagaaattgagagagttgacatctggtgtgagatcgccctacactaagacaaccaaaggtgttcaagcgcatcacacttcaacagcttgggaagatatggcatcagcatgtgaaacatctagcattgcttctactgattatgatagggagtcgttacaatctttcaatgatggaaaagctactctcccccagaccgatcttgcttctagaagtctccagtcatctcagcctgtgaagaagtacgatcacgatgtcacggatcaagcagagccgcctgagcgtctcggccgaggtccactcttcacatgggaggcttctatttcaaccgaaacctgtagctcatcagagagctggaggagtgcaaagggtaaacagagtagcttggaatttgctgtaacaggaacaagattgtttggttcagccgaaggaggcagaacctgtgactcgacgcgctcgagcaagttcctagaagcggacgcctcgtcagagtattccgacacagcctcatcgatcacggtggctacgacagagatccctcgatcagaaagcaacagttcatgtcatatggatggtagacaggatctgcagtttataagagagatactgaaagccagctctcctgcccggcacatcttctcttatctggagcggttcggcgattcaggtgttctggatgcgcacgtattggaggaactaaacggggatattaggctgttgggtggtgaagagcgcaagggttacaggctgaggcggaggctgctcttcgactgtgtcaatgaatcgttgagcgcgagatgcgcttactacttcaacggtggctacggcctgtggttcacgggaacggcggtcctgcagagcttgtcggcagaagggatccaccgagagatgaccggcctgcaggtcggcgaggagtggatggtggacgagctcgtgtacagggagatgagtggtcctctggggagctgggtcgacttcaaggtggagtcgtaccaaggcggcggagacatggcggcagagctgctaggctccttgatcgacgaagtggtcgctgatcttctgaccaccggctcgttctcgtag

SEQ ID NO: 129555 - DNA, 2235 bp, Zea Mays
cgcaaaaccctagcccagcgccacctacccgtccctctcgccgccgccgacatggcaggctcatccggcggcgcagcctcctcttcctcctcccgtggcgtgccggagaacaggttctataatcctccccacgtacgacgccaacagcagcagcaggggcaacggccgttgcggcccgcatcaccgtcgccctcgccgcggccggtgcggcagaagccccctccgccggcggcggccgttgccgcgtcggcggatgtggacatccgggtggattccgacgactcttcgtcgacgacctcgtccaagccatcggtggcgtccaccgcggctactgcagcagcgggtgaggatatcgcttcgtagaggtatctgccgtggtcgataggaaagggatccgatggagaggattgtagtctctgtgccatttctactgcatttgcagagccaaacagatgagtcgacagaaacactgcactgtagattagataaatgatgaatcgtgaagtaatcgtttagctctggttgacggttatttatcgaaagccccacaatcttcctttgatatcaaacgacgattgacataatggcatatgtaatgtgtgtatgcatatctgtcgttgtctctggattatgcatttgtgtgaagcgatctctggcaaataaataaactgcaatttggatgatgctgtttgtttctgtatccgtgtgtagtaataaagtttgtgctactacattcttcatccgttacaattttcgattctttggttgaaataccactcccgtttaaggaactgttttgtttttctgctgctgactagcttcaaatattttccactgcagtcaagcctaaggatgcggcgaggtggtgatgctatggattcacgaccttatttctgcctgggagatctttgggaatcattcagggaatggagtgcttatggggccggtgttccacttgtgctaaatggcagtgactctgtgattcagtattatgtgccatatctttctgctatccaactatttgcagatccatcaagacctgcttcaagaaacaggcgtcctggggatgaaagtgatggggactctatggatactagcagtgagagcagcattgagaatgacgttgagcggctaagagtctcatcatcactggaaggtaaacatcgactggaaaatggtggcatacgaagtgatgatggtgaaggcgatgcatcttcaagttttccaatatttcagtatatggagagggatcctccatatggtagagagcctctgacagacaaggtatcaactcttgcacacagatttccagctctgaagacattcaaaagctgtgatcttctgccatcgagctggatgtctgttgcatggtaccccatttatagaattccaacagggccaacattgaaggatctcgatgcctgttttttgacattccattgcctagcaacaccttgcaaggattgtgaccctcctacgccagcatgccctggctttgggggaattaaccgcggcacgactgcagctgggaaactatctttgcctatctttgggctggcaccttacaaattacgtgcctccatttggacatctgacaaaactcaagaacgggacctcgtcacctctctgatgcaggaggctgacagctggctccgcagaatacaagtagaccatccggatttccggtttttcgtatcccatttcagtacaacgtggagatgacccgtggctgtaaatggttcatttagtatgaatatggcatagagacacctgagtgcccttttgtaacgggggggaatgtatgagttataagcctgcgtgcataactttttctcttgtctccagtaagctgtatcttttgtaggtttgttttgttgtggggtgaaagtaaagatggatggtggaaaaagcaaaattggaggcattgtggaactgaagtgaaatatggggaaaaaagaataaagatttccagttattagagttgagaaaggtccagtgtttcatgtttaggttacctgagctgcccgtgtgtttggtccatcactcatcggttctacaataaatagaggaaatacaccagaagtacagatactgatcttcgaagtgcagatgttggtcctcttcgttttaacagtgggtttcttcaggtagttttttttaaatagagcgtttaggccttattcaatctgactgttgcaatacaattaggcaaaatcttattcaatctgagagcaa

SEQ ID NO: 129556 - DNA, 2002 bp, Zea Mays
caaccgaacaaacaggccagcgctctgtaccggcgtttctcctcctgtctcctccccgctcgcgctgtcgcttcgccgcttcagatccaaacccgcgtattaaaaagcgctccaagcgaccaaaaccctaaccctaatcaccgcaattccccaatcatcggccccgcgcaaaaccctagcccagcgccacctacccgtccctctcgccgccgccgacatggcaggctcatccggcggcgcagcctcctcttcctcctcccgtggcgtgccggagaacaggttctataatcctccccacgtacgacgccaacagcagcagcaggggcaacggccgttgcggcccgcatcaccgtcgccctcgccgcggccggtgcggcagaagccccctccgccggcggcggccgttgccgcgtcggcggatgtggacatccgggtggattccgacgactcttcgtcgacgacctcgtccaagccatcggtggcgtccaccgcggctactgcagcagcgggtgaggtgaatgtggccgtggcggaggcggaggctgggaatttggagaggttcctcgcctccacgacgccctctgtgaccgctcagttcttgcccatgtcaagcctaaggatgcggcgaggtggtgatgctatggattcacgaccttatttctgcctgggagatctttgggaatcattcagggaatggagtgcttatggggccggtgttccacttgtgctaaatggcagtgactctgtgattcagtattatgtgccatatctttctgctatccaactatttgcagatccatcaagacctgcttcaagaaacaggcgtcctggggatgaaagtgatggggactctatggatactagcagtgagagcagcattgagaatgacgttgagcggctaagagtctcatcatcactggaaggtaaacatcgactggaaaatggtggcatacgaagtgatgatggtgaaggcgatgcatcttcaagttttccaatatttcagtatatggagagggatcctccatatggtagagagcctctgacagacaaggtatcaactcttgcacacagatttccagctctgaagacattcaaaagctgtgatcttctgccatcgagctggatgtctgttgcatggtaccccatttatagaattccaacagggccaacattgaaggatctcgatgcctgttttttgacattccattgcctagcaacaccttgcaaggattgtgaccctcctacgccagcatgccctggctttgggggaattaaccgcggcacgactgcagctgggaaactatctttgcctatctttgggctggcaccttacaaattacgtgcctccatttggacatctgacaaaactcaagaacgggacctcgtcacctctctgatgcaggaggctgacagctggctccgcagaatacaagtagaccatccggatttccggtttttcgtatcccatttcagtacaacgtggagatgacccgtggctgtaaatggttcatttagtatgaatatggcatagagacacctgagtgcccttttgtaacgggggggaatgtatgagttataagcctgcgtgcataactttttctcttgtctccagtaagctgtatcttttgtaggtttgttttgttgtggggtgaaagtaaagatggatggtggaaaaagcaaaattggaggcattgtggaactgaagtgaaatatggggaaaaaagaataaagatttccagttattagagttgagaaaggtccagtgtttcatgtttaggttacctgagctgcccgtgtgtttggtccatcactcatcggttctacaataaatagaggaaatacaccagaagtacagatactgatcttcgaagtgcagatgttggtcctcttcgttttaacagtgggtttcttcaggtagttttttttaaatagagcgtttaggccttattcaatctgactgttgcaatacaattaggcaaaatcttattcaatctgagagcaa

SEQ ID NO: 129557 - DNA, 2024 bp, Zea Mays
caaccgaacaaacaggccagcgctctgtaccggcgtttctcctcctgtctcctccccgctcgcgctgtcgcttcgccgcttcagatccaaacccgcgtattaaaaagcgctccaagcgaccaaaaccctaaccctaatcaccgcaattccccaatcatcggccccgcgcaaaaccctagcccagcgccacctacccgtccctctcgccgccgccgacatggcaggctcatccggcggcgcagcctcctcttcctcctcccgtggcgtgccggagaacaggttctataatcctccccacgtacgacgccaacagcagcagcaggggcaacggccgttgcggcccgcatcaccgtcgccctcgccgcggccggtgcggcagaagccccctccgccggcggcggccgttgccgcgtcggcggatgtggacatccgggtggattccgacgactcttcgtcgacgacctcgtccaagccatcggtggcgtccaccgcggctactgcagcagcgggtgaggtgaatgtggccgtggcggaggcggaggctgggaatttggagaggttcctcgcctccacgacgccctctgtgaccgctcagttcttgcccatgtcaagcctaaggatgcggcgaggtggtgatgctatggattcacgaccttatttctgcctgggagatctttgggaatcattcagggaatggagtgcttatggggccggtgttccacttgtgctaaatggcagtgactctgtgattcagtattatgtgccatatctttctgctatccaactatttgcagatccatcaagacctgcttcaagaaacagttatttttctcgcttacttaaggcgtcctggggatgaaagtgatggggactctatggatactagcagtgagagcagcattgagaatgacgttgagcggctaagagtctcatcatcactggaaggtaaacatcgactggaaaatggtggcatacgaagtgatgatggtgaaggcgatgcatcttcaagttttccaatatttcagtatatggagagggatcctccatatggtagagagcctctgacagacaaggtatcaactcttgcacacagatttccagctctgaagacattcaaaagctgtgatcttctgccatcgagctggatgtctgttgcatggtaccccatttatagaattccaacagggccaacattgaaggatctcgatgcctgttttttgacattccattgcctagcaacaccttgcaaggattgtgaccctcctacgccagcatgccctggctttgggggaattaaccgcggcacgactgcagctgggaaactatctttgcctatctttgggctggcaccttacaaattacgtgcctccatttggacatctgacaaaactcaagaacgggacctcgtcacctctctgatgcaggaggctgacagctggctccgcagaatacaagtagaccatccggatttccggtttttcgtatcccatttcagtacaacgtggagatgacccgtggctgtaaatggttcatttagtatgaatatggcatagagacacctgagtgcccttttgtaacgggggggaatgtatgagttataagcctgcgtgcataactttttctcttgtctccagtaagctgtatcttttgtaggtttgttttgttgtggggtgaaagtaaagatggatggtggaaaaagcaaaattggaggcattgtggaactgaagtgaaatatggggaaaaaagaataaagatttccagttattagagttgagaaaggtccagtgtttcatgtttaggttacctgagctgcccgtgtgtttggtccatcactcatcggttctacaataaatagaggaaatacaccagaagtacagatactgatcttcgaagtgcagatgttggtcctcttcgttttaacagtgggtttcttcaggtagttttttttaaatagagcgtttaggccttattcaatctgactgttgcaatacaattaggcaaaatcttattcaatctgagagcaa

SEQ ID NO: 129558 - DNA, 1910 bp, Zea Mays
caaccgaacaaacaggccagcgctctgtaccggcgtttctcctcctgtctcctccccgctcgcgctgtcgcttcgccgcttcagatccaaacccgcgtattaaaaagcgctccaagcgaccaaaaccctaaccctaatcaccgcaattccccaatcatcggccccgcgcaaaaccctagcccagcgccacctacccgtccctctcgccgccgccgacatggcaggctcatccggcggcgcagcctcctcttcctcctcccgtggcgtgccggagaacaggttctataatcctccccacgtacgacgccaacagcagcagcaggggcaacggccgttgcggcccgcatcaccgtcgccctcgccgcggccggtgcggcagaagccccctccgccggcggcggccgttgccgcgtcggcggatgtggacatccgggtggattccgacgactcttcgtcgacgacctcgtccaagccatcggtggcgtccaccgcggctactgcagcagcgggtgaggtgaatgtggccgtggcggaggcggaggctgggaatttggagaggttcctcgcctccacgacgccctctgtgaccgctcagttcttgcccatgtcaagcctaaggatgcggcgaggtggtgatgctatggattcacgaccttatttctgcctgggagatctttgggaatcattcagggaatggagtgcttatggggccggtgttccacttgtgctaaatggcagtgactctgtgattcagtattatgtgccatatctttctgctatccaactatttgcagatccatcaagacctgcttcaagaaacaggcgtcctggggatgaaagtgatggggactctatggatactagcagtgagagcagcattgagaatgacgttgagcggctaagagtctcatcatcactggaaggtaaacatcgactggaaaatggtggcatacgaagtgatgatggtgaaggcgatgcatcttcaagttttccaatatttcagtatatggagagggatcctccatatggtagagagcctctgacagacaaggtatcaactcttgcacacagatttccagctctgaagacattcaaaagctgtgatcttctgccatcgagctggatgtctgttgcatgattgtgaccctcctacgccagcatgccctggctttgggggaattaaccgcggcacgactgcagctgggaaactatctttgcctatctttgggctggcaccttacaaattacgtgcctccatttggacatctgacaaaactcaagaacgggacctcgtcacctctctgatgcaggaggctgacagctggctccgcagaatacaagtagaccatccggatttccggtttttcgtatcccatttcagtacaacgtggagatgacccgtggctgtaaatggttcatttagtatgaatatggcatagagacacctgagtgcccttttgtaacgggggggaatgtatgagttataagcctgcgtgcataactttttctcttgtctccagtaagctgtatcttttgtaggtttgttttgttgtggggtgaaagtaaagatggatggtggaaaaagcaaaattggaggcattgtggaactgaagtgaaatatggggaaaaaagaataaagatttccagttattagagttgagaaaggtccagtgtttcatgtttaggttacctgagctgcccgtgtgtttggtccatcactcatcggttctacaataaatagaggaaatacaccagaagtacagatactgatcttcgaagtgcagatgttggtcctcttcgttttaacagtgggtttcttcaggtagttttttttaaatagagcgtttaggccttattcaatctgactgttgcaatacaattaggcaaaatcttattcaatctgagagcaa

SEQ ID NO: 129559 - DNA, 1972 bp, Zea Mays
ccaaacccgcgtattaaaaagcgctccaagcgaccaaaaccctaaccctaatcaccgcaattccccaatcatcggccccgcgcaaaaccctagcccagcgccacctacccgtccctctcgccgccgccgacatggcaggctcatccggcggcgcagcctcctcttcctcctcccgtggcgtgccggagaacaggttctataatcctccccacgtacgacgccaacagcagcagcaggggcaacggccgttgcggcccgcatcaccgtcgccctcgccgcggccggtgcggcagaagccccctccgccggcggcggccgttgccgcgtcggcggatgtggacatccgggtggattccgacgactcttcgtcgacgacctcgtccaagccatcggtggcgtccaccgcggctactgcagcagcgggatatcgcttcgtagaggtatctgccgtggtcgataggaaagggatccgatggagaggattgtagtctctgtgccatttctactgcatttgcagagccaaacagatgagtcgacagaaacactgcactgtagattagataaatgatgaatcgtgaagtaatcgtttagctctggttgacggttatttatcgaaagccccacaatcttcctttgatatcaaacgacgattgacataatggcatatgtaatgtgtgtatgcatatctgtcgttgtctctggattatgcatttgtgtgaagcgatctctggcaaataaataaactgcaatttggatgatgctgtttgtttctgtatccgtgtgtagtaataaagtttgtgctactacattcttcatccgttacaattttcgattctttggttgaaataccactcccgtttaaggaactgttttgtttttctgctgctgactagcttcaaatattttccactgcagtcaagcctaaggatgcggcgaggtggtgatgctatggattcacgaccttatttctgcctgggagatctttgggaatcattcagggaatggagtgcttatggggccggtgttccacttgtgctaaatggcagtgactctgtgattcagtattatgtgccatatctttctgctatccaactatttgcagatccatcaagacctgcttcaagaaacaggcgtcctggggatgaaagtgatggggactctatggatactagcagtgagagcagcattgagaatgacgttgagcggctaagagtctcatcatcactggaaggtaaacatcgactggaaaatggtggcatacgaagtgatgatggtgaaggcgatgcatcttcaagttttccaatatttcagtatatggagagggatcctccatatggtagagagcctctgacagacaaggtatcaactcttgcacacagatttccagctctgaagacattcaaaagctgtgatcttctgccatcgagctggatgtctgttgcatgattgtgaccctcctacgccagcatgccctggctttgggggaattaaccgcggcacgactgcagctgggaaactatctttgcctatctttgggctggcaccttacaaattacgtgcctccatttggacatctgacaaaactcaagaacgggacctcgtcacctctctgatgcaggaggctgacagctggctccgcagaatacaagtagaccatccggatttccggtttttcgtatcccatttcagtacaacgtggagatgacccgtggctgtaaatggttcatttagtatgaatatggcatagagacacctgagtgcccttttgtaacgggggggaatgtatgagttataagcctgcgtgcataactttttctcttgtctccagtaagctgtatcttttgtaggtttgttttgttgtggggtgaaagtaaagatggatggtggaaaaagcaaaattggaggcattgtggaactgaagtgaaatatggggaaaaaagaataaagatttccagttattagagttgagaaa

SEQ ID NO: 129560 - DNA, 827 bp, Zea Mays
caaccgaacaaacaggccagcgctctgtaccggcgtttctcctcctgtctcctccccgctcgcgctgtcgcttcgccgcttcagatccaaacccgcgtattaaaaagcgctccaagcgaccaaaaccctaaccctaatcaccgcaattccccaatcatcggccccgcgcaaaaccctagcccagcgccacctacccgtccctctcgccgccgccgacatggcaggctcatccggcggcgcagcctcctcttcctcctcccgtggcgtgccggagaacaggttctataatcctccccacgtacgacgccaacagcagcagcaggggcaacggccgttgcggcccgcatcaccgtcgccctcgccgcggccggtgcggcagaagccccctccgccggcggcggccgttgccgcgtcggcggatgtggacatccgggtggattccgacgactcttcgtcgacgacctcgtccaagccatcggtggcgtccaccgcggctactgcagcagcgggtgaggtgaatgtggccgtggcggaggcggaggctgggaatttggagaggttcctcgcctccacgacgccctctgtgaccgctcagttcttgcccatggtattttccggcttgctctttgatgctccagtttggactgatgtgtttttgtaggatatcgcttcgtagaggtatctgccgtggtcgataggaaagggatccgatggagaggattgtagtctctgtgccatttctactgcatttgcagagccaaacagatgagtcgacagaaacactgcactgtagattagataaatgatgaatcgtgaagtaatcgttt

SEQ ID NO: 129561 - DNA, 195 bp, Zea Mays
atggtgaaaaggaacttcagcagaagttgctgcagtcaggcgctctttagtgctgatagcacctcgaatgaaaagcagcaagcacttggttcttttgtcacacaccaatgcaaaagaaggctgcatgagcctcgccctagccttgtgaataagaatgtcttcttgtttgtacccaccaaacttcagaaatgctga

SEQ ID NO: 129562 - DNA, 726 bp, Zea Mays
cttgccgattcaaattccaaggagatgaagaggaagacaaaggagtggaatgacgtaatcaagccagacataatgctaataacgaagctgtcccaattagacggcacactgagcttgcacagtcagggcgcctgtccacgccgaccccaacctcggatatccatgggagggcacagacgcatagtccagaccgaccccgacctcggcgttccatggaagggcgtggtccactctgttgagctcctcgtccttgcagaggcgtacgcgcaggccgaggagctctccgtcgagcgcgagcatctcatcgccgagctccagttcctgcaaagcgctagccgcgagcgcggggagatctcccaggcctgcctccagcagcttctattttcctgctgcagctcttctaaatgtgagaacaaaaaagcgcagaaccttctcgtcggcgatgggggaactagatgtctttctgatcataagtgggatggtgcgaactatctggagcccaaacagatcagcaggatacattttagtggttcttgccttcttgacaccatggtgaagctaacaatgatagctcgtgtcaccgatggacgtccactagcagaagggggctgccaacataagttggatccaaattataatgctatgaagactctacaaactttactttttaaggaatattgggcgaagtctcttcaatacacgatccaagggctcatggcgccttag

SEQ ID NO: 129563 - DNA, 531 bp, Zea Mays
atggccgctcatcccgtcgccgcgcccaccgctcccccaccgccatgcccccgcctgcctgtgcccccgcgacatcccagccccaaatcgcgtctgcccctcgcatcctccacctccatcccctccccgagccattctctcgaccgtgatagccaacagcgacgacgcgagcacgacccacctccactgcctccgcctcgccccagacgtatgatcctctccccgccctcgcaaccgcccccgtggccccacccctcactccgtgagaccaacacccgcagcgcttgccaccgcccaaccatggagataaggcagtacgccacgaccagctgctccaaggagcatcagaagatttccgctcttggacgcatgtctgattttgtccccctactctgtttccttcgatccccaatccccttcccagcttcagaggaaccacgggttaagaagttttttgtccagcacatcgagattgtacaccattctaaagttattgtcttattgaagatgccttacaatctcttttggtaa

SEQ ID NO: 129564 - DNA, 810 bp, Zea Mays
gcagagcgagggcgtccaccaccaaccgtgcccccgcccggccccgcgcatcccgctaaacatgcccccgccagccggccgcgctcttcgctgctctcaccgtagatcccgtccgcgccaatgctctctcctcgccaacgccgctcgatcgctccgcgctctcccttgctcacgccctctacatggaaggcaagccggcaccggagccccgctcttccctgctctcgcgctctacatggaaggcaagccggcgcccaaatcgctgctcgcccgccctctacatggaaggcaagccggcgcccaaatcgctgctcgcccgccctctacatggaaggcaagctggcacccaaatcactgctcgcggacgggatctgcgtgctctctcctcgccaacgctgctcgatccgctccgcgctccccctgctcccgccctctacatggaagatggagtcggtgctgctcaagatccgcctgcacagcgacggctgcgccgaccgcatcaggcgacgcatcggcaagatcgaaggtgagcggaaattctgttgggtcgttgtgtgtccctctcacatgtacaagaactcgcaccctgtttttttcttttccgttgtacgtatgtaattccgctgcgctgcgcggcttcagaacggacgattttgggtttggtggtcttagcaggcgtcaaggatgtggtgctggaggccaatgccaaggacgaggtggaggtcacgggcaccatggacataccgaacatggtctcctacctcacaacagggtccaagctcttggcacatgatatacgggatggactta

SEQ ID NO: 129565 - DNA, 661 bp, Zea Mays
gcagagcgagggcgtccaccaccaaccgtgcccccgcccggccccgcgcatcccgctaaacatgcccccgccagccggccgcgctcttcgctgctctcaccgtagatcccgtccgcgccaatgctctctcctcgccaacgccgctcgatcgctccgcgctctcccttgctcacgccctctacatggaaggcaagccggcaccggagccccgctcttccctgctctcgcgctctacatggaaggcaagccggcgcccaaatcgctgctcgcccgccctctacatggaaggcaagccggcgcccaaatcgctgctcgcccgccctctacatggaaggcaagctggcacccaaatcactgctcgcggacgggatctgcgtgctctctcctcgccaacgctgctcgatccgctccgcgctccccctgctcccgccctctacatggaagatggagtcggtgctgctcaagatccgcctgcacagcgacggctgcgccgaccgcatcaggcgacgcatcggcaagatcgaaggcgtcaaggatgtggtgctggaggccaatgccaaggacgaggtggaggtcacgggcaccatggacataccgaacatggtctcctacctcacaacagggtccaagctcttggcacatgatatacgggatggactta

SEQ ID NO: 129566 - DNA, 77 bp, Zea Mays
tgtcgtccatatcagatttgtgcaaaaagcaaatccacctctgaagaccaaaataataaggagaagacaaatggacc

SEQ ID NO: 129567 - DNA, 772 bp, Zea Mays
atgcaggagcctggcgtcgcagagaaggagttctcgccggccaacgccaggtacctaatgaagcggatcctctgcaaccgcttcaccttctcggcggccggcggcgagaatccggcgccggaggacgccgccgaggaggaggcgctgccgccgtggctgacggaggaggacgtgggccacttcgcgtcggagttcgagcggacgggcttcacggggcccatcaactactaccgcaacatggaccgcaactgggagctggcggcgccgtgggcggacgccaaggtgcgggtgccaaccaggttcatcgtcggcgacggcgacctcacctaccagcacccgggcatccaggactacatccacaagggcgggttcgaggctgacgtcccgggactcgagagcgtcgtcgtcatccccggcgccggccacttcgtccagcaggagaaggccgacaaggtcagccagcacatctacgacttcatctccaagttctgatacacgtgcatggatcgaccatcagcttgcttgcttacctgctaaaacctgtaatctcaacctcgatatccgtgttgccaacttgttttgtttttcgaactaacagtaataagtgttcgcatatatgtttggtttaatttgtgacttagacatggtatgttccatgcctgaaatggataaaccatgtgttccgcactttaaatgtacaatgcttgtaccagtgaccgtgtactgttgtcggacgatcaacagtggcatactagcatctatgtcgaaaact

SEQ ID NO: 129568 - DNA, 171 bp, Zea Mays
atcgcgtggtacctgtgcctgttccggccggaccgggtggcggctctcgtcaacaccagcgtcgccttcatgcggcacatcttcatccgcgccggcgccgccgccgtcacgcccaccgactacttccaccgcacctgcggacccacctactacatctgtcgcttccaggtc

SEQ ID NO: 129569 - DNA, 2232 bp, Zea Mays
cgccggctggttgactcgcgtcgcgtcatgtgcgcgtctctcgtctcgttgggattatattccccatccgcaccgcttgccaatcacccgataataagtagcaggggcagggagaacgaagacgacgacgacgtacgccacccgtaagtgagccgagagccctcgagataccatcagctagctagataaccagccagcgcgagcatggaggcggcggcggcggcggtcctgcaccggacggtggaggcgaacggcatctcgatgcacgtggcggagtccggccccgacggcgacggcgcgcccgcggtggtgttcctgcacggcttcccggagctctggtactcgtggcgccaccagatggcgcacctggccgcgcggggctaccgctgcgtggcgccggacctccgcggctacggcggcaccgccgcgccgcccgacgtcgcgtcctactccgccttccacgtcgtcggcgacgtcgtcgccctgctcgacgcgctcggcatccacaacaagatgtttgcattgcatggcgaagcaggtgttcgtggtgggtcacgactggggcgccatcatcgcgtggtacctctgcctgttccggccggaccgggtggcggcgcttgtcaacaccagcgccgccgccgtcacgcccatcgactacttccaccgcacctacgggcccacctactacatctgccgcttccaggagcctggtgtcgcagagaaggagttctcgccggccaacgccgggtacctgatgaagcggatcctgtgcaaccgcttcacctcctcggcggccggcgacgacaagcgaccgccggcggacgccgccgaggaggagccgctgccgccgtggctgacggaggaggacgtgggccacttcgcgtcggagttcgagcggacgggcttcacggggcccatcaactactaccgcaacatggaccgcaactgggagctggcggcgccgtgggcggacgccaaggtgcgggtgcccaccaggttcatcgtcggcgacggcgacctcacctaccactacccgggcatccaggactacatccacaagggcgggttcgaggccgacgtcccggggctcgagagcgtcgtcgtcatccccggcgccggccacttcgtccagcaggagaaggccgacgaggtcagccagcacatctacgacttcatctccaagttctgatacatgtgcatggatcgaccatcagcttgcttgcttacctgctaaagcctgtaatctcaacctcgatatccgtgctgccaacttgttttgtttttcgaactaagagtaataagtgttcgcatatatgtctggtttaatttgtgacttggacatggtatgttcgatgtgaaatggataaaccatgcgtttcgtaatttaaatgtacaatgcttgtaccggtgaccgtgtactgttgtcggacgatcaacagtggcatactggcatctatgttggaaactataccatgtccaatagctaccagaagcctaggcccgacgtgcctttcggttgagccagatcacgtacgagcgtctataaaaacaccctagacccctaggaattaaggtttcgaggcctcatagcggctgcaactgcgtgaggtgctagaggaggcgagcggcgaccggacgtcgatgacgacttcctgcaggctgcgacgcgagacgcgagcggcattgtgagacgcgagaggcattcccaggcaacgtcggcccaagacgatgtcgtcgagtggcggcccaagacgtgagcgttgtggcggccgtgacgaccataagcgcgagcagcgatgaccgcgtctgccgaggcacgagcggttggggcgatcgcgatctcccgaggcgcgatctgcggcggtggtgatgacctttcaaggcgcgagcggtgatggttgcgttgaccgtctgtggtgtcatccaaagacaacgatctcctcgggtgtggcgcatcggagggcgtcctccttcgacgaccaccttctacccgatggcctctgaggcatcctttgatgtagcggtctcgggatcattctccagcggcgaactatccgatccatgtttatgtcatcgatgattatgttttatacccgctacttacaatatttatgcattccagtgataatttttacgatgatgaagtatgatttttatgtatgcgatttttttatcaattacgctacatagtgtatgtatttatgcaactttatataagaatttatgctctgc

SEQ ID NO: 129570 - DNA, 1481 bp, Zea Mays
cgccggctggttgactcgcgtcgcgtcatgtgcgcgtctctcgtctcgttgggattatattccccatccgcaccgcttgccaatcacccgataataagtagcaggggcagggagaacgaagacgacgacgacgtacgccacccgtaagtgagccgagagccctcgagataccatcagctagctagataaccagccagcgcgagcatggaggcggcggcggcggcggtcctgcaccggacggtggaggcgaacggcatctcgatgcacgtggcggagtccggccccgacggcgacggcgcgcccgcggtggtgttcctgcacggcttcccggagctctggtactcgtggcgccaccagatggcgcacctggccgcgcggggctaccgctgcgtggcgccggacctccgcggctacggcggcaccgccgcgccgcccgacgtcgcgtcctactccgccttccacgtcgtcggcgacgtcgtcgccctgctcgacgcgctcggcatccacaacaaggtgttcgtggtgggtcacgactggggcgccatcatcgcgtggtacctctgcctgttccggccggaccgggtggcggcgcttgtcaacaccagcgtcgccttcatgcgccacatcttcgtccgcgccgccgccgccgccgtcacgcccatcgactacttccaccgcacctacgggcccacctactacatctgccgcttccaggagcctggtgtcgcagagaaggagttctcgccggccaacgccgggtacctgatgaagcggatcctgtgcaaccgcttcacctcctcggcggccggcgacgacaagcgaccgccggcggacgccgccgaggaggagccgctgccgccgtggctgacggaggaggacgtgggccacttcgcgtcggagttcgagcggacgggcttcacggggcccatcaactactaccgcaacatggaccgcaactgggagctggcggcgccgtgggcggacgccaaggtgcgggtgcccaccaggttcatcgtcggcgacggcgacctcacctaccactacccgggcatccaggactacatccacaagggcgggttcgaggccgacgtcccggggctcgagagcgtcgtcgtcatccccggcgccggccacttcgtccagcaggagaaggccgacgaggtcagccagcacatctacgacttcatctccaagttctgatacatgtgcatggatcgaccatcagcttgcttgcttacctgctaaagcctgtaatctcaacctcgatatccgtgctgccaacttgttttgtttttcgaactaagagtaataagtgttcgcatatatgtctggtttaatttgtgacttggacatggtatgttcgatgtgaaatggataaaccatgcgtttcgtaatttaaatgtacaatgcttgtaccggtgaccgtgtactgttgtcggacgatcaacagtggcatactggcatctatgttggaaactata

SEQ ID NO: 129571 - DNA, 1271 bp, Zea Mays
ccacccgtaagtgagccgagagccctcgagataccatcagctagctagataaccagccagcgcgagcatggaggcggcggcggcggcggtcctgcaccggacggtggaggcgaacggcatctcgatgcacgtggcggagtccggccccgacggcgacggcgcgcccgcggtggtgttcctgcacggcttcccggagctctggtactcgtggcgccaccagatggcgcacctggccgcgcggggctaccgctgcgtggcgccggacctccgcggctacggcggcaccgccgcgccgcccgacgtcgcgtcctactccgccttccacgtcgtcggcgacgtcgtcgccctgctcgacgcgctcggcatccacaacaagatgtttgcattgcatggcgaagcaggtgttcgtggtgggtcacgactggggcgccatcatcgcgtggtacctctgcctgttccggccggaccgggtggcggcgcttgtcaacaccagcgccgccgccgtcacgcccatcgactacttccaccgcacctacgggcccacctactacatctgccgcttccaggagcctggtgtcgcagagaaggagttctcgccggccaacgccgggtacctgatgaagcggatcctgtgcaaccgcttcacctcctcggcggccggcgacgacaagcgaccgccggcggacgccgccgaggaggagccgctgccgccgtggctgacggaggaggacgtgggccacttcgcgtcggagttcgagcggacgggcttcacggggcccatcaactactaccgcaacatggaccgcaactgggagctggcggcgccgtgggcggacgccaaggtgcgggtgcccaccaggttcatcgtcggcgacggcgacctcacctaccactacccgggcatccaggactacatccacaagggcgggttcgaggccgacgtcccggggctcgagagcgtcgtcgtcatccccggcgccggccacttcgtccagcaggagaaggccgacgaggtcagccagcacatctacgacttcatctccaagttctgatacatgtgcatggatcgaccatcagcttgcttgcttacctgctaaagcctgtaatctcaacctcgatatccgtgctgccaacttgttttgtttttcgaactaagagtaataagtgttcgcatatatgtctggtttaatttgtgacttggacatggtatgttcgatgtgaaatggataaaccatgcgtttcgtaatttaaatgtacaatgcttgtaccgg

SEQ ID NO: 129572 - DNA, 955 bp, Zea Mays
gactcgcgtcgcgtcatgtgcgcgtctctcgtctcgttgggattatattccccatccgcaccgcttgccaatcacccgataataagtagcaggggcagggagaacgaagacgacgacgacgtacgccacccgtaagtgagccgagagccctcgagataccatcagctagctagataaccagccagcgcgagcatggaggcggcggcggcggcggtcctgcaccggacggtggaggcgaacggcatctcgatgcacgtggcggagtccggccccgacggcgacggcgcgcccgcggtggtgttcctgcacggcttcccggagctctggtactcgtggcgccaccagatggcgcacctggccgcgcggggctaccgctgcgtggcgccggacctccgcggctacggcggcaccgccgcgccgcccgacgtcgcgtcctactccgccttccacgtcgtcggcgacgtcgtcgccctgctcgacgcgctcggcatccacaacaaggtccttccttttccgtatcaacgttgacttcttcaattcctctcgtgtgtactactgctataagcctataacacacttcgtactcatccatcctctgtgaagtgtgtgaacatatatacaaacgcctctacttctataattttttttaattttgaaaactaactaaaacaataattctaaaactgataaaaatcatctactcatcttaaaactaataataagccaataatatggaattcttcgcatccgtgtttcttcgaaattaaatttgatttttttattaattacgatctcccgtacgtacgtattgtttgctatccagccttttgttccgaggttaaagtaacaagctaattaagttaaagttaaactaagttcattttactgtaatctggtgagtctaatcagtacaccaagctagttaataggctgtttggtttgagaaatgagttag

SEQ ID NO: 129573 - DNA, 830 bp, Zea Mays
taaaactcgcgctccaggcaagtgggctgctgctgctgctgagagggggaggcgggggcacccggacggtctacactaatgccttaatagttagtagagatttacagagtatgatgtacttgagggaaagcattggatcagcattaaatggccctcgattgtatttgcttggataacctttctattcacatctgattcttatctgctcattgcaacggtcttggactcttggggattattttatagttttatgaatattaaagtcatagataaaagtagcgtcaaatgtagagttacggagaaatgttgtgtttgtgattcagctatgtttttaaatactaaacatgtttttacatgctttgtttatggtgcaggccatggcggcacttgcttcatccaaggaggctgactggaacgcgatgaggctgagggagaaagaattggctgctgtgaagatcaaccctgcggatgtcgaaattatcgctagtgagcttgagctggacaagaagatcgcggagagaacgctccgtgagcacaagggtgatgccgtggctgcggttcgattcctgctgcgctagttccgagatttcgtcgccagcatcatatgttccccttcagttccacacaagaggtgatgatgtgaagtgaagcactagtacttttgtgtgcctgttttggaagtttgctattagaactatgttgcagaaaatttaagaatgagaataccatgcaaaaggtgtaatatgatttgtattagttatttgctattagaactaattaatcattatataaaattaaatactagacgaaatactaaaatttgatactat

SEQ ID NO: 129574 - DNA, 694 bp, Zea Mays
gcctgtggcacagtgcacacactcgtctcatcggagaaaagtagatccggattagggttttagacggcgatgggtgcggcgggcgacgagaaggctgcggtggctgcggccgctgcggccgcgggggccggtgccgccgagggcgagggcgcggtggactccaaggaccttcagcagcagagcaaggcgctcgacaagctcactgatcatgtcgaggaccggcagctcgattcatcccgtgtccaatccgccatggcggcacttgcttcatccaaggaggctgactggaacgcgatgaggctgagggagaaagaattggctgctgtgaagatcaaccctgcggatgtcgaaattatcgctagtgagcttgagctggacaagaagatcgcggagagaacgctccgtgagcacaagggtgatgccgtggctgcggttcgattcctgctgcgctagttccgagatttcgtcgccagcatcatatgttccccttcagttccacacaagaggtgatgatgtgaagtgaagcactagtacttttgtgtgcctgttttggaagtttgctattagaactatgttgcagaaaatttaagaatgagaataccatgcaaaaggtgtaatatgatttgtattagttatttgctattagaactaattaatcattatataaaattaaatactagacgaaatactaaaa

SEQ ID NO: 129575 - DNA, 905 bp, Zea Mays
gcctgtggcacagtgcacacactcgtctcatcggagaaaagtagatccggattagggttttagacggcgatgggtgcggcgggcgacgagaaggctgcggtggctgcggccgctgcggccgcgggggccggtgccgccgagggcgagggcgcggtggactccaaggaccttcagcagcagagcaaggcgctcgacaagctcactgatcatgtcgaggaccggcagctcgattcatcccgtgtccaatccgaatattggagatgtgccttcaacaatctacgctcgattgtctccagatgagcaactcactgcagaaacaagatacacctcttgacatctgaaagaaacggttcgaacacatacggcaagaacaatgagtcgacgatccgcaaacagcagatgcagacgaatctgcaaatggagggtggacaaacgcacgtaccgtggaggcggacgccagcgcggttgaggtggttgacgcgatcgggacgccagcgagggggccctggccaccgtcgcggcggggggccaggagcgctcctgcaccacgagcgcgcagatctgagaagggaggactacggctggcttcgtccgcgaaccgagtcgtcgtcctggtctaggcgttcccaggaagtcagcggcgagctccgccatgagcacgcgcacctcggtgcggctctggttcgtcgtgcccaccggccccgactcctggaacatgtacccagggcagcgccacggcaccacttcgaagatcctgctgctttgctgctagtagtggtagcgacggtggtgctagcggtggctgtggtttgagcggaggatttcttgagccacttgaggcgacgaggtagggaagcaacgggggacgcgggctgggcgagcacctagcgggatctaatttgcgg

SEQ ID NO: 129576 - DNA, 2753 bp, Zea Mays
cccggtcgcgtactctgtcttctcgtggttctcccgtgcccctcgcgtgcgctctctgtctctcggggcgacgactaggcggctgctcgccggccgccgacgccgacgcccgccgccagattcccaggtatctatcttcgggacctcgaccggcgacgagcacccaacaggtactgattttgctgaagcaacagaataatgtattagccctcatgcgttaacacctacataaactttgagtatcctagtttcaagtgaaatcatggcacgaaaaggaaatcaaagtaagagtggccccaatcatgcttcacctaagtggaaaaatacaactgatggtgatgcactaagtacaccagaaagaggtgctgcagatagtgaaaatccgagttcacatgttcaaggcagatcaaagggtcctgaaggaagcagtgagaagaaaggaagaggcagcaaaaggaacagcacaaacaacggcatatcatcctctggaaaaaaacaacaaatggacaccggttgtgatataaacagttcagaagaaaaggagattccggtaagaggtactaaaaatagaagaggtagccagaaaccctctaggcgcggttttggtagaagttttttcattgagcaaacaacatcgtctggattggcaggaaatgttttggagaagaccaggtgcattgcttgcatggctgcatccattattagagcttccatgatatatctagttgaagaaggcaaaagatttatcgaaaaaagaatgccaacaatcaacacttatatggcttttgtcaacaaagggcatgcatatgtcttaagcaaaattgcatatgtttatcccatagttcgagcttggatgcttaatgctggaagggtgatgctgctcttgtttacagtttggttagactgcaatgtaaggggctttgattctttgctacgattggggacaaactctctcctagcagtactttggtgcagcacgctgtcaacttttgcaatgattgggataaaaaagatgctcatattcatggcgattgcagcttctgcgtttgccttcataggtctaggttttgctatcctgcttatatcagtgcttgcagtggtaatcttatggttttatggaagtttttggacgaccacttgtgtaatgattcttggaggtgttctctttttcttgaaacgcgaaagaataactcttcttgttgcctgtttatattcgatgtattgcgcgagatgctatgttggatggctcggattgcttttgggcctcaacttatctttcttttctagtgatattctagtgcagttcctaagggacaatgcagacaataaaaaattcaatggttcttcaaggtactcagagcgaagctctggtagacaaggcaatatctttgaagaatttcagccatcagcaaatagcacctaccaagccagatatgctcgagcttcagatcgagatcctggtgatccttcaacaagtggacctgagaaagagcttacctctgaagatgaagtggctcgtttactgaactgcactgaccactattcagcattaggtttccgtcgatatgagaacatagatgtatcatctcttaagagagaatacaagaaaaaggctatgttagtccatcctgataagaatatgggcaatgataaagctgctgatgcatttaaaaagcttcaaaatgcatatgagattcttcttgattcactgaaacgcaagacatatgatgatgagttgaggagggaagacctcttgaactacttcaggcagagtgtttctcaaaagaatggaagaaacagtactttccaacatgggttcagcccttcagaaggtgttgatgaaggtccttatggtctttccagaagaatagcttgtaaaaagtgcagcgactttcatctttggatttatactggaagagctaaatcacaagctagatggtgtcaggactgcaaggagttccatcaagctaaagatggcgatggatgggttgaacagtcctttcaacctgttctatttggcatgctgcagaagcctgatttacctcatgcatatgtttgcgcagaaagctacatatttgatgtcactgagtggttcaactgtcagggaatgagatgcccggcgaacactcacaaggcaaccttccatgtcaatgccaacatggcaaagcagagcagtggcaaggcgagtacctcaacgcagagggctggtaaggccccaagtggtgtaaacatggatggaggaggactcaacgaggaagagttcttcgagtggttccagaatgcagtcaactctggaatgtttgaaactacattcggggcacaaggcgacccgacttctcctggtaacggaagcaatgccaagagtagcggtagcagcagcagcaacaacaatagtaggaaaaagaagaaaggaaagaaacagtggtaatcaaagcaaagcaggctggggtctggtgatcacttctcggggcagagaaaaaaagaaacaaacagaataagcgttttgggtatgtaaatacaactcggaaaaatcggtccctggcttaaatggttcctaacgagaggccactgtaaatccttgttcatcatggggtgctgacggctgttaaatggccattataaatcctggttcattatgttgtcggatcttaatatatcgtcctggccctcggtaacttgctagcaaaaaaaatgttataaagcaagttactacgaaacaagaatttgcaagattaaagatagttttttttgac

SEQ ID NO: 129577 - DNA, 3987 bp, Zea Mays
ccactcacacatgccatcccacctctacctttctctgctctttcccctccaccctgctgctcccagtcccccccacctcgagactccactgctgactgctgtgcatcccaaccaaagcttccccgccgaattccccaacctcccgccggattcgccaagctcgtggattacggagcccgattcgtccgcggagctgcggcctgggccgcctattcgctcggttcattgcctcgctgattcgctccggcaccctctttctgcatgagctcggattggaggtggcgtttctgattccctctggcaggaggcgcgaggggcatgtgggtttcgctggtgtgggtccggggctgcgtgggcgtcacattcgtcgatttccagaccgggagggaagcccactagatctctcggctcctgcgctcctcgggagagtcggggaggctagctagctgtgatcggagaaggctggtgtagggttttgggaggggaggggacatggaggccgccaggtttggcacccagagcagccacttgtacggcggtgggcttgacctcaacaggcgcgagaagagggtgtttggctgggacctcaacgactggagctgggacagtcagcgctttgttgcgacgccggtgcagcagcaggcggcgaatggctctggactgaacagctcaccatcgtcgtccgaggaagccgtggaagaggtggctaggaatggtggcttcagaggtgacactgacaagaggaaaagggtcatcgatgatgacgaaaccgaggatcagtgcacggtcttgcatggtggcaggtcgctcagcttgaaaattgggggtgctgctggtggtgttggagcgatggagaacagcgatgtaaacgaggataatgagagaaatggaaagaaggtcagggtacaaggaggcagctcaagtgggccggcgtgccaggttgaggactgcggagcggatctggctgcagaaaaggattaccaccgccgacacaaggtttgcgagaagcatgctaaggccagcaccgccgtggtcgggaacactgtccagaggttctgccagcaatgtagtaggtttcaccttcttcatgaattcgatgaagggaggcgaagttgccggcgacgcttagcaggccacaatagacgcaggaggaaaacccggcctgatactgcaattggtgggactgcttcaattgaggacaaagtcagcaattatttattgttgagtcttatcggaatctgtgctaatatgaactctgacaatgctcagaatgcaaacggccaggagttgctatccactcttttgaagaacctaggatctgttgccaaatcactggagccaaaagaactatgtaaattcctggaggcataccaaagcctgcaaaatggattgaatgctggaacctctggaatagctaatggtgcagaagaggctgcaggaccatctaactctaagttgccttctgtgaatgatagtcattatggacaggcatcatcatctgttgtgccagtacaatcgaaggctaccacggtggtaactccagagcctgcatcatgcaagcttaaagattttgatctgaatgacacttgcattgatatggaaggctttgaggatgggcaagaaggttcacctacacctgcctttaagacagctgactctcctaattgtgcatcatggatgcagcaagattctactcaaagcccaccacagactagtggcaactcagattcaacatcaacacaatcattgtcaagctcaaatggagacactcagtgccgaactgataagattgtcttcaagcttttcgataaagttcccagtgacttacctccagttttgcggtcgcagattcttggttggttgtcgagtagcccatctgatatagaaagccatattagtcctggctgtattattctaactgtatatgttcggttagttgagtctgcatggcaagagctttctgagaatatgagcctgctcctgggtaagcttttgaatagctccactgacgacttttgggcatctggcttggtatttgtgatggttcggcaccacttagcttttatgctcaatggtcaaattatgttggacaggcctctggcacccagttctcatcattactgcaagattttatgtgtcagacctgttgctgcaccttattctgcaacaataaatttcagggtagaaggttttaacctactcagtacttcctcaaggctaatttgttcttttgaaggacactgcatattccatgaagacacggattctggagcagagaatgttgagtacaaggatagggacatcgaatgcctcagtttttgttgttctgttcctggtccaagaggaagaggatttatagaggtcgaagatagtggttttagcaatggcttcttccccttcataattgctgagaaggatgtatgcgctgaggtttctgagctggagagcatatttgagtcatccagtaatgaacatgcaaatgccagggaccaagctctggagtttctaaatgagctgggttggcttcttcatagagcgaacagaatgtctaaagaggatgaaactgacacatctctagctccctttaacatgtggagattcagaaatctcggtgtatttgccatggagcgggagtggtgtgccgtgatcaaaatgctgttagatttcttatttattggccttgttgatgtgggatctcggtctgcagaagagatggtgctttcagaaaatctgttgcatgctgctgtacggaggaagtctgttaacatggttagatttctgctgagatacaaaccaaataaaaactcgaagggaactgcacaggcatacttatttagacctgatgctctgggcccttcaaagattacccccctccatatagcagctgccactagtgatgcagaggatgtgttggacgcgcttacccatgatcctggactgattggaattagtgcttggagcaatgcacgggacgaaacaggttttaccccagaagactatgctcggcagagaggcaatggcgcttacctgaatctggtccaaaagaagattgataagcatcttggcgaaggccacgttgtcctcggtgttccgagcagtatatgccctgtaataaccgatggcgttaagcctggcgatgttagcctcgagatatgcagggcaatgtctgcatcagtgccaggttgcctcctctgcagccgtcaggcacggatgcatccaagttctacggcaaggaccttcctttataggccagcaatgttaactgtgatgggagtcgctgtggtttgtgtctgcgtgggcatactcctccacacctttcccagggtttatgccgcgcccacattcagatgggagctgctggagcgtggacccatgtaaattttaggatgaaataaacctagcagttttgtaacttgagagctctagcgcaaaggaacataattaccgtgtgaagaagttcctttgcatttgcagcaagatccggttgctgttgtaagcttatatatcgtcaatatcaactatatttacagcctaacatgcttcgattccattcatcatttttattgtagaatttgtttcttccttgcggagattttgtgagccgtcagaataaaacatgtccttgtttatgtaatcgttgagacataacatatcttggaatgacactgaaaaactcaagattttattagttgaaagtatcttatacaatccaagctcctgcaaatttgcagggctgaaatgcgtgcacttgcttttcagcctataatcaagatgtacattttgcgataagcagacggttttctggtgaaatgctggatggaacatagcttacaagatcagcaaccagacccttctgcccaagccatagtagcctccccgtatcaatgatatctttacacatggatcccagagtggccctctcccctgctggtatacttcggattactctctcaattccgacggcctcctgatcaagcttctctggtc

SEQ ID NO: 129578 - DNA, 1803 bp, Zea Mays
aatagctatcttctatagctctctctatatacgtatgcttttgcttgtccacaactctcccttatcactgccgatcagatcatctctctctctctctctatcacacacacacacacacagttcttcgtcctgcagctataggactataggagagtagtaggatcgtcctgcagctatatatagtagcgcgatgggatccctgatgtccggttggagctcctcagtgctgagtgacaaggaagctcgtttgatgaggaaccggtcgctgacaaaggaggaggtggcggcgttctggaggcagcacggcagcataccgaacgccggttctccccgcgcggtaccggtacaatactgctgcacgaggagcgacgacgatggcttcttcctccccgagaacgccgccgatagctccgccgcgaaccgcggcagctggtggactcggagcagctgggcgttcctgaacgagccgccgccgccgacgacgacgagagaggcggaggcggtgttgggcagcagggcgccgaggagcttcgtcgtcgtcgcgtgtgaccagcagctccacgccgccgcccggatcgtcaccggcaacgcctaatatgagtgacatacgtgtctgtggttgtcacgtacgtactgtacacgtgtgcttatactactcgtaactatatatatatatatatagctttggcttgaggtttacgtgagtcatccaaatatatgtcttcctcttcgtataatagtaaataacatccatacacgcgtcatgctagctgctatatatctgcagaccatcgccgtgcaaaaaagttttctgaatagttattatttgatagctgagagaaatgcatagaaaagatatgcacgcacgttttggatgcaactccatgcatcaaataactcctaagtagttattaacctttctctctcgattaaaactcctatggttattaatttggccaaattaactagctagagcggccactaataacgccaccgcatgcagtttcataaatagaatctttattattatatgaaatatttccacctataaaaaccagctaggtgttcctccctcgctcctcctagaccagcgcaagccgttccttccatccactacacctgcttacacaacgcacgcacgaccatcaccaagcaagccgtgaagaacgaaatggccaagctcgccagcctcacaaccctcctcctcctcattgttgttgtcatggccaccgtctcatccgtgcacggcgcccgcgctttcgagagagtggatcaagtagccatcctgcatgagccgtcgctggaggcgaatccaccctcagcaacgctgctggaagtcgaggccctggtccctttcgatgaagaagcggtggacgggcccgtcgggtacgaccttgcaactgattgcacccgtaagacgccggtgttcgggccctaagcgacacagttgggtggccaagtgtagtgaggcaccggcgtctagcattgttgagtttgcgccagctatatatgtaaacaaacgaccttcaattaacgataggccgacatgaataatgagatgtgtgtgatgctgctaagtttgtgtaccaagactatgtatcctcttgatgtatcgctcttgataatctttaatataaaactttctttatcgaaaaaagagagttacaattaatactccctccgtttctttttatttgtcgctggatagtgcaattttacactatccagcgacaaataaaaagaaacggagggagtagttaggaaagagacttatgtcgtttgcatatagtactacacagataa

SEQ ID NO: 129579 - DNA, 587 bp, Zea Mays
tagtagcgcgatgggatccctgatgtccggttggagctcctcagtgctgagtgacaaggaagctcgtttgatgaggaaccggtcgctgacaaaggaggaggtggcggcgttctggaggcagcacggcagcataccgaacgccggttctccccgcgcggtaccggtacaatactgctgcacgaggagcgacgacgatggcttcttcctccccgagaacgccgccgatagctccgccgcgaaccgcggcagctggtggactcggagcagctgggcgttcctgaacgagccgccgccgccgacgacgacgagagaggcggaggcggtgttgggcagcagggcgccgaggagcttcgtcgtcgtcgcgtgtgaccagcagctccacgccgccgcccggatcgtcaccggcaacgcctaatatgagtgacatacgtgtctgtggttgtcacgtacgtactgtacacgtgtgcttatactactcgtaactatatatatatatatatagctttggcttgaggtttacgtgagtcatccaaatatatgtcttcctcttcgtataatagtaaataacatccatacacgcgtcatgc

SEQ ID NO: 129580 - DNA, 1764 bp, Zea Mays
aaagccgatgctatcaacgctaactgttaacccctctccgtttgcccaagtgcccaagcccaaccacccgcaccaagccaaaccaggacagagagagagagagagcacgcggcgcggccccgccgagccgagcgcctgcctgcaaggctcccctcctccctttcgcttcctccttcgatcggccccgcccagctgctgctgctcgcgccgccgcggtgagacccgggaggagggcctggtggtgggcggccccgatggagtgggcgtcggcggcgtacacggccgcggcgctggtgtgcgcggcggcggcgtgcgtggtcgcgctcgcgcacatctaccgccacctcctccactacgccgagccaatctaccagcggttcatcgtccgcatcatattcatggtcccggtatatgctgtgatgtcattcctttcccttatcctccctaacaacgcgatatactttaattctattcgggagatctatgatgcttgggtcatctacaattttctctcactctgcttggcatgggtgggaggtcctggtgctgtggtggtaagtttgagtggccgaacactgaaaccatcatggattctgatgacttgctgttatccagctattcctctagatgggcgttttatacgaagatgcaaacaaggttgcttgcagtttgtgattctcaagcctattttggttgtcatcaccttcatactttacgcaaaaggaaaatacaaagatggaaacttcagtgtcaaccaatcctatctctacataactatcatatatacaatctcatactcaatggctttatatgcccttgcattgttctacgcggcttgcagagatctacttcggccatataatcctgtcccaaaattcatcatgatcaaatcagtggtgtttctcacatattggcagggcgtcctggttttccttgctgcaaaatctcgatttatcaagaatgctgataaggctgctgatctccagaactttgtgttgtgtgttgagatgctaatagcagccgttgggcacttatttgccttcccctacaaggaatatacaggtcccaatgcccgcccttcacgtggtttcagagaaagccttcttcatgctttgaaattcaatgatttctaccatgacaccgttcatcagtttgctcctacatacaatgaatatgtgctctacaatcacaatgagggagacagtgcacaaacaaagtatccctcggggagcaccgccacaagtgggcagggtgtagagttggctggcatcaccgtggcggcctcaaacagtccagtgtcgtcaagtgtatcatccaaccaggcagatcaggaagaaacaatgacaaccccaatcaaggacaaagttgatcctcctggagggctctacgacctcacagaattgcttgatattgatctgtctagctacccagccaagcttcctggaaccaccgatgtaagaaaacaatgatcaagcttgatgagatgggctattggtagggttgttgcgattgggttgggggaaaatcgtgattattatttttttactgttgaagagtgccatagttaacattgtaaaaatgtgtgtattatttgttctgatttttccccccgttgaagggggtttattcattgtcagcagttgctgccacacggcctccctcaccctgctctttattaaccgtgtaaaatgttgtgagcttaaggtgaaccttagtgtcaaggggagtctataccagtacaatattctgcgtttctggtggcgt

SEQ ID NO: 129581 - DNA, 1710 bp, Zea Mays
aaagccgatgctatcaacgctaactgttaacccctctccgtttgcccaagtgcccaagcccaaccacccgcaccaagccaaaccaggacagagagagagagagagcacgcggcgcggccccgccgagccgagcgcctgcctgcaaggctcccctcctccctttcgcttcctccttcgatcggccccgcccagctgctgctgctcgcgccgccgcggtgagacccgggaggagggcctggtggtgggcggccccgatggagtgggcgtcggcggcgtacacggccgcggcgctggtgtgcgcggcggcggcgtgcgtggtcgcgctcgcgcacatctaccgccacctcctccactacgccgagccaatctaccagcggttcatcgtccgcatcatattcatggtcccggtatatgctgtgatgtcattcctttcccttatcctccctaacaacgcgatatactttaattctattcgggagatctatgatgcttgggtcatctacaattttctctcactctgcttggcatgggtgggaggtcctggtgctgtggtggtaagtttgagtggccgaacactgaaaccatcatggattctgatgacttgctgttatccagctattcctctagatgggtgcgtatgtgtccttggtgcattaccaagcgactactacaacttttaaaaaatttctgtgacattgctctatagcgttttatacgaagatgcaaacaaggttgcttgcagtttgtgattctcaagcctattttggttgtcatcaccttcatactttacgcaaaaggaaaatacaaagatggaaacttcagtgtcaaccaatcctatctctacataactatcatatatacaatctcatactcaatggctttatatgcccttgcattgttctacgcggcttgcagagatctacttcggccatataatcctgtcccaaaattcatcatgatcaaatcagtggtgtttctcacatattggcagggcgtcctggttttccttgctgcaaaatctcgatttatcaagaatgctgataaggctgctgatctccagaactttgtgttgtgtgttgagatgctaatagcagccgttgggcacttatttgccttcccctacaaggaatatacaggtcccaatgcccgcccttcacgtggtttcagagaaagccttcttcatgctttgaaattcaatgatttctaccatgacaccgttcatcagtttgctcctacatacaatgaatatgtgctctacaatcacaatgagggagacagtgcacaaacaaagtatccctcggggagcaccgccacaagtgggcagggtgtagagttggctggcatcaccgtggcggcctcaaacagtccagtgtcgtcaagtgtatcatccaaccaggcagatcaggaagaaacaatgacaaccccaatcaaggacaaagttgatcctcctggagggctctacgacctcacagaattgcttgatattgatctgtctagctacccagccaagcttcctggaaccaccgatgtaagaaaacaatgatcaagcttgatgagatgggctattggtagggttgttgcgattgggttgggggaaaatcgtgattattatttttttactgttgaagagtgccatagttaacattgtaaaaatgtgtgtattatttgttctgatttttccccccgttgaagggggtttattcattgtca

SEQ ID NO: 129582 - DNA, 1146 bp, Zea Mays
ccagttggggaagctgccaactatgcggtgattgagcagagatacttcgattgcgagatgttcccagcaaacgatgaccatccgtcgcatgatgtggcgagggggcagaggttcgtgaaagaggtgtatgagacactaagggccagtccgcagtggaacgagactgccctgatcatcacatatgatgagcatggtggattctatgaccatgtacctacgccggtcgttggagtgccccagcctgatggaatagttgggcctgatccatactacttcaagttcgaacggcttggggtgcgcgttcccacctttctcatctcaccttggatcgacaagggcactgtgatccataaaccaaacggtccacaggatacttcacaatatgagcattcgtccattcctgcaacagtaaagaagctattcaatttacattctaactttctgacaaagagagacgcatgggctgggacctttgagaactactttaaaatccggagaacgccaagaacagactgtcctgagaagctcccagaggtgacaaagtcactgcgaccatttggtcccaaggaagattcgtctctctcagagttccaagtggagttgattcaacttgcctcgcagcttaacggcgaccatgtactgaacacgtacccagatattggcaggaccatgactgtcggggaagcgaaccgctacgcagaggatgctgtcgccagattcctggaagctggtcggattgctttgagagctggtgcgaatgaatctgctttggtgacgatgaggcccgctctcacaagcagggcctcaatgtcctctggtttatcatcagagctctagtagatggttccagtctgcccacaaattacacatcgccattccctctgattcagctcttgggtggtgtagtgcaaatatgatagtttggttctgtaaatagacagtcggtacatgtcaaagcctcaatgtgtagtggggatttctaaaagcaatttgtgggtacctgcttgtcaagcagctggactgcactctggagtaaatgtatgatactgtacagtaactgaattttcatgtctgtaaacatgggcttaaacatgtgtaatatgatacttaaacatttgcttgggaggatgagggttaacacttaac

SEQ ID NO: 129583 - DNA, 435 bp, Zea Mays
ctctacaaaaaatatcgaaataatttggtatgccaaatccaccacacggggagagtgaggatctgtttcgctcaagaaaacaaaaaaaagaaggggcccgaggtcgtagcagctctggatgattttgacgatgggaagaggagaaagaagatgacatctaggcaatactccgcaatacagaaatataatagcatatctgaagtgcatagaatggcgtatttctgagaacctaagagttataatagcgtatctcaattctcagaataggtgagtgctaatggtatttttcggagccgtcaaaattgtgatggcaacgatcagaaaatcaaaaaagaatggacaattaaggtatttcaggttcttcctacttcctcttcctctccgcagcaaaatttcagccgcatatatggcatttctcctacttcagggacctgt

SEQ ID NO: 129584 - DNA, 2343 bp, Zea Mays
aaaaatggaggcagcatattttaaaagcgagattttgaaaagtgctgtgaagtgagtgagaaccaacagatatgctcggtggaaaaagaaaacaattcgcgagtatatatatataatgctcggcggggcgagggagaaaggcagcaaacaggttgcacagcgggggaaggaagagcggaaaagcccatcgccaccttcctcctcggatccacaacccggacgccccacccgggtcctttcttcctccctcccagtcccactcccaacaccgaccgcccctcctcatcacacctcgcaactattttagtctaaccgagtccaaccagtggcaagcgagcgagaggtggtggacggaaccgtcgcctgctgcgggctgccctacgagatctaggcaagcgagcgagcgagcgcggccatgggtgctcgctgctccaagctctccgtctgctggtggcctccccgcttcaaatcgccgatgctcgagaatggcgccgccgaagatgacggcagcggcgtgccggtgttcgccgagtacagcctcgccgagctccgggtggccaccgacggcttcgccaccgaccgcatcgtgtcggagcacggcgagaaggcgcccaacgtggtctaccgcggcacgctcttcagctccggccgcaccgtcgccatcaagcgcttcggccgctccgcctggccggactcacgacagttcctggaggaggcgagggctgttgggcagctgcgcagtcgccggctggccaatctgatcggttgctgctacgagagcggcgagcgtctcctcgtcgccgagttcatgccgcacgagaccttggcaaagcatcttttccactgggagacaaatccgttgagttgggcaatgaggacgagggctgcattttatgtggcacaggcgttggaatactgcagtagcaaagggagggcactctatcatgacctgcatgcatacagggtcgtcttcgatgcggaaggtaacccaagactatcatgttttggtctgatgaagaacagccgtgatggaaagagctacagtactaatttggccttcacgcctcctgagtatcttaagacaggcagagtaagtcctgagagtgtggtttacagttttggcactgtcttgcttgatctcctgagtggaaagcacattccaccaagtcatgcactcgaccttataagagggaagaactttctagtgctgatggattcttgcttggaaggtcatgtatccagctccgatggaactgacttgatgcgattagcatcccgctgcttgcaatatgaagcacgtgaccggccaaatttgaaaacggtggtatccggtctcgaatgtctccagaaagatgtttctactccttcacacactttgctggggatccaacatgataataaaaactcagatcgaatttctttatccgctattgggaaagcttttgccagagcagacctgaatgaggtgcacgaaatattactgcatgatggatatgatgaggatgacactgctaatgctgagctatctctccagtcatggaatgatgatgtatctgagagctttgttgttaagaggcatgcagacaacgcctttaggtctaaggattactcgactgcaattgagtgttactcaaggttcatcgactcaggtgcaggggtggctccaaccatgctggggcggagatgcttcgcatatgtggtggctggcaacccacaggaaggccttgaggatgcaaagagagccgaggttattgcatcggactggccgatgggacactacctgcaggccttggcacttcacaacctgggaagggaggctgaaagccaagaagcactgaagaatggcactgccttggaagctgcaatgaatagtagagctagaactgtatagccctgaatttgtgataccctgtcctgcttgtacctagatcgcctccctccaatgcttcgtcaccagtaggggctgtttttggtattccctaacttgtatcggtatttcccctagtttcacaagtcgaaaaaactcctaggggctagtttggatactttgggattagagtgttttgaagggattggagagggtgtaaatccctaatagatcaaatactctctcaatacatctcaatccactccaatcccactcgttactagagtatccaaactaggcctaggctggctgttgttacacctccaatatatttatgaatacaggaatgggcaactagcattctgttgatgtgagtttgtaaagtgagagtttctatttatttcaacaaattcatgtacatacacacttttgaaccctgcaacttaagatatttgaggtcaggcaaacttcaactc

SEQ ID NO: 129585 - DNA, 2280 bp, Zea Mays
aaaaatggaggcagcatattttaaaagcgagattttgaaaagtgctgtgaagtgagtgagaaccaacagatatgctcggtggaaaaagaaaacaattcgcgagtatatatatataatgctcggcggggcgagggagaaaggcagcaaacaggttgcacagcgggggaaggaagagcggaaaagcccatcgccaccttcctcctcggatccacaacccggacgccccacccgggtcctttcttcctccctcccagtcccactcccaacaccgaccgcccctcctcatcacacctcgcaactattttagtctaaccgagtccaaccagtggcaagcgagcgagaggtggtggacggaaccgtcgcctgctgcgggctgccctacgagatctaggcaagcgagcgagcgagcgcggccatgggtgctcgctgctccaagctctccgtctgctggtggcctccccgcttcaaatcgccgatgctcgagaatggcgccgccgaagatgacggcagcggcgtgccggtgttcgccgagtacagcctcgccgagctccgggtggccaccgacggcttcgccaccgaccgcatcgtgtcggagcacggcgagaaggcgcccaacgtggtctaccgcggcacgctcttcagctccggccgcaccgtcgccatcaagcgcttcggccgctccgcctggccggactcacgacagttcctggaggaggcgagggctgttgggcagctgcgcagtcgccggctggccaatctgatcggttgctgctacgagagcggcgagcgtctcctcgtcgccgagttcatgccgcacgagaccttggcaaagcatcttttccactgggagacaaatccgttgagttgggcaatgaggacgagggctgcattttatgtggcacaggcgttggaatactgcagtagcaaagggagggcactctatcatgacctgcatgcatacagggtcgtcttcgatgcggtaacccaagactatcatgttttggtctgatgaagaacagccgtgatggaaagagctacagtactaatttggccttcacgcctcctgagtatcttaagacaggcagagtaagtcctgagagtgtggtttacagttttggcactgtcttgcttgatctcctgagtggaaagcacattccaccaagtcatgcactcgaccttataagagggaagaactttctagtgctgatggattcttgcttggaaggtcatgtatccagctccgatggaactgacttgatgcgattagcatcccgctgcttgcaatatgaagcacgtgaccggccaaatttgaaaacggtggtatccggtctcgaatgtctccagaaagatgtttctactccttcacacactttgctggggatccaacatgataataaaaactcagatcgaatttctttatccgctattgggaaagcttttgccagagcagacctgaatgaggtgcacgaaatattactgcatgatggatatgatgaggatgacactgctaatgctgagctatctctccagtcatggaatgatgatgtatctgagagctttgttgttaagaggcatgcagacaacgcctttaggtctaaggattactcgactgcaattgagtgttactcaaggttcatcgactcaggtgcaggggtggctccaaccatgctggggcggagatgcttcgcatatgtggtggctggcaacccacaggaaggccttgaggatgcaaagagagccgaggttattgcatcggactggccgatgggacactacctgcaggccttggcacttcacaacctgggaagggaggctgaaagccaagaagcactgaagaatggcactgccttggaagctgcaatgaatagtagagctagaactgtatagccctgaatttgtgataccctgtcctgcttgtacctagatcgcctccctccaatgcttcgtcaccagtaggggctgtttttggtattccctaacttgtatcggtatttcccctagtttcacaagtcgaaaaaactcctaggggctagtttggatactttgggattagagtgttttgaagggattggagagggtgtaaatccctaatagatcaaatactctctcaatacatctcaatccactccaatcccactcgttactagagtatccaaactaggcctaggctggctgttgttacacctccaatatatttatgaatacaggaatgggcaactagcattctgttgatgtgagtttgtaaagtgagagtttctatttatttcaacaaattcatgt

SEQ ID NO: 129586 - DNA, 1580 bp, Zea Mays
attgggttgcggcatccattccatccgcgttcctattcgcaaccgccgtcgctttcgcccggtcggcccacccaatcccgtccctatcgctctccatcgtctctctcccatcagcacgcagctgtacccgtacgcaactgcgacaggtccacatcgcggcggcccactcacccccagcgactgccgactgctgttccatggcggacggcgacggcgcggcggcgacggggaagctcgcggagctccccagcggcgccgagaaggggctccccaggaggggcaaggcttcttctgggaggacattaaacaccgcacaaattccgcttgttgcgagccatccagatgtgtatgagccatgtgatgattcctttgcccttgttgatgcactactctcagacaaggcacaactcttgacactacagccaaggttatgtatggaggtagggtctggtagtggttatgtcatcacctcgcttgcaatcatgctcaggcagttaggctctggagcccagtacctagcaactgacatcaaccaacatgctgccgagacaactcaagcgacccttgaagctcatggggtgcatgcagatgtgattgttactgacatcatgtctggtcttgataaacgccttgctggtatggttgatgtggcagttgttaaccctccttatgtgccaactcctgtggaagaagtcggatgtagaggcattgcttcgtcctgggcaggcggtttgaatggccgccaagtgattgacaggatccttcctgctgtgcgtgagatgctatcagaaagggggtggctgtacatggtggccctcgaagataatgatccttcagacatatgccatctgatgagcgagatggggtatgcatcccgcgttatcttgaagaggtgtactgaggaggagagcctttatgttctcaagttctggcgagacccacacgctgttacaagtgtgtcgccgaaatcttcaggctctgaatcatggttttctcagttgcatttcaaatccctttggcacaagggctcgtagcagttcatgccctcatcattttggcagtttggcgtcttcatcagctccaaaacatagcaagagatcttctgcaaatctgagatggcagtatgtttagatgtgtttggataaaatggttactgttggtttctgaccgtctcaggcacagtgaaagaatcaagaatcagcctagcttgattggtttaaggcgcagagcaaacatgtccttagaccagaaagtactgaaccttattaatttggtagcttaaatcgttaccttatgttctcttggtgtgtgtggtgtgtcaatgtttttaaggttctcttggtgtgtgtgtgtgtgtcattgtttttaaggtgtcgccaaggcgtccaaaaatcataggcgccttgctcgcctaggcgtccagtcgataggccaacgtcttatctcgacttatgctttaagaaccatggtttgtgtatgctacgttgctactatggattctttgccttgctaggtttggaatatgtgttttctttatatatcattgcgtctaaatgcttatttcaagatgagaggaaagt

SEQ ID NO: 129587 - DNA, 593 bp, Zea Mays
aaccagacaaaaaaattaatatattcgatttggcagaggccgcacggcctctaacacaaattatgacccctctaacacaaattatgacgtccactctcccacttggagagatggtaagtctaacacaaattatgacgtccactctcccacttggggagatggtaacaaattatgacgtccactctcccacttggggagatggtaagtcagcgtaccctccaagtgcaatgagagtcactggacaaattatgacccctctaacacaaattatgacgtccactctcccacttggggagatggtaagtcagcgtacccttggggagatggtaagtcagcgtacccttggggagatggtaagtcagcgtaccctccaagtgcaatgagagtcactggcctaccgtccaagtgcaatgagagtcactggcctaggccattgacaattttgccattatcatttgtgggcttcgccaatataccatcgaacccataaatcatagacacagacggtcccactagtcatagacacgggatggtataataacaggcagccaaaattgagagtggcaaaatagcaaatttctctccaggtaagt

SEQ ID NO: 129588 - DNA, 1604 bp, Zea Mays
gagcagtagtcgtctttctgatagattgtgattatcctgcaaaggcaaattatctttcttcggaggaatcagctactagtttacaatctgaaaacacggttcttgatttcttcatccccaatccgtccagttctctgacgattccttcgcctgcctgcctgcctgggcgctaatgtagtttagcgctttcccaaatttcttttgcattgctgccagcctgcatggtgtgtgagatatttaagattttttggatcataacagaagttttgctcaagtgcccttttccattgatcccaactaatgatacaaatctatttcctcaagttcttatcttctggatttaacagaaggtttgctcaagtgccctttaagatggcatcgtcagaaagaagaacacaagttcatggaatatagctgtgaaaatacactcagcagtttcactagatgcttagagacccaaatgagttcattaagtgacatggtaatatagaggacgcccgaagggcgccaaatgcactaagtaataataataataataataataataataataataaccacaagtccacaacaaacaaccacaaaatgtgcactctgaagactgggtccaccattcagcgactctgttgaccacaggtctgtgcacccacccacctgtcagcttcccggttcattcatcctctgattagcgattacacagaattccctcccaatcggcggcgccacgatgcgcctccgcagccgggcaatctttcccctcgtccgcaccaccgccaccaccacgtcggccgcgtcttcgtctccggcggtgctgagcatcggccacgcgctgcgcgagcgccggctgttcacgggggacgacgtggcggcgtacgcggcgatcagcggtgaccgcaacccggtgcacctcgacgacgccgtcgcccgggagctgagcgggttccagcgaggccgcgtggtgcacggcatgctcgtggcgtccctcttcccttccatcatcgctggcagcttccctggcgctgtgtacgcgagccagacgctcaagtttgcggcgccggtgtacgtcggggatgaggtggttgctcgagtccaggcactcaacatcaggacgacggcggcggcgacgaacagctgcacggcaagacgatatgtcgtcaagttcgcaaccaaatgcttcatggacgaagaggagggctctgttgcgattgaaggcgaagcaatggctgtcctgcctacactggagctcagctctcagtcgactagaaactaggagtggcctcaaaccgggtcactagtcacaagttgctgttgcttaatcatacccgacctggtaatccctctcttctgcaacactgtgtagaatgcgtgtaaactgaacttagtgtagccttcacattgtaagcgaggagtgaaataaagctgttgtttatgcctatgaatctctttgattatgtgcagcgtacaatcactcatccatgaacagtctctagtctctgccggttaattctgtattttttttctcgaaaaagagaaaatcacgaggaagaccaagaccccaagtacagatcaaaacactaggaccagccagaaaaaaaaacaaaaaa

SEQ ID NO: 129589 - DNA, 1845 bp, Zea Mays
agccaaccggcccaaccccgtctaggtttaggcacccgaccgccgcagcgtccccgccgccacgaccacgagcgaaaggaggtcgccggaagagggggcgcggagatgagcgggagcgcgttcaacgcgttcaagtcgcgggtgccggtggcgtggagtccccggctgtacatcacgctggtgcggggcctccccgggacgcggcgcctccaccgccgcacgctcgaggccatgcgcctccgccgctgccaccgcaccgtcgagcaccgcaccacgccgtcgctcctcgggatgctcacccaggtgaagcgcctcgtcgccgtggagaccgaggagatgtacaacgcgcggaagcaggccgaggcggagaggcgcgcgcccagacccccgctcgtcgtctcccaccagccacagccgccggctccgaagccggcagccgccgccgcggtgggtgccgctaccactgcgcagtagcctccggtgagctcctcaagtcccgtttgatgcaatgactcaagtcagtgcgcgtagattggcagtcaatataccgaattcagatgtttgtttccgatccaacattctaacacaatgaaatgtcttagtttcctggtgggttattataattcttcccttagttctccatgtaacaaaatggaaggtgcagctctaaccacattagagcaactccaagagttagtctaaaattattagcctctcttggttgttggtgtgatttgctagagtatccaagcagcttatttctattcagatagaaaactgtatgatgtagatatatcaattattatttctaattgtttggcaccctgccttgggagcactcatccagtcacagtcaggtcaatccagccccagctcctcagatttgaatgcctaggagcgctgcctggctgggtcaggcttcctagggcttgatccaagaagggcatgcatcatgctttgaatttttttaattgatatgagaggaaatttcctacagtgttttgacatgttctattaactggcatagagtaatttaccatctgttctatgtcattgcccattgcttttcaaaattggacacctgaatgccatcactgtgagcttgatgatgccaagtacagtaacacatggaagctggaagggtaacagcttcttcacgcgatggttgaatgatggggatttcatagagggcatcattcctgcaactgattatgtatatgaggggatcagttttgactgatggtataatgggaaaccctgagttatcgttacttgatccctaatattttactcgtggtgatcttgtagggcatcagaagcctttcatcacagttcagcggcataataattgatttgcctgtgtttgggtctgctggttttcagacgatcgctttgggtcttcttgctcaacgagatctagcaacggatttgatcgatcttctcaagatcgttgtgtggtgcaacctgcattgaccctgtattttagattgttttatatgaactaggcgcacggttttccaatgcttttgtctagaatcaagtccaatgatttggtttaaattactaaattctctgtaaatgctcttcaagatgtgtaggcggttaaggcttcttgcgtaattgaaccagaggattgctagcgtctaaagttgctcggttgtgattgttggttcttagcgaaaggatttataacgttgattgggttctgggagtgagaacgtactgtgatcttgactacttcggtctccccaccgaatctccgaagaaaaagggtaccgatcaggggctcagggctgagcttggacggaccgggccatgcacggccaagttgattgaaaaaaaaaa

SEQ ID NO: 129590 - DNA, 1017 bp, Zea Mays
agccaaccggcccaaccccgtctaggtttaggcacccgaccgccgcagcgtccccgccgccacgaccacgagcgaaaggaggtcgccggaagagggggcgcggagatgagcgggagcgcgttcaacgcgttcaagtcgcgggtgccggtggcgtggagtccccggctgtacatcacgctggtgcggggcctccccgggacgcggcgcctccaccgccgcacgctcgaggccatgcgcctccgccgctgccaccgcaccgtcgagcaccgcaccacgccgtcgctcctcgggatgctcacccaggtgaagcgcctcgtcgccgtggagaccgaggagatgtacaacgcgcggaagcaggccgaggcggagaggcgcgcgcccagacccccgctcgtcgtctcccaccagccacagccgccggctccgaagccggcagccgccgccgcggtgggtgccgctaccactgcgcagtagcctccgggcatcagaagcctttcatcacagttcagcggcataataattgatttgcctgtgtttgggtctgctggttttcagacgatcgctttgggtcttcttgctcaacgagatctagcaacggatttgatcgatcttctcaagatcgttgtgtggtgcaacctgcattgaccctgtattttagattgttttatatgaactaggcgcacggttttccaatgcttttgtctagaatcaagtccaatgatttggtttaaattactaaattctctgtaaatgctcttcaagatgtgtaggcggttaaggcttcttgcgtaattgaaccagaggattgctagcgtctaaagttgctcggttgtgattgttggttcttagcgaaaggatttataacgttgattgggttctgggagtgagaacgtactgtgatcttgactacttcggtctccccaccgaatctccgaagaaaaagggtaccgatcaggggctcagggctgagcttggacggaccgggccatgcacggccaagttgattgaaaaaaaaaa

SEQ ID NO: 129591 - DNA, 1172 bp, Zea Mays
atgactatcaaagaggtcaaggatcaagagcagtttcatggtctttttcatttacctgtctctgatcaagcgtttgatcaatttctggtgctcaaggggtcttgggagcaaattgttcttaatgatgttcacgaccgatggaagtacatttggggatcggacaaattctcatcccaaaaagcttacagagctttcatgggccagatgcagactcatcctatctacaaactagtttggaaaagaaaattcggagccgttttcgcatcaattcctggcccgattatcgcggctatatactgtcttctcttcgcttatgttggtacggcgggtgttggtttcctgcagttctgcaacctgaacagcttccgaacaaaattcatcctggggttctctttgtttatgggtttgtcggtgccacagtatttcaacgagtacacttccgtcgcaggctttggcccggtacacacgcgtgcaagatggttcaacgatatggtcaacgtggtattctcctcgaaggcgttcgtcggcggggctgtggcgtatttcctggacaatacgctgcagcggcgagatggcgccgtgaggaaggaccgggggcaccatttctgggacaggttcaggtccttcaagacagacccgcgcagcgaggagttctactccctcccattcaacctcaacaaattcttcccgtccttctgatcctgatggctggtaactgggcgacggaaagtgctgtcctgtcaggtggttgtgaattatgattttggcaaaatgccacgcccaaacggcagtttcctctcctgcttctattgtaaccactcgttgagttctgaatcttgtagagctcagcctgaactatccagaagtagtggaggagaaactggctggtattttttggatgtaaattgggtctgtgttctcccatagatcgataagatggaaagagaactttctgtagattacacactccagtgctataatttcttattttatttttttgctatgtgcgtactacaaatccaacccaaaagttacctcgaagacgactggatccaacttctgttatgatattttctaccactaggatcgccattgtctttgtgaatggaagtggttcttcaatattaggatggtgataatgagtagcaatgatataagcagcagtgtgcaag

SEQ ID NO: 129592 - DNA, 5051 bp, Zea Mays
ccccccacacacacccactccatgttccacacaagcacacactagcacaaggatcgttcggtcgttcttcgatcgttcgtccccctgttcttagtttgttcgttcgttcgtccgatcgttcgatcgttcgtccgatcgttcatggttcgttcgtccgttcgtccgatcgttcgatcgttcgtccgttcgttcgtccaaataatctttttcctgccgttatgctgccgaaattccgatcgttcgttcgtccgatcgtttgatcgttcgtccgatcgttcatggttcgttcgtccgttcgtccgatcgttcgtccgttcgttcgtccaaataatctttttcttgttatgctgccgaaattccgatcgttcgttcgttcgatcattcgatcgttcatcgttcgttcatagttcctatccatcgttcatcgttcgttcatacgaactattcaccatcactatttaccgttactttttaccgttactattcatcgttactttttaccgttactttttaccgttactatttaccgttactttttaccgttactttttaccattactatttaccgttactttttaccgttactatttaccgatactttttaccgttactttttaccgttactatttaccgttactttttaccgttactttttaccgatactatttaccgttactttttaccgttactttttaccgttactatttaccgttactttttaccgttactttttaccgttactttttaccgttactttttaccgttactttttaccgttactatttaccgttagtattcaccgttactattcatcgatcatccgatcaccccaaatttcaactactcatccatcatgttgtccagtccacctaagaccagccagacccatattccagttttacaaactccggtgactgtgattttccttccagtgggaacttcccatctggtcagccatcctaggtttctccaagttgagcacgcttaacttgagattccttcgaaccaggcttccaaactcagattccaataattctcgtttctaaattcttatcgaattatttcctatccaaccatgtcatcccataagcatggttcataatccagaaaactcctaaaatactcttatcccatattctgcctataatctctctgttcagactaagtcagacgattcattcgtcactattctcatcaacagtgaacttcactgtgctacaccacatacacccagctataaatacacccagctaccctctccctctccacacacactcaacaccctcagccaaggcaaacgcccacccactcagttactccgctctaccggctacacgcatagtgtcgcttcacctccagtccaccctcctggtaagcacctccgctccaccactagtagtatctcaacaccacaagacacagattctactcaagactctacccatccatatatctctattctgaccactatactaaatatttgttggtatacttgcttgtttgtatgtttgcttgttcatgttgcatagttatcggagcgttcgtactgtctcgtggaggccagatctacaagtctacgctaggagccagaagccagttccgcgagctcttcttccccttcgccggataagcacggcaagctcactggatccctttgatgcataaattacctatgtttttcaaccacaaccctcagcctgttattttatgcatgatatgattttgagacaagttattatggccacccagtcgcttgccgcaatcaatccctgatatatttgttacaaatgatttgaggaaaggtgtgagttttcaaaagaaaatgcttttcaaaatgtgtatgatgaagggttttcacccttatcacctttgagtagggatgatcaaggactccctggtttaggagagggcctaaggtgttggctcagctggtttaggcgtgagcagaaggattgtcccctcgtataaggaccggtttgtcatctttcactacctgtactcatgataagtacaaccactcgagactgtgtgggcagtcactcaatctgaactcgtacggtccaaccccagggttatgaaggctggggagcaccgggaggataaggagggggaatgttttgtccggtttggacatggtggtggcctgactccttccggtataaccgttaaggttaggacgtgcaagggaagaaagagattcggattcggatctcactgatcatgagatcgcagagccggactagtgggtaaagtgtacacctctgcgcagagtttgaaaacctattcgaatagtccgtgtccacaggaatggacgagtctggtatggtatggcaattaatgttttgttttcaaaaagggtgcgtttgagataaatgtttttaaaaggtccggtggttgagccgtgagctatggtggacgggaagtccagtagctgtttttgaaaaggaaaaccagtgggaaactgctgagatacctggatggtttagtccaggggattttattataatactaaaaaacttcctgctccttttggagaggatgcgctttgcaaaatacaaaatgtttttcaaaacaaccttgcataaaatattgctgtttctgcaaaatatcctaagctccacatattccatgcattgtatctgatttcctcattccgcgggtgaaggtgggctgctgagtacgtttgtactcacccttgattatttatttttttccagaaaaaggagatcgggtaagagttacgactgttcccaaccttgcctgtggctgttggaccgctgatttgcttcactgcgtatatcgggctgcttcagccccactctgatgatatgtcccgagttgtggaccaactcttaaagttgttcgccacctttataggtttgtcgtttaaacagatctgtaatcatctgatgtataaatgtgtttactagcctcctgggactagtaattgtatcacatttgagtcccagaggattggggacgcttcaccccccttgccagatgagcaacacattcagcaggaagagctgcaacacagcaatcagcattctggcttgtcgtctgatagctccaatggtgctggtcagcttgcaccccccgcgaatggtcatcttgtggtaaatggtcatgctctgattgggaacggaatggaaatcaatgctgcccccttcaatgggccacaggaggttgatggaccggcacctcaggtggatcaggcccaggatttggaggttgtgccccctcaggtccaggttgatgtgcttaacaacattcaccatcagaatttggagatgaatctcatgctatatcaggattggcagcctgaccccgtctttcagatgattgaggagagaaatagagctgtccagttctctaggctctgggccaaattctttgctccggctggaccgactgatcactcggagcaaggagtgaattccatcccttttgtggttcctaaggattgcccagttgacccctccctgggggatgtcacctctggggcctccaaggattccattggttctggtgggctgactccaatcattgtggagtcagggctcagaagaagcaaacgattgaaggaatcacgtgatgggttcaggcatggggcatgtccaaaaaggaactgcctcatgtgccaacataacttcgatggcccacccccgctatcctccaaggtgctgcggaatctgggaaccaggctttgcaacctgtctgaggaggacctgtctgagcagaggctgaagcaaaaaaaatcgtctgtgggacctgttgggccgcggaaggttgacaggaaggatctggcagatgagaaaactgatgattcttctgatgaggatcaacaagataatcattaggtggatgctgggggatctgggcttgtgtgtgagccccattaacttttggatgtacttggttcttcttttggttcttgcaggtcttttggactatgggatggcacctgggcgtgcctgttttaatactctgttaatatgtggcttgtggactgacttggattttatccactcgtgtggatatgtcccaaaaacttctggtgttatcaatgagtaatcccaattctgttaacttcatggagtggtctgtgctgagccacaacgttagaggaattaactctaccgccaaatggaatgctattcgttgttctattcgagatgcgggttgtgaggttgtttgtttgcaggaaacaaagaaggaattctttgatttggcctatcttaaaaacttttgccctgctccttttgattcttttggttttgttccctcgatggggaactcggcggatctgttatcatttggaagagctctaggcttacaggaaatgttatctttcaaaataattatgcccaatcggtggaattcacttcaaatttgtcggcctgctcctggattattaccaatgtttatgctccttgtacccatcatgggaaaattgattttctcaactggctgcataatatttctataccccctgacaaactttggctactcgttggtgatttcaatttaatccgtcggccgtagaacagaaatagaattgggggggatattaaccttatgctgaagttcaatgaagcgataagcaatttagatttgattgaaatccctcttcacggactcacgtacacttggtcgaacagacagcaggaaccactgcttcagaggcttgattggtttttcatctcgcaagaatggtcgactgtcttcccagactcctatgctaagacaatgtcgcgggacatctccgatcatgttccttgcttggtttcatttaagtccaaaattcctaaacctacgatatttcggtttgagaatttctggcttgaattggatggtttcatgaacctttttcaagctacttggaatgggatccctagcattcccgataaggccaagaatctgactgccaagttcaaaattgttaggaaggttctgaaagaatggcaaagatcgctgccaaaaatagatataacggtgaagaacattaagttgctaattgagcttattgacatcatggaagagcaccggga

SEQ ID NO: 129593 - DNA, 2160 bp, Zea Mays
ttcgtcactagcaaattaaagggaagcgagatcgacctcaccgtccgtgagtccgtcttcttcaactccatcgtcggcgtcgcgcgcgcggagtgtttggttgctcgggagaggagactatatatggagacgaccaagagcttggaggttgctaggggcgccatggacgacgacgaccacgaggaggcgtgggtgcacgactcctccgtcgatcaccgcgggaggtctcccgcccgcgccaccaccgggtcctggaaggccgccatgttcatcatcctgatcgagttcagcgagaggctgagctacttcggcatagccacgagcctcatgatctacctcaccaaggtgctgcaagaggagatgaaggcggccgccaagaatgccaactactggatgagcgtcaccacgctcatgcccctgctcggcggcttcctcgccgacggctacctcggcaggttctccaccgtcgtcgtctccaccgccgtctacctgctgggcctgacggtgctggcgacggcgcagctggcgccggggctggggcccgaccgctcgccgcgcctgcacgaggcgctcttcttcgccggcatctacctggtgtccgccggcaccggcgggcacaagccggccctggagagcttcggcgcggaccagttcgacgaggcccacgcggcggagcgggtgcgcaagatgtccttcttcaactggtggaactgcgcgctctgctcgggcgtcctgctcggcgtcaccgccgtcgtctacgcgcaggaccgcgccggctggggcgccgccaccgtcgcgctcgccgccgtcatggccgcctcgctcgccgtcttcctcgccggccgccggtactaccgctacagggtgcccgagggcagcccgctcacgccgctgctccaggtcctcgtcgccgccttcaggaataggcgactcccgctgccggacgacgacgccgagctgtacgaggtcaggcggccgcagagtggcaagaggaggctgctttgccacacctaccagctgaggttcctcgacaaggcagccatagtagtggagcccggcgccggcgaggacgcctgcgggccgtggcggctggcgacggtgacgcaggtggaggagacaaagctggtgctggcgatggtgcccatctgggtgtgcacgctgcccttcggcatggcggtggcgcaggtgtccaccttcttcatcaagcagagcagcgtgatggaccgtcgcctgggcccgcacttcgagcccccgccggcgtcggtgttcgcgctgtcggcggtggccatgatcggcacggtggcggcctacgacaaggcgctggtgccgtacctgcggcgcgccacgggaggggagcgcgggatcagcatccttgggcgcgtgggcatcggcatggcgttcgccatcgcggggctgggcgtggcggcggcggtggagcggcggcgcctgctgtcggcgggcgccgcgcggccgtcgacgtcggtgctgtggcttgtgccgcagttcgcgctgatgggcgtggccgacgggttcgcgctggtgggcctgcaggagtacttctacgagcaggtccccgacggcatgcgcagcctgggcatcggcctctacctcagcgtcattggcgccgggagcttcctgagcagcctggtgatcacggcggcggaccgcgccagctcccgcggagggcgcgccggctggttcgccaaggacctcaaccgcagcaggctggacctcttctactggctgctggcgtgcatcagcgccgtcaacctggcattctacgcgctggtcgccaccaagtgctcgtacaagcagaccgtcagggccggcagggtcggcgacgaggtcgagtgcgccgcgtagctgctgctgtacgtggtggtcatgaaaccaaccatgcatcagccgcacgaccatgtgtattattactattataggggctaataggaactagctactcgttgatcgtgttgttgctctagctagcttgggtacaagtagtacattcatgccacgtcgtgttgtatatgctgctcgtagacgttggtgtatgtgtactggcgcctggcgcgtcgtcgaaacgatacgtgtacatacaagtgatgtttggttcgttgtagcagtgatttctcagctaaattaattactactataatataa

SEQ ID NO: 129594 - DNA, 1305 bp, Zea Mays
tttttatttcgatccctcaatgattgagaaattatgaattaactattcccttccatttcccatcccctgccgcgctgtttacgcccacatctccttccgtttctcggcatcgtcgacacctccatcggcctccgatctctccacgagcctccgctccaatccgaggatctgcggcggtgggcagtggtcggccggcgatggcgcaccgagtggacaacgagtacgactacctcttcaagatcgtgctcatcggcgactccggcgtcggcaagtccaacatcctttcccggttcacccgcaacgagttctgcctcgagtccaagtccaccatcggcgtcgagttcgccacccgcaccctccagatcgaagggaaaaccatcaaagctcaaatatgggatactgcggggcaagagaggtaccgtgcaatcacaagtgcttactacagaggagccgtgggtgcacttctagtctatgacatcacgaagaagcagacatttgaaaacatacagaggtggctccgcgagctccgtgaccacgcggactccaacatcgtgatcatgatggtcggcaacaagtccgacctgaaccacctgaggtcggttccagaggaagatgggcaggcgttagcggagaaggaaggcctatccttcctcgagacatccgccctcgaagcccttaacgtcgagaaggcgtttcagaccgtcctctccgacatccatcagatcataagcaagaaggcgcttgcagcccaagaggcagcaggtagtggacctccaggtcaaggaaccaccatcaacgttgcggattcgtctgccaacatgaagggagggtgctgctcttcctaggtgtgcagacaaagacatgctgctgctgctgcaaaaaagagagagagaaacctcatggatcgtacgatactttaggtgttatgtaggtgacgactccttttggcctgtaactccggtgggttgtaatcacagttcatacttctgcaaagaaatcctcctctcaggtagatatggcgtgtagtttttgaaattttggtagagagcgatggttggcagacttgcgtggagcccagcttggtgttttctttcagtgttctatcttaagtagccctctgctggaaaaaggacccagatatttcttgtatttgtactcgagtttgcggtgttaccagatatactttgattcctgtgctagaacatccacccgtgtttgccattccgttcttacgaactgcatgtgttgttcttcatggtttcgcccccttgtgatggttggaacatcgtcgtgttgcttgcttgc

SEQ ID NO: 129595 - DNA, 1605 bp, Zea Mays
acatacgtacattatggacgccgccggccacacaaaccgcaggctcgggagtgctccggaacccgccgccgcatccgcacgacgccacggctgacgactgggagccccgttcgcctccaccgccacctccccccgcgtagaagtagagagggaagctttgcagcgagaagccgagaaccctgtcgatctttcctgaagcaatccgctcctgtcgtgagctgaaccctacagttcgtatcacctcctctcgcagcagctgcagaaagagcaagggggatggccaaggacggaggccccgactggaacggcctgttcaagtggagcatcgcccacggagacggcaccaacccgccgcgtgctctcagtgaagaagacagaaaatggtttatggaggctatgcaagccaacacgatagatgttgtgaagaggatgaaggagatcactcgggtgatgagaactccacaagatgtcttgcagtctcagggtgtgaccccagagaacattgaagatatgttggatgagctacacgagcatgttgagtccattgacatggcaaatgatttacattctattggtgggctggatcccctgctcggttacttgaaaaattcaaatgctggcatccgcgcaaaggcagcagaagttgttagtacagtcgtgcagaataatcccaagagtcagcaacttgtcatagaatccaatggactcgagccactgttgataaacttcaaatcagatccaagtacaaatgcacgcacaaaagctttaggagccatatcttctataatacgtcataaccagcctggagtttccgcatttcgcctgggaaatggctatgctggattgaaggatgctcttggttcctatgatgccaaacttcaatggaaagctctcaatctcatacaatacctgttacacaacaaggcagacaggagttttgctacagagcttggtcttccaaagctgatgatgcatcttgcggctagcgatgatcacttggtgcgtgaagctgctctaagcggcctccttgagttgtcacaggaccagacatctggtaatgcgctacctgaccaagacaagctgaaaagagatcctgaagagccgaatcgaagggatcagtgcgatggactctgacgatctccatgccgcacacgagaagcgcagctggtggacacactaatgtaaatgttgttaattaggaagcggatcccagtgtgtgcacgtattgtgcagttgacacttgaaatagcggcgagcataagtgatgattggcgtctacttcatctcttcgctaatggcaaaaatcgtcaacctaggtcagctagggaagaagaagagcggcgtctgccgaagcagcaacagactgtgttgtcggaaaaccgacagataataaaatggaagaagccaccgagcagagtgctcaagatcagctttgcaatatgggtagggggggttgctaatgattttgcagctttcggttgtaaactccaaagtggacttcgtacaacttgggagttgggacgatgtgcatcgctttgtttgaggacttggtgtccaacgatgagcgatctatgctatgtgagctaaaaaatacttatctgttct

SEQ ID NO: 129596 - DNA, 1346 bp, Zea Mays
cattatggacgccgccggccacacaaaccgcaggctcgggagtgctccggaacccgccgccgcatccgcacgacgccacggctgacgactgggagccccgttcgcctccaccgccacctccccccgcgtagaagtagagagggaagctttgcagcgagaagccgagaaccctgtcgatctttcctgaagcaatccgctcctgtcgtgagctgaaccctacagttcgtatcacctcctctcgcagcagctgcagaaagagcaagggggatggccaaggacggaggccccgactggaacggcctgttcaagtggagcatcgcccacggagacggcaccaacccgccgcgtgctctcaggttcagtatatgctgaaaaaaaaactgcacttagtccaagagaagtgggataaaaaatcgtgtggttcttaatttcagtgaagaagacagaaaatggtttatggaggctatgcaagccaacacgatagatgttgtgaagaggatgaaggagatcactcgggtgatgagaactccacaagatgtcttgcagtctcagggtgtgaccccagagaacattgaagatatgttggatgagctacacgagcatgttgagtccattgacatggcaaatgatttacattctattggtgggctggatcccctgctcggttacttgaaaaattcaaatgctggcatccgcgcaaaggcagcagaagttgttagtacagtcgtgcagaataatcccaagagtcagcaacttgtcatagaatccaatggactcgagccactgttgataaacttcaaatcagatccaagtacaaatgcacgcacaaaagctttaggagccatatcttctataatacgtcataaccagcctggagtttccgcatttcgcctgggaaatggctatgctggattgaaggatgctcttggttcctatgatgccaaacttcaatggaaagctctcaatctcatacaatacctgttacacaacaaggcagacaggagttttgctacagagcttggtcttccaaagctgatgatgcatcttgcggctagcgatgatcacttggtgcgtgaagctgctctaagcggcctccttgagttgtcacaggaccagacatctggtaatgcgctacctgaccaagacaagctgaaaagagatcctgaagagccgaatcgaagggatcagtgcgatggactctgacgatctccatgccgcacacgagaagcgcagctggtggacacactaatgtaaatgttgttaattaggaagcggatcccagtgtgtgcacgtattgtgcagttgacacttgaaatagcggcgagcataagtgatgattggcgtct

SEQ ID NO: 129597 - DNA, 773 bp, Zea Mays
accagactcgctctcgcttgcgtagctgcgtcgccattgcgctgcttgcctgctctgtgcctgtcgcgagaggcggaggacgggcgccgcttgtggtcgtcatcccggccgagagaggagggagagtcggagagatggaggtggagcacggcggagagatgatgatgttggtcgaggcggctgcggcggatgaggaggggtggcagacgccgaggcgcgaggactgccgcatccctgtggtgccgccgtgcccggcggcgccgtcgaggaagaaggccgtcgcgatggcgccggaggcggccggagggagcaggcggcgggacccgcccaagggcgggtacttccagccaccggacctcgagtccctgttcgtgctcgcgccgccgagggcacaggcggcggcctcaagccgcgcgtggtaaggcggggcacgtacgcttcggcccgccatggtcctccggccggtgagccgacaatagctagcggaatggtggtagagtagctgtatatgtctacgtgtagttccctactaggtgtacgtaggggttcagctagcagcacatcttacctttccttttggggggagtccttttttgtgtgaagattgctgctctggtgcctctgtgttagctagagattgacaaaagcagtaggagatccatggaggtccaaaaggttcctcaaaagcttggaatctgcgtacgtgcgtgtgtgtgtgaagtacttacctgttacgagcatatgttgtgaatctactttgtgaatctcccgtt

SEQ ID NO: 129598 - DNA, 513 bp, Zea Mays
atgaatcgccgtaaccgtgctggtccgtgccgccagatggatgtggatcggcaacggaaccagcccagccaccgcccaccggaaggtacggtgacgattgacgaagcggcgcgggcgttggtggttgtgcgccggcccgggcgggctgccgtgcgcgagcctgtgacggacggaacggaacgcgtcacgaggaagagggcgtctctacctttttccccacaggccacagcagcagagcagcgcgtggcgagagctaggaggagaggacggagcctcaaaagacgcgtgggcagagcgaggaatctctctgcttgttgcagacaagacgaaacggcgccaacgcaccggtgcgccaaccaaggcgcatgtcgtttacttgctagtactctacttgctgggtgttgctgtgcctgtgctggctggcactggcacccgtccccaacggcgggcaggggccaagagacgacaggagaggggagggaagcgctgccttgtctcaccggcggtaggtga

SEQ ID NO: 129599 - DNA, 1950 bp, Zea Mays
cacgcctcccttgcccgccattaactgcctcacgctcttctcttgctcgctcggctcactccctccacaaagcggcagcctcacgcgctccaccacgccaccaccctccttcctctctatatactcactcctcccgttttccgtccattttcatccatccgcccacagcttcgcagcccgcgcccctaaaaccctagccccggcggatcgcggggcgcctctggtgccagcgacgcggctcgtttgatccgattggttggtcgggccccgccctcgctgccgcgcttcgctccggcggtgtggcggggagagcaccgagcacgcgggaatggggaactgctggggcgcgcggatcaaggacgggagcgctggcgcctcaggaatgttctcaaagagtggtggtaaggatgggagtaggcttagcggctgtagtagtcgagcctcttcagcttccatgcctccaagtgtgaagactgaatgtgaaatcctgcaatccgccaatgttaagatcttcaccttcaataatctcaaggcagccacaaggaatttccgtcctgatagtgttctaggtgaaggagggttcggctctgtctataaaggatgggtcgatgagaacacattatcaccttgcaggcctggcactggaattgctgttgctgtgaaaagactaaatcatgagggtttgcaagggcaccgagagtggtgggcggaagttaattacctaggtcagttctgtcatcccaaccttgtcaagctgattggatactgcttagaggatgagcaccgactgctagtgtacgagttcatgccccgcgggagcttggaaaatcatctgtttaggagaggctcatatttccaacctctgtcatggaaccttagaatgaaggttgcactaggagcagcaaaaggactggcttaccttcatagtggagaggcaaaagttatttaccgagatttcaagacttccaacatcctgcttgatacagattattctgcaaagctttctgattttggattggctaaggatggtcctgttggtgagaagagccatgtgtccacaagagtcatgggaacatatggttatgcagctcctgagtatctctcaacaggccacctaaccgcaaagagcgacatctatagctttggagtcgtacttctggaggtgctgtcaggccggcgggccattgacaagaaccgcccccagggtgagcacaaccttgtggagtgggctcgaccttacctcacacacaagcgcaagatattccggatcctggataccaggctggaaggccaatacaatctcgacggcgcacaagccattgccgccctttctcttgagtgcctgtcctacgaagctaagatgaggccgactatggatgccgtggtaactatcctagaggagctccaagactctggtgaggccgagaagcgtcaaggacccaaggctggaaccaaacaggcgcctgctgctgctgccgcgagcgctagcaagagcagtcgcaagcttcgccggagaaccctgggagggacgaaggagacgactgttggtccaaatccaaaaccattattggcccgttctcgttagcgaggaaagggaaagcgttgcttggtcaggtggtttgggtaggtagactgtagcttgtgaatatgatctgtcctgtgtataacgagggtaaacggattcttttttttggcaacgagtcttgtcgttttttattttatcgtgagctgctcggtttctgcattatctggatcctggatgtcgaaacccatggcatggcatcaagggaggagaggccatgttccgagtgtttaacctgagtcattatgttttgctgcaggctgcatttgttccaggtaataggatgttcagttcagttgactgttccgcagccaggacatgccttagtgccgttgactgttccccagccaggacatgatatgtatccg

SEQ ID NO: 129600 - DNA, 1697 bp, Zea Mays
cacgcctcccttgcccgccattaactgcctcacgctcttctcttgctcgctcggctcactccctccacaaagcggcagcctcacgcgctccaccacgccaccaccctccttcctctctatatactcactcctcccgttttccgtccattttcatccatccgcccacagcttcgcagcccgcgcccctaaaaccctagccccggcggatcgcggggcgcctctggtgccagcgacgcggctcgtttgatccgattggttggtcgggccccgccctcgctgccgcgcttcgctccggcggtgtggcggggagagcaccgagcacgcgggaatggggaactgctggggcgcgcggatcaaggacgggagcgctggcgcctcaggcctggcactggaattgctgttgctgtgaaaagactaaatcatgagggtttgcaagggcaccgagagtggtgggcggaagttaattacctaggtcagttctgtcatcccaaccttgtcaagctgattggatactgcttagaggatgagcaccgactgctagtgtacgagttcatgccccgcgggagcttggaaaatcatctgtttaggagaggctcatatttccaacctctgtcatggaaccttagaatgaaggttgcactaggagcagcaaaaggactggcttaccttcatagtggagaggcaaaagttatttaccgagatttcaagacttccaacatcctgcttgatacagattattctgcaaagctttctgattttggattggctaaggatggtcctgttggtgagaagagccatgtgtccacaagagtcatgggaacatatggttatgcagctcctgagtatctctcaacaggccacctaaccgcaaagagcgacatctatagctttggagtcgtacttctggaggtgctgtcaggccggcgggccattgacaagaaccgcccccagggtgagcacaaccttgtggagtgggctcgaccttacctcacacacaagcgcaagatattccggatcctggataccaggctggaaggccaatacaatctcgacggcgcacaagccattgccgccctttctcttgagtgcctgtcctacgaagctaagatgaggccgactatggatgccgtggtaactatcctagaggagctccaagactctggtgaggccgagaagcgtcaaggacccaaggctggaaccaaacaggcgcctgctgctgctgccgcgagcgctagcaagagcagtcgcaagcttcgccggagaaccctgggagggacgaaggagacgactgttggtccaaatccaaaaccattattggcccgttctcgttagcgaggaaagggaaagcgttgcttggtcaggtggtttgggtaggtagactgtagcttgtgaatatgatctgtcctgtgtataacgagggtaaacggattcttttttttggcaacgagtcttgtcgttttttattttatcgtgagctgctcggtttctgcattatctggatcctggatgtcgaaacccatggcatggcatcaagggaggagaggccatgttccgagtgtttaacctgagtcattatgttttgctgcaggctgcatttgttccaggtaataggatgttcagttcagttgactgttccgcagccaggacatgccttagtgccgttgactgttccccagccaggacatgatatgtatccg

SEQ ID NO: 129601 - DNA, 1624 bp, Zea Mays
cacgcctcccttgcccgccattaactgcctcacgctcttctcttgctcgctcggctcactccctccacaaagcggcagcctcacgcgctccaccacgccaccaccctccttcctctctatatactcactcctcccgttttccgtccattttcatccatccgcccacagcttcgcagcccgcgcccctaaaaccctagccccggcggatcgcggggcgcctctggtgccagcgacgcggctcgtttgatccgattggttggtcgggccccgccctcgctgccgcgcttcgctccggcggtgtggcggggagagcaccgagcacgcgggaatggggaactgctggggcgcgcggatcaaggacgggagcgctggcgcctcaggcggaagttaattacctaggtcagttctgtcatcccaaccttgtcaagctgattggatactgcttagaggatgagcaccgactgctagtgtacgagttcatgccccgcgggagcttggaaaatcatctgtttaggagaggctcatatttccaacctctgtcatggaaccttagaatgaaggttgcactaggagcagcaaaaggactggcttaccttcatagtggagaggcaaaagttatttaccgagatttcaagacttccaacatcctgcttgatacagattattctgcaaagctttctgattttggattggctaaggatggtcctgttggtgagaagagccatgtgtccacaagagtcatgggaacatatggttatgcagctcctgagtatctctcaacaggccacctaaccgcaaagagcgacatctatagctttggagtcgtacttctggaggtgctgtcaggccggcgggccattgacaagaaccgcccccagggtgagcacaaccttgtggagtgggctcgaccttacctcacacacaagcgcaagatattccggatcctggataccaggctggaaggccaatacaatctcgacggcgcacaagccattgccgccctttctcttgagtgcctgtcctacgaagctaagatgaggccgactatggatgccgtggtaactatcctagaggagctccaagactctggtgaggccgagaagcgtcaaggacccaaggctggaaccaaacaggcgcctgctgctgctgccgcgagcgctagcaagagcagtcgcaagcttcgccggagaaccctgggagggacgaaggagacgactgttggtccaaatccaaaaccattattggcccgttctcgttagcgaggaaagggaaagcgttgcttggtcaggtggtttgggtaggtagactgtagcttgtgaatatgatctgtcctgtgtataacgagggtaaacggattcttttttttggcaacgagtcttgtcgttttttattttatcgtgagctgctcggtttctgcattatctggatcctggatgtcgaaacccatggcatggcatcaagggaggagaggccatgttccgagtgtttaacctgagtcattatgttttgctgcaggctgcatttgttccaggtaataggatgttcagttcagttgactgttccgcagccaggacatgccttagtgccgttgactgttccccagccaggacatgatatgtatccg

SEQ ID NO: 129602 - DNA, 2028 bp, Zea Mays
ctgccttctcttctctcccgtatatatgtttcacatccattatatattatataatataaataacgcaaggcctcctccactaaccaccaaaacaaacaaacaaaaaataaaggggccgggaagctaaggcaaatgaacaagctagctagccccgcatccggcctcctttaattttattccactcgctcgcttttgccatccgcccggcgggatcccatctctttcttctcctagctagctttagtttccccggcccccttcttcttcctctctatccctagtggcactagcgcagagaggcccttatctcctctccgtctcttccgcttcgccgtcatgcattccattccagtggtcgctcgcggcatgcagcagcctgctagcgtagagagcgagagcgagagcgagagggctcgccgctagtggatgttattctccgatccacctttaccatcgatgatgcacccctccctcgcccccatccttgcatgatccgatcccctaaagcgcctatatacccttatcttgcaaactaaagcaagcaggagagagctgggcgactgcgaggaggaacaaacaaacaaaccaaccagaaaagaagctctctcacacaagtagtagcaaaagatcaaaagaaatcaattctataccatggtcttttcttcggttcctgtctaccttgatccacccaattggagccagcaccaccaccagccgcagcagcagcagcagcaacagcacgctcaacatggccagcttccaagtggcggcaacggcggcggcggcggcggcatggacacgcatgcgcatcatcatcatcatcagctgccgccggtgccacctcctcctagcggggctctcatggctcctcgccctgacatgtcggctatggtccctgctgcgagcggtggtggcgggccgactagcggcggcaccgctatccgtccgggctccatgaccgagcgggccaagctcgccaagatcccgcagccggagccggggctcaagtgcccgcgctgcgagtccaccaacaccaagttctgctacttcaacaactactcgctctcccagccgcgccacttctgcaagacgtgccgccggtactggacgcgcggcggcgcgctccggaacgtccccgtgggcggcgggtgccgccgtaacaagcgcaccaagtcgtccaagtccaactcgtcatcggccgccgcctctgcttcaggcggcgcgggcgggacgtcgtcgtccacctcgtccaccgctaccggcggcagcagcagcgcgggcgccatcatgccgtctcatcaggggcagctgcagccgttcctggcctcgttgcaccaccctcttgccggcggcggcggcggcggggatcactacagcaccggcgcgtcaaggttagggttcccaggactgagctcgctggaccccatggactaccaccagttcggcgcgggcgcgggcgccggcgccagcagcgctgccatcgggctagagcagtggcgtctgccgcatatacagcagttccccttcctaagcggccgccccgaccccgtgcaaccaacaatgtctagcatttacccgttcgacttggaagggcacggcggggacgctcccggcttccccggcgggcacatgctaggtgcctccaaggtgcccggctcagccggactaatcacgcagctggcatcggttaagatggaggacaacccagcgtctgcggcgatggcgagcagctcgccgagggagttccttagcctccctgggaacctccaattctggggcggcggcggcaacaacaacggcggtgcaagtggcaacaatggaggaggcgctggcaacggcggtggtggtggcggcggtggcgctgtcgctccgggcagcagctgggtggacctgtcaggattcaactcgtcttcgtctgggaacgtcctgtgacatgccctctggtctgcatgctagctgcattaaaaaggtagccctattatttatgcaaagccttgaatcttcattttagtcatggcttctgagaaa

SEQ ID NO: 129603 - DNA, 535 bp, Zea Mays
ctcgcaatgtgcccaggctctttgcagttccagcaaacagtttttgaggtgcattctgctgcgaagtggcctggaaggttacagttattgcacgtaggcgcagatgggcactccttagcaaagtgcccaggtctccggcagttcttgcatacgagatccctgtatccacgccgttctctgcgacggtatgggctgcggctcctgctgcgactgcgactgtggcggggtgcacgttcgctgcgcaacctatctcttcgctgaggactgcggctcctgctcctgctgcgactgtggctcctgctcttgcttcttgatgaagtcatcaaaaacgaaaccgaatgtaacagggacaccaaaaggaagtttcggcagccaggctcagagtatctggtggtgctcgtcgccggcaaaggggcggaaaatcacctcggcacctggcgtagggcggcagcgacggccgcccagttgccgccacgaggcgcggtgggcggcgagggagtgctcgcacgctcttcgctgggagagtgggggttaa

SEQ ID NO: 129604 - DNA, 1377 bp, Zea Mays
cgtgcccagccgccgagtgcgttcgtacgtgcatcggatgcactgcatgaattgagagcatcatcatatcatacgcaggagtagtacgacgccgctgctgtcttgtccggctaatgctttgctcacagattagtccatggcccacggtcggtgtggtgtggatcgctgatgccactgctttttgtttggtttttattcccctgataatcctccgcgtccctgaatgtatctatttattttcattccgaaatccctttcacgaaaaagaaaacgaataaaaagagagttacgaatacgcttccggcggcccacatcaccttccagcgaacatcgcgccgcgctgacgtgtcgcccatcgcggccgtccatatcgccatccgacgaccgtggaagctggcagcggccgctccgttccgtcgaaggggcaggtcagtcaggtcacccacacggccacacccgcgcgggggatacgcggtggaaaacccggcgaccacatcaaaacacgaggcgtctcccgcaggactggtcactcggcacgcaggcagaggcagcacagcagcagccagctccatccatcctctttcccctcctcgcttcgcttcctcggcggattcctcctccctcggccgtccccgtcccctttttcggcgcgcgagctcgcccgagatggcaaacgcgagatcgggtgtcgctgtgaatgacgagtgcatgctcaagttcggcgagctgcagtcgaagaggctgcaccgcttcctaactttcaagatggacgacaagttcaaggagatcgttgtggaccaggtcggggatcgcgctaccagctacgaggacttcacaaacagcctccccgagaatgactgccgatacgcgatctatgatttcgactttgtcactgcagaagatgtccagaagagcaggatcttctatatcctatggtccccatcctccgccaaggtgaagagcaagatgctttatgcaagctcaaaccaaaaattcaagagtgggctcaatggcattcaggtggaactgcaggctactgatgcaagtgaaatcagccttgatgagatcaaggatcgggctcgctaggcatcatgatcatgcatcatggactcggcctactactgtggatttgtatgccattatagacttggtgctgtgaaagactgcttgatgatttgcgggtttgttgctgtgtaaaaaaaggtcccatggctcccagaagaccatgaaggttcggatctatcatgtaattccttgttatctgccaattatgtatggactatggacatgtgttgcgctgttcaacttactactacaaataagtaatcgatatgttcccttcccatgtctcggtgacaattgtctggagaagcttag

SEQ ID NO: 129605 - DNA, 647 bp, Zea Mays
agtcccaacatcttgagctcgatcgcaaaccctcagacacttgttcccccagccgacgtacatgaagcacccgagagacatcggcgccatgccgctctccctcgcgctgtccctcggcgccggcgtggcccccgggcacggcagcagcaagcggccccggcgcgcggcgggcggcggggacggcgagttcgtctgcaagacgtgcagccgcgccttcgtctcgttccaggcgctgggcgggcaccggacaagccacctgcgggccggccggcacggccttgcgctcgggatgcccgcgccggcgccggcgaaggaggcgccgccgcccgcgacgacccacctgtgccacgtctgcgggctcggcttccagatgggccaggcgctaggcggccacatgcggcgccaccgcgaggaggctgccgccaccaccgcgcaggcgccgcccgtcctcctccagctcttcgtgtagagttttgcccgtccacggagtctagctagtagaggaattcttcgcgttcctgtcgtcactcgtgagtctgctgcgcatcgtagattcacagtacagttgttggcgtcaattcattcattcattcatttagttgtatacatgtaaataactgattagttattttattgttcctaatcta

SEQ ID NO: 129606 - DNA, 1300 bp, Zea Mays
ctccccggtccacgtcgcgacgcggcgccgtgcgttccggtgccttccccccggacccggatcggtgctgccttccgcctcacgtcggtctcggtccaccaacctggcgaacacgtaagccccgcgcgcagcagagcacccaccgccgagtcttgcttggacggacggagtcggagaggagacacaacaacctataaaagggcggccgctctctctctcacccacaccacaccacctccgcacgaaaaacatcaccgcatcttctttccgagcagtacgtagtacgtacgtagctgaattgctgaaaagagaggcggagatccgatccgaccgcgaagagatgactcacccgaggccggatcatgagccggcgggcgaggtgtcgctggcgctggcgctgagcacggactcgtccggcggctccgcgggtgccccggcggcgaagcgggcgcggcggaggggcgccgcggcggccacgtcgggggagggggagttcgtgtgcaggacctgcagccgcgccttcacctcgttccaggcgctcggcggccaccggaccagccacctgcggggccgccacggcctcgagctcggcgtcggcgccagggcgctcagccggcagcagcacaagcatcatcagcaggccggcgacggcggcggaggagacagggagccgctggcgcagcacgagtgccacgtctgcgggctcggcttcgagatggggcaggcgctgggcggccacatgaggcggcaccgcgaggagacgacgacgggcgccgccgacgcctgggtctggcgcgccgacgacgcgctgcagcgggcccgcgggggcgccgccgacccgcccgtcttgctcgagctcttcgcctagctagctagatgatccgtagcggcggcattgattagtatataatccacccaggacatgtaaatcttcttaggccctgtttgggaacaaagtttttgaaaaccacagtttttgaaatactatactatactttagttatgacaataccgtagtttataataccgcagttttgaaaactgaggtccagagctaagtttagaatgccttaaaacaactatagtatttgcaatacttcagttttgaaaacagagattttacccagcttgccaaacaccattatatatataatactgcagtatttgagaatactgcagtattcttccaaaactgcagaaaaactttgttcccaaacatccccttagttctgcatgcatgcatgcatctggttgcttgcttctgtaattataattacgatggtacgcacgtagttggatt

SEQ ID NO: 129607 - DNA, 2162 bp, Zea Mays
gcgctttacgggtttggacctcacctgtcaggctgtcacctcatacagtacgctcggctctaccgggcagatgcacccatctgtttcgcggagaagcccgtcctcgtcggagtgtagaggggcgaagcgatccgaactccgagaaccccagggccagggctcagtccacagcgagagcagagaacgcagcggcctgccggcctccgccccgcactcccgcagccatggccgccgccgccgccgtggttgccgagcccaagaccaagtacgatcgccagctcaggatatggggtgatcaaggccaaactgcactggagaaggccagcatatgcttgcttaactgtggtcctaccggaacagaagcattgaagaatctcgtgcttggaggaataggaagtgtgactgctgttgatggctccaaagttgaagcatctgatctggggaacaattttatgttggatgaaggatgtttggggcaaccaagagctaaatctatatgttcattcctacaagagcttaatgacgctgttaaagccaagtttgttgaggagtttccaacgcatttgatagacactaatccttcattcttttcccagtttactgttgtcattgctactcagcttccagagagttctttactgaagctagatgatatttgcaggaaagcagacatcgttttggttgctgcacgttcatatggtctaactggtttggtcagggttagcgtcaaggagcactgtgttatagaatcaaaaccagatcacttcttggatgatttgcgacttcacaatccatggactgaactaaagcaatttgcaaaatcaattgatataaatgataaagatcctgttgtccacaaacatactccatacattgttgtccttgtgagacttgctgaaaaatgggcagatgcccatgatggtaacatgccttcaactaggcaagaaaagaaggaatttaaggacctaattcgagcccacatgcttaatgtagatgaagaaaattacaaagaagctgtggactcatcatataaagtctcagtcactccaggaatcagtaatgagatccatcagataattgatgatgactctgcggaagtcaattcatcatcagaagatttctggattttagtagctgctttaaaggagtttatttccaaggagggtaatggtgagctacctctggagggaacaatacctgatatgacttcccttactgagtattatgtaagcttacaaaagatttaccaagctaaggcagaatttgactgtcttgccctggagcatcatgtaaaggaaatcttgaaacagattggtagagatccggattctatttcaagagcatatatcaaaacattttgtaaaaattctaggaaactaaggatttgtagatatcgtagtttcaaggaggaatttagctccccgattgtctctgagattcagaggtatttcagcgatgaagactgcagttacgcaatgaacttctacattctactacgggctgtcgatcgattggctgccaattatagccgattacctggaatcttcgacagtgagattgacgaggatatccctaggctgaagacagttgcggcttcagtgctaagcgagatgggtttgaacggagcatccttatcccaagacctggtaaccgagatgtgccggttcgggggtgcggagattcatccagtggctgctttcatcggtggagtcgcttcacaagaagtgattaagctggtcaccaagcagtttgtgcctttggggggaacattcatttttaatggaatcgatctcaaatctcaagttttggtgctataacatggatgtggagcgttggatttgagctggtccagattttgtgccagggcaccgcgctgcccaacgagtacccaagtctcgcagaaaatatcaatacttgcttcgtatgattttttgccaaatgactagcaaattcctagctcacgcggctgttatgcgtaaaaccagaagagctgctgcttttagactacgcctgttatatattagtaggcgaagtaatatgtcagtggggctgatgtgataagatggatggtgttaaagactagcgtgtgcgcgatttgacgaagacgactacgagacgggatgagcaatgagcatgtcggccgagctatggacgcttccatc

SEQ ID NO: 129608 - DNA, 2138 bp, Zea Mays
gcgctttacgggtttggacctcacctgtcaggctgtcacctcatacagtacgctcggctctaccgggcagatgcacccatctgtttcgcggagaagcccgtcctcgtcggagtgtagaggggcgaagcgatccgaactccgagaaccccagggccagggctcagtccacagcgagagcagagaacgcagcggcctgccggcctccgccccgcactcccgcagccatggccgccgccgccgccgtggttgccgagcccaagaccaagtacgatcgccagctcaggatatggggtgatcaaggccaaactgcactggagaaggccagcatatgcttgcttaactgtggtcctaccggaacagaagcattgaagaatctcgtgcttggaggaataggaagtgtgactgctgttgatggctccaaagttgaagcatctgatctggggaacaattttatgttggatgaaggatgtttggggcaaccaagagctaaatctatatgttcattcctacaagagcttaatgacgctgttaaagccaagtttgttgaggagtttccaacgcatttgatagacactaatccttcattcttttcccagtttactgttgtcattgctactcagcttccagagagttctttactgaagctagatgatatttgcaggaaagcagacatcgttttggttgctgcacgttcatatggtctaactggtttggtcagggttagcgtcaaggagcactgtgttatagaatcaaaaccagatcacttcttggatgatttgcgacttcacaatccatggactgaactaaagcaatttgcaaaatcaattgatataaatgataaagatcctgttgtccacaaacatactccatacattgttgtccttgtgagacttgctgaaaaatgggcagatgcccatgatggtaacatgccttcaactaggcaagaaaagaaggaatttaaggacctaattcgagcccacatgcttaatgtagatgaagaaaattacaaagaagctgtggactcatcatataaagtctcagtcactccaggaatcagtaatgagatccatcagataattgatgatgactctgcggaagtcaattcatcatcagaagatttctggattttagtagctgctttaaaggagtttatttccaaggagggtaatggtgagctacctctggagggaacaatacctgatatgacttcccttactgagtattatgtaagcttacaaaagatttaccaagctaaggcagaatttgactgtcttgccctggagcatcatgtaaaggaaatcttgaaacagattggtagagatccggattctatttcaagagcatatatcaaaacattttgtaaaaattctaggaaactaaggatttgtagatatcgtagtttcaaggaggaatttagctccccgattgtctctgagattcagaggtatttcagcgatgaagactgcagttacgcaatgaacttctacattctactacgggctgtcgatcgattggctgccaattatagccgattacctggaatcttcgacaggctgaagacagttgcggcttcagtgctaagcgagatgggtttgaacggagcatccttatcccaagacctggtaaccgagatgtgccggttcgggggtgcggagattcatccagtggctgctttcatcggtggagtcgcttcacaagaagtgattaagctggtcaccaagcagtttgtgcctttggggggaacattcatttttaatggaatcgatctcaaatctcaagttttggtgctataacatggatgtggagcgttggatttgagctggtccagattttgtgccagggcaccgcgctgcccaacgagtacccaagtctcgcagaaaatatcaatacttgcttcgtatgattttttgccaaatgactagcaaattcctagctcacgcggctgttatgcgtaaaaccagaagagctgctgcttttagactacgcctgttatatattagtaggcgaagtaatatgtcagtggggctgatgtgataagatggatggtgttaaagactagcgtgtgcgcgatttgacgaagacgactacgagacgggatgagcaatgagcatgtcggccgagctatggacgcttccatc

SEQ ID NO: 129609 - DNA, 2256 bp, Zea Mays
gcgctttacgggtttggacctcacctgtcaggctgtcacctcatacagtacgctcggctctaccgggcagatgcacccatctgtttcgcggagaagcccgtcctcgtcggagtgtagaggggcgaagcgatccgaactccgagaaccccagggccagggctcagtccacagcgagagcagagaacgcagcggcctgccggcctccgccccgcactcccgcagccatggccgccgccgccgccgtggttgccgagcccaagaccaagtacgatcgccagctcaggatatggggtgatcaaggccaaactgcactggagaaggccagcatatgcttgcttaactgtggtcctaccggaacagaagcattgaagaatctcgtgcttggaggaataggaagtgtgactgctgttgatggctccaaagttgaagcatctgatctggggaacaattttatgtgtaatttctttgctatgtgattccacctgttcttctgaattcatccccagaaattgatggaactcatattctggtaccttatatttgcattcagtggatgaaggatgtttggggcaaccaagagctaaatctatatgttcattcctacaagagcttaatgacgctgttaaagccaagtttgttgaggagtttccaacgcatttgatagacactaatccttcattcttttcccagtttactgttgtcattgctactcagcttccagagagttctttactgaagctagatgatatttgcaggaaagcagacatcgttttggttgctgcacgttcatatggtctaactggtttggtcagggttagcgtcaaggagcactgtgttatagaatcaaaaccagatcacttcttggatgatttgcgacttcacaatccatggactgaactaaagcaatttgcaaaatcaattgatataaatgataaagatcctgttgtccacaaacatactccatacattgttgtccttgtgagacttgctgaaaaatgggcagatgcccatgatggtaacatgccttcaactaggcaagaaaagaaggaatttaaggacctaattcgagcccacatgcttaatgtagatgaagaaaattacaaagaagctgtggactcatcatataaagtctcagtcactccaggaatcagtaatgagatccatcagataattgatgatgactctgcggaagtcaattcatcatcagaagatttctggattttagtagctgctttaaaggagtttatttccaaggagggtaatggtgagctacctctggagggaacaatacctgatatgacttcccttactgagtattatgtaagcttacaaaagatttaccaagctaaggcagaatttgactgtcttgccctggagcatcatgtaaaggaaatcttgaaacagattggtagagatccggattctatttcaagagcatatatcaaaacattttgtaaaaattctaggaaactaaggatttgtagatatcgtagtttcaaggaggaatttagctccccgattgtctctgagattcagaggtatttcagcgatgaagactgcagttacgcaatgaacttctacattctactacgggctgtcgatcgattggctgccaattatagccgattacctggaatcttcgacagtgagattgacgaggatatccctaggctgaagacagttgcggcttcagtgctaagcgagatgggtttgaacggagcatccttatcccaagacctggtaaccgagatgtgccggttcgggggtgcggagattcatccagtggctgctttcatcggtggagtcgcttcacaagaagtgattaagctggtcaccaagcagtttgtgcctttggggggaacattcatttttaatggaatcgatctcaaatctcaagttttggtgctataacatggatgtggagcgttggatttgagctggtccagattttgtgccagggcaccgcgctgcccaacgagtacccaagtctcgcagaaaatatcaatacttgcttcgtatgattttttgccaaatgactagcaaattcctagctcacgcggctgttatgcgtaaaaccagaagagctgctgcttttagactacgcctgttatatattagtaggcgaagtaatatgtcagtggggctgatgtgataagatggatggtgttaaagactagcgtgtgcgcgatttgacgaagacgactacgagacgggatgagcaatgagcatgtcggccgagctatggacgcttccatc

SEQ ID NO: 129610 - DNA, 862 bp, Zea Mays
aaacttagagagtgaagactgaagactcccgcgctttacgggtttggacctcacctgtcaggctgtcacctcatacagtacgctcggctctaccgggcagatgcacccatctgtttcgcggagaagcccgtcctcgtcggagtgtagaggggcgaagcgatccgaactccgagaaccccagggccagggctcagtccacagcgagagcagagaacgcagcggcctgccggcctccgccccgcactcccgcagccatggccgccgccgccgccgtggttgccgagcccaagaccaagtacgatcgccagctcaggatatggggtgatcaaggccaaactgcactggagaaggccagcatatgcttgcttaactgtggtcctaccggaacagaagcattgaagaatctcgtgcttggaggaataggaagtgtgactgctgttgatggctccaaagttgaagcatctgatctggggaacaattttatgttggatgaaggatgtttggggcaaccaagagctaaatctatatgttcattcctacaagagcttaatgacgctgttaaagccaagtttgttgaggagtttccaacgcatttgatagacactaatccttcattcttttcccagtttactgttgtcattgctactcagcttccagagagttctttactgaagctagatgatatttgcaggaaagcagacatcgttttggttgctgcacgttcatatggtctaactggtttggtcagggttagcgtcaaggtacttttttctctcgaacacgcaggagaactgcgcgtcattatattaagaggaaaaaaggtcccaagtggaccaagaaaacaaagtgcccgagaaggcag

SEQ ID NO: 129611 - DNA, 1208 bp, Zea Mays
aatagtacgcccggtgcacacctgtaatttccccccaaaaggtccaaaggccgaagcagaccaattcaagcaccccacgggagcgcgtccatccccttccgccgatcgagccagggcccagggccgagcaacctggtgctccgcccctcgccgttacagcggcgcctcggtctccggttccacagcgtctgcctgcctgcgcggccctgtgaccgtgaggcgacacgacgccgagagatcacccgccccccgcatcgagtcggccccgtttggttcgtctcgccattccgccccgtgttagtttcggttcgcgtttccgatctgatctggttccgtgctggtgctagggattgtgaggtaaagcgtgatggcagcgccgccggcgagggctcgagccgactacgactacctaatcaaactgctcctcatcggagacagcggcgttggaaaaagttgcctcctgttacggttttcagatggatcattcaccactagcttcattaccactattggcattgacttcaagataagaactgttgagttggatggcaaaaggattaagttgcagatctgggatactgcaggccaagaacgtttccgcacaattaccactgcctactacaggggagcaatgggcatcttacttgtgtatgatgtcacagacgagtcatctttcaataacataagaaattggatcagaaacattgaacaacatgcttcggataatgtgaacaaaattctggtggggaataaagctgatatggatgaaagcaaacgggctgtgcccacttcaaagggacaagctctcgcagacgaatatgggataaagttctttgaaacgagcgcaaagacaaacctgaacgtcgagcaggttttcttttctatagcaagggatatcaaacagagactttcagagactgattccaagcctgaggatcgaactatcaagatcaaggctgaaggggaagctgatgcagcagaggcgcagaaatcagcttgctgcggctcttgaacggttgtggccgcaggatagtttcataatttttattctttgccagcaagtctctccttgtgcttgagctatcacaattgttgtggtttggacaagtgggtgttacgtcagaactaattacttgctatattgtggaaaccctgctcttgataacgacgatcgcatatgcaactgggtgggtgggtgggtggtttga

SEQ ID NO: 129612 - DNA, 1347 bp, Zea Mays
acccgacccattgccaatgaattggcttattttatcataaattagctgttctatctataccatacccggcctattggcaatgaatgggcttattttctcataaattagcccagtttaagtaccaaaacggccactgtacctgcccgaatcaagtaccaaacaggcaaacagctactgtacataaaaactgggctatcctgggaagaggcacgacccaatagtacgcccggtgcacacctgtaatttccccccaaaaggtccaaaggccgaagcagaccaattcaagcaccccacgggagcgcgtccatccccttccgccgatcgagccagggcccagggccgagcaacctggtgctccgcccctcgccgttacagcggcgcctcggtctccggttccacagcgtctgcctgcctgcgcggccctgtgaccgtgaggcgacacgacgccgagagatcacccgccccccgcatcgagtcggccccgtttgggattgtgaggtaaagcgtgatggcagcgccgccggcgagggctcgagccgactacgactacctaatcaaactgctcctcatcggagacagcggcgttggaaaaagttgcctcctgttacggttttcagatggatcattcaccactagcttcattaccactattggcattgacttcaagataagaactgttgagttggatggcaaaaggattaagttgcagatctgggatactgcaggccaagaacgtttccgcacaattaccactgcctactacaggggagcaatgggcatcttacttgtgtatgatgtcacagacgagtcatctttcaataacataagaaattggatcagaaacattgaacaacatgcttcggataatgtgaacaaaattctggtggggaataaagctgatatggatgaaagcaaacgggctgtgcccacttcaaagggacaagctctcgcagacgaatatgggataaagttctttgaaacgagcgcaaagacaaacctgaacgtcgagcaggttttcttttctatagcaagggatatcaaacagagactttcagagactgattccaagcctgaggatcgaactatcaagatcaaggctgaaggggaagctgatgcagcagaggcgcagaaatcagcttgctgcggctcttgaacggttgtggccgcaggatagtttcataatttttattctttgccagcaagtctctccttgtgcttgagctatcacaattgttgtggtttggacaagtgggtgttacgtcagaactaattacttgctatattgtggaaaccctgctcttgataacgacgatcgcatatgcaactgggtgggtgggtgggtggttt

SEQ ID NO: 129613 - DNA, 1391 bp, Zea Mays
acccgacccattgccaatgaattggcttattttatcataaattagctgttctatctataccatacccggcctattggcaatgaatgggcttattttctcataaattagcccagtttaagtaccaaaacggccactgtacctgcccgaatcaagtaccaaacaggcaaacagctactgtacataaaaactgggctatcctgggaagaggcacgacccaatagtacgcccggtgcacacctgtaatttccccccaaaaggtccaaaggccgaagcagaccaattcaagcaccccacgggagcgcgtccatccccttccgccgatcgagccagggcccagggccgagcaacctggtgctccgcccctcgccgttacagcggcgcctcggtctccggttccacagcgtctgcctgcctgcgcggccctgtgaccgtgaggcgacacgacgccgagagatcacccgccccccgcatcgagtcggccccgtttgggattgtgaggtaaagcgtgatggcagcgccgccggcgagggctcgagccgactacgactacctaatcaaactgctcctcatcggagacagcggcgttggaaaaagttgcctcctgttacggttttcagatggatcattcaccactagcttcattaccactattggcattgacttcaagataagaactgttgagttggatggcaaaaggattaagttgcagatctgggatactgcaggccaagaacgtttccgcacaattaccactgcctactacaggggagcaatgggcatcttacttgtgtatgatgtcacagacgagtcatctttcaataacataagaaattggatcagaaacattgaacaacatgcttcggataatgtgaacaaaattctggtggggaataaagctgatatggatgaaagcaaacgggtacggaaactatatattttgtacttgtatttgatcattcaaactttatacatgctcaatttctttcgtaaaggctgtgcccacttcaaagggacaagctctcgcagacgaatatgggataaagttctttgaaacgagcgcaaagacaaacctgaacgtcgagcaggttttcttttctatagcaagggatatcaaacagagactttcagagactgattccaagcctgaggatcgaactatcaagatcaaggctgaaggggaagctgatgcagcagaggcgcagaaatcagcttgctgcggctcttgaacggttgtggccgcaggatagtttcataatttttattctttgccagcaagtctctccttgtgcttgagctatcacaattgttgtggtttggacaagtgggtgttacgtcagaactaattacttgctatattgtggaaaccctgctcttgataacgacgatcgcat

SEQ ID NO: 129614 - DNA, 102 bp, Zea Mays
cgggtcattgtagccgccacaactactacagtgatagaggagagggtaccggtgattggtgaacacggtcttagctagctaggcagctgggacaggcgtcat

SEQ ID NO: 129615 - DNA, 698 bp, Zea Mays
atggccgccctcaaccccatggtcgagctcgcccaaccaatcgcctccatcgcaggattcgtcatcgactcgagccaggtgagggttcagcgtggaggtttgtcgaggtctgctgctcgtagctcccgtcgctccactcaagatccagcagaagtggagcaactgcgagaagaacttaggcgacatcaggattacttgaagcaacaagttgcgcaacatgaatattatgctacacagattcaacaacagcaaacactcatacaacaactagcacaggccccaagggatacacgtctcggtgccccccacctcccgttcattatacttagtcttcacctccacctatacctacatctccatctaccgaacattagacccctccagctaccttgccgacgcatgaacgagaagataggttagactttgttgaaaccctcttcgctagtggaggtatcgaccatcactcgtcactgtaacccgatggtgatcggcgaccgtgagctttcatgttattgtgttctgatacttgagacttttattatgactatgtatgagatattgtctcttattagtattggatgatgagatatgtcttattatgactatggatgtgacttttgtgatgtaattgatgagactatggatttaaatattgttatgtgattgtgtgtgagatgttttatgcgaaaatatgttat

SEQ ID NO: 129616 - DNA, 949 bp, Zea Mays
aattaattccgtccaaggaatctcttcctggtcaggtaattctctcgtagttcagttgtagccgttgagacttgggaggcaggcgacatgggtggcgggaaggacgacggccacgatccctccaaggcggacaagggattccacggaggagggtacccggccgccggtggatactacggcggccagtaccccggcggcggctaccctgctccaccgggcggcggtgcgtaccctcccgggcctgggtacccggtaccacctggtgggtacccgcctccgggtggctaccctcagcctggcggatacccgccgtcgcacggggcgtacccggcgccgggtgcaggcgcgtatcctcccagcgggtacccccatcaaccggtctacccacagcctggctatccatcgatgcccggtcatggtggcatgtacggaggaggccacggtgcagggggctctgcaggccacggggcgatgctggccggaggtgccgcggcggcgtacggagctcacacggtgtcccactcccacgggatgtacggccacggccacggacacggcaagttcaagcatggcaagttcaagcacggcaagtttggcaagcacaagaagatgtttggcaagcacaagaatatgttcggccgcaagtggaagtgattaacgtacagcttaatccgattctggacgagcagacgtatatatatacactggagtccagaatgctaagttatgctattttgattatgattcgaatacgggaggttgttagggttgtggaagtacgtactgacggctgcctgtaagctttgttggagttgttcttgccgtgttggcagtccgaattaatttaaccatcggttgtgtcgaacagcatctccagctgccgacaaatagacgagagtgatcaaagttttttttaaaaaaaaaatcaacatcgtcgtatatttgtgaa

SEQ ID NO: 129617 - DNA, 1618 bp, Zea Mays
gggtttttagtcgagatggtaaataatgtatgacgcgcgtgtggaccaagagtcatggcttgctgtacttgtggtttctgagctgcaacactcaatcgactactaaactaaggtaataactaggttagtgcccgtgcgttgcaacggaaacatataatatcatgataatttaaagagaacccagagaacaatcctgattgtactattgtatatattggcaaccttggacatgaggtagaaccaaattactgcataaccatgttcatcgttccaatttgttctagctctccgtggagcacattgtcccttcgtatcggaggacggagaaccggctgattctcagagaacgccggtggggcagaggaaaaaggacggagggagaactcacctcgacgaaaaccaatgtgacgagggcggacgcgaggtgacggtggagtagatgaacagtcagggtgcgagcacgcctcatttacaaatctctcattaccgatttgggatcctacaggcctcaaattctctcccggcaggtagattcccgtactttggtatttttgtttgatagatacatgccagctgcatgctggcgctatatgacaaccatacaatgtttctggtatcaacctgttagtgttttaggcaacgacaaaagcaacggtgctagcgttcataaatattcttcagtacatggctcttctccaattcttaactctttgatcccaagcctaaacccaacaataacggtttgcgtccctatcaacagttcgtgcaaaattttggatccaatgcccacatgtcatcggttctactcttaatgagacatagttttcgaaaaggaaacataactaacataaatcaaattggtaagcaaactctacaacgcaaaatggtacggagtcatgaattagaaggtctcgacagttgggttgcaacattttttctttaaaattgacaaccagtaagtaacatcaaagaatcatgtagggtttcaacagttagcctagacatatttatgtgtgcccagatatcaatttgattaagcaggatatcaagaacatagcaaagcactcatcaagcttacctttctacattgtaggaagaagaacgtttaagcgccggatacctcttagccggaccatctctttgcgtcttcttggtctcaacaaggctcccgctgaagtactcctgctcctacagctttatccccatcaacttggggttttctgagagacagtcgagctcgcccatcatcatggtgcgcgagatcagcggcgaggggagcaacctaaggttcgggaacctcggcttgcacatctgaacgaccccagcgttcccgtgatccttcaccgagagcgagccacaggtgatgagctgcatcagcacgctcaccggcctcagcttcaggcaggcgcgcgcgccgacgtcttcctctttgaggatcctgaagctgtccatcatcacgttgtccgggcgtatcagtcactctagtagttaatccttaacatgatgtatacatgcaataaatactcttatggatttttagcattgttgtttataggcagtgccggtcctgacattttagaggctcgggacaagacttataatagaggccctttataat

SEQ ID NO: 129618 - DNA, 282 bp, Zea Mays
atggcgcccaccaggatccgcgtggccttgctgagcttggcgctggtggggctgctcatctgccacctcgccaccaccgcctccgccggcaagaacagaatccgcatcctcgacagcgtcgacgactcggccggggacaacaacagctccgacgcctcggccggggacaacagcaccgactccgagtcggaaggccgcgtcgtctattccgacatgaagctggctgatgagacgggatctgcgccggctccggcaccggcgccggggccgacgaccagttga

SEQ ID NO: 129619 - DNA, 1354 bp, Zea Mays
ccttgagaaaatggagtttctaaactagttcttatctttttttcccagttttatccttagagggcagatgctgctgcagctcaagatagccacacacacagacagtgacacacttaagagctcgagatctcactctcctcacctcagctctcagagaggaaggacactgcggccgggcgatggcgagcgtggagggcaagagggagacggtgctggtcaccggcgccagcggcttcatcggatcgaccctcgtcggcctcctcctcgaccgcggctacaacgtccacgccagcgtcctcaaccccgatgacaaggcggagacggagcacctggtcgccctgggcgccggcgccggcgagggccggctgcgagtcttcccgggcgacctcctcgacggcgccgcgctcatggccgccgcgcggggctgctcgggcgtgttccacctcgccaccccctgcaccgtctaccccgtgagcgacccgcaggggcagatggtggtgccggcggtggagggcacgctcaacgtcctgcgcgccgccaaggaggcccgcaccgtgcggcgggtggtggtcacctcgtccagctccgccatcatacccagccccgcgtggcccgccggcgagccccgcgacgagcggtgctgggccgacgtcgactactgcaagaagaacgaggtctggtaccctgtttccaagacgctggcagagaaggcggcgtggaggtttgcggaggagaacggggtagacgtggttgtcgtcaacccggtgactgccatgggcccaatgattccgcccaccatcaactgcagcatgatcgtgctcctacgcctgctacaaggttgcacggaggagtacagggacatctggatgggggcggtgcatgtgcacgacgccgccatggcgcatatcctggtgttcgagagcccggcagcgtccgggaggcacatctgcgcccagtccatctcccactggagcgacttcgcggccaaggtcgccgagctgtaccctgagtacaaggtgcccaagttccccaaggatacccagcctgggctggtgcgacagggagccgaggaggggtccaagaagctcgtcgcgttggggctgcacttcagccctctggagaagatcatcagggacgctgtggaggccctcaagagcagaggctacatttcgtagctagccgaccgacggcagctatagtggagtagtatgcctgtcgaatttcgattcccaagtggcaaattctgcaaaacgagttcgccaatatgaacaataaataaagaacgttgtgataaaataaagcagattttctgttgcatttggcccttcaaagcatccgtggtggtaagatttcc

SEQ ID NO: 129620 - DNA, 1386 bp, Zea Mays
gggcagatgctgctgcagctcaagatagccacacacacagacagtgacacacttaagagctcgagatctcactctcctcacctcagctctcagagaggaaggacactgcggccgggcgatggcgagcgtggagggcaagagggagacggtgctggtcaccggcgccagcggcttcatcggatcgaccctcgtcggcctcctcctcgaccgcggctacaacgtccacgccagcgtcctcaaccccggtcagtaacataatcaataagcagactagcactagactctacactgcaccggcccgacctactactggccggctactgtacggtttgtgtgcgcggcgcagatgacaaggcggagacggagcacctggtcgccctgggcgccggcgccggcgagggccggctgcgagtcttcccgggcgacctcctcgacggcgccgcgctcatggccgccgcgcggggctgctcgggcgtgttccacctcgccaccccctgcaccgtctaccccgtgagcgacccgcaggggcagatggtggtgccggcggtggagggcacgctcaacgtcctgcgcgccgccaaggaggcccgcaccgtgcggcgggtggtggtcacctcgtccagctccgccatcatacccagccccgcgtggcccgccggcgagccccgcgacgagcggtgctgggccgacgtcgactactgcaagaagaacgaggtctggtaccctgtttccaagacgctggcagagaaggcggcgtggaggtttgcggaggagaacggggtagacgtggttgtcgtcaacccggtgactgccatgggcccaatgattccgcccaccatcaactgcagcatgatcgtgctcctacgcctgctacaaggttgcacggaggagtacagggacatctggatgggggcggtgcatgtgcacgacgccgccatggcgcatatcctggtgttcgagagcccggcagcgtccgggaggcacatctgcgcccagtccatctcccactggagcgacttcgcggccaaggtcgccgagctgtaccctgagtacaaggtgcccaattgcgtacgttgcaggttccccaaggatacccagcctgggctggtgcgacagggagccgaggaggggtccaagaagctcgtcgcgttggggctgcacttcagccctctggagaagatcatcagggacgctgtggaggccctcaagagcagaggctacatttcgtagctagccgaccgacggcagctatagtggagtagtatgcctgtcgaatttcgattcccaagtggcaaattctgcaaaacgagttcgccaatatgaacaataaataaagaacgttgtgataaaataaagcagattttctgttgcatttggcccttcaaa

SEQ ID NO: 129621 - DNA, 1282 bp, Zea Mays
gggcagatgctgctgcagctcaagatagccacacacacagacagtgacacacttaagagctcgagatctcactctcctcacctcagctctcagagaggaaggacactgcggccgggcgatggcgagcgtggagggcaagagggagacggtgctggtcaccggcgccagcggcttcatcggatcgaccctcgtcggcctcctcctcgaccgcggctacaacgtccacgccagcgtcctcaaccccgatgacaaggcggagacggagcacctggtcgccctgggcgccggcgccggcgagggccggctgcgagtcttcccgggcgacctcctcgacggcgccgcgctcatggccgccgcgcggggctgctcgggcgtgttccacctcgccaccccctgcaccgtctaccccgtgagcgacccgcaggggcagatggtggtgccggcggtggagggcacgctcaacgtcctgcgcgccgccaaggaggcccgcaccgtgcggcgggtggtggtcacctcgtccagctccgccatcatacccagccccgcgtggcccgccggcgagccccgcgacgagcggtgctgggccgacgtcgactactgcaagaagaacgaggtctggtaccctgtttccaagacgctggcagagaaggcggcgtggaggtttgcggaggagaacggggtagacgtggttgtcgtcaacccggtgactgccatgggcccaatgattccgcccaccatcaactgcagcatgatcgtgctcctacgcctgctacaaggtgcgtggagtagtcgttgctttcctgctggctgctcgctcgatatgccgttcgttgctatgggaatgggatgaatgttaggatttatgggcttaaatcataggaaaatctcaaaagcccatacaagtggatggctaaagaataggtggaaccaatagcaccatattgctagttctagtagagtagagctagcttaaatatggaagccacactcactcaccaagtcatggatgagaggagagagtgtggagagccacacgcgcgcgtgcgcttgctcgcttggccgtaggggtgggcactttttttaccataaaccgaaaaccgaaccgaaccgtaccgaaccgaaccgaaatttcggttttttcggtagttcggtttggtttcggtttttgtatctcaaaagttcggttttcggtatcgtaatcggttttcaccgtataccaaaccgaaataccaaaaaaccgaattacctaactttatcaattctaaaatttggctattcgatt

SEQ ID NO: 129622 - DNA, 780 bp, Zea Mays
atggcgggggagacggtgctggtcaccggcgccagcggcttcatcggctcgaccctcgtccgcctcctcctcggccgcggctacaacgtccacgccggcgtcctcaaccccgatgacggggcggagacggagcacctgctcgccatggccgctggcgctggcgctggcgagggccgcctccgcatcttccgtggcgacctccttgacgacgccgcgcggggctgctcgggcgtcttccacctcgcgtcgccctgcaccgtcgaccccgtcagcgacccccaggtttggtaccctgtttccaagacgctggcagagaaggcagcgtggaggtttgcagaggagaacgggctggacgtggttgtggttaatccaatgtctgtcctgggccagataatcccaccgaccatcaattctagcatgtccgtccttctacgcctccttcaaggctgcacagaggagtacaaggatatctggatgggggtagtccacgtggaagacgtcgccttggcccatctcctggtgttcgagaacccatcagcttccgggaggcacatctgcgccgagtccatcagtcacctgagtgacttcgcggccaaactcgccgagctctaccccaacaacaaagtgcccaagttccccaaggacacccagcctgggctggtaagagcggaggcgggagtggcgtcgaagaagctcgtcgagctagggctgcagttcagccctctggagaagatcatcagggatgccgtggagagcctcaagaccaaaggttgtaactag

SEQ ID NO: 129623 - DNA, 720 bp, Zea Mays
agtctgtcttatctcggtcctcggacctgtacagtgtattttctgaactatctcttttaatgattaggcagagctcctgccatttccttcaaaaaaaataaagtataatcatgaatttcctattcttgggatctaacaattgagttgtcgtatcattgcgatcttgtttggtgattactcactgcgatgtaccgttgtgttgtttgacaggacaaagatgaatcacagagcagccttgacaagggattgcctgtcgtttccttttcgataggcgagactgcagaattcatgtttggcgatgttagagacgaagagaagatttcaaaggttgatcttgaatccggcgacgtcctaatatttggtggcgagtcaaggcttatattccacggggttaacaacaccaaacctaaaacggcaccaaagtggcttacggacgagacaagtcttcgacctgggcgtctgaatctcacattcaggcagtactaggcaggtttcccccaccttgagcatttgcattggaacagcaaagaacttgctcatgatattctagtactagggtcagttgggttagttaccagtagagatcacctgtcatttcttatatatattccctcatgggctactcacaaggagatctatctagtcactgaaaaccaccacttaatccattgctactcgcttaaatgtttgtttccatgttcaactttttcattttgcctt

SEQ ID NO: 129624 - DNA, 1547 bp, Zea Mays
gtgttattctaggaactacttgaaaacagatgttattttctaaacgtttttacaaacgctgttctgttgattcttctagagtataagtggagctgctctagggccagatccagcttctctgccgtcgcctctttctccgcctcgaaggatctagagccgcacgtgctcccaaccaagcgccgcccgcctcgtgccctcgtccttgcgcgcgggctgcagttgttcttcaagtgccgcctccgcttcggcgcggatcgcctcccgttatcccgttcatggccggccgcagcgataagaaaccggcgagttccgccccgccgcggaagggcggttaccctcacggatcggtctacggaagttcttcggaacctcgaaaacaggatgcctgtacattctctccttcggttagcagcaaagattcactgcataaggtggtcacgcttacaccagttcaaccacagaaacctgtagactccagaggcagtcactgtaatgcaggatctgattctggagaggccccatttgatatatgcatgagtggtaacaagtgcgctgtaaagttaaaaccatccatattcgagaccaacagagaaagaaagcagcgagacagagaatgttccaaggatgtacgtccattgcagttgagacctgggatggttctgttgaaaagattcataaagcctaatgatcaggttaaaattgtcaaactttgttcgcaacttggtgttggtcctgggggattttatagacctggctaccgaaatggtgctttgctaaaactgtggatgatgtgcttagggaagaactgggatccagattcatcctcgtatggagatagacgtctgtttgatggtgctcaaccaccgaccataccagaagaatttcagaagttcgttcaagatggcatccaagcttcccatgaattcttgaaacaacaaaaaggagctaccaatgttgtgcaagaaatccctgcaatgtctccggatatctgcattgttaatttctacaatagtagtgggaggttgggtcttcatcaggacaaagatgaatcacagagcagccttgacaagggattgcctgtcgtttccttttcgataggcgagactgcagaattcatgtttggcgatgttagagacgaagagaagatttcaaaggttgatcttgaatccggcgacgtcctaatatttggtggcgagtcaaggcttatattccacggggttaacaacaccaaacctaaaacggcaccaaagtggcttacggacgagacaagtcttcgacctgggcgtctgaatctcacattcaggcagtactaggcaggtttcccccaccttgagcatttgcattggaacagcaaagaacttgctcatgatattctagtactagggtcagttgggttagttaccagtagagatcacctgtcatttcttatatatattccctcatgggctactcacaaggagatctatctagtcactgaaaaccaccacttaatccattgctactcgcttaaatgtttgtttccatgttcaactttttcattttgcctt

SEQ ID NO: 129625 - DNA, 691 bp, Zea Mays
ataaaaagctgttcttctcccctcatcgcatacggcataccacactagagccgccgccgccgccgtttcgcgcaccgtaccctagccctcgtcagcggcggcttcgagctcatccagccatgacgttcaagcggaggaatggcggacgcaacaagcacgggcgcggccacgtcaagtacatccgctgctccaactgcgccaagtgctgccccaaggataaggctatcaagcggttcttggtgaggaacattgttgagcaggctgccgtgagagatgtgcaggaggcctgtgtacatgatggatatgttctacccaaattgtatgcaaaggttcatcactgtgtctcatgtgcaatccatgcgcacattgtccgggtccgctctcgtgagaacaggaggaaccgtgagcccccgcagcgcttcagacgccgggatgatggcccaaggcctggtcagggcccgccgcgcccaggcggtgcagctcctgcagctgcagctgctgctgctcctcgtacctaagttctggaattagtttcggggcttagttttgtgaaacattacctgttttgagaaaccattgttactgtatccccttgatgtcaaactttttagcacaatttgtggttctgaaaaggttggttgaatgttgcagctaatggttgaatgtactagagctaatggtgccgctaaaa

SEQ ID NO: 129626 - DNA, 1411 bp, Zea Mays
ataaaaagctgttcttctcccctcatcgcatacggcataccacactagagccgccgccgccgccgtttcgcgcaccgtaccctagccctcgtcagcggcggcttcgagctcatccagccatgacgttcaagcggaggaatggcggacgcaacaagcacgggcgcggccacgtcaagtacatccgctgctccaactgcgccaagtgctgccccaaggtaacacttcccttcccatagagcgcggttgtttgtgatggatgaatcgggccgttgttagctgcagggaaagtggtattctcgagtctagacctctcgttcacacattgtttagtcgctatataggttgatagctctcacgatcacggtacatgcaaaaaaaaatccatgttattattgggtacctgtactttccgataaaacaactcctgagttgcccaaatatatttcatgtttgtattaactatactaattttgtggcataaatgttagttcatttttctacaaagttttgccaaaatattaaaaatctttgactaggacaactctggatgttaagttgcttaggatttagggacagaataagtactatgttattaatgaaacgtggaaagatccctatattgacatggaacttatatgctcttatttgtcacttctgttgttgatttatttcaatttcacttctagttacatacttgcattgggctgaatctcatcatgttattaatgtatgtacatgcatagctgcagttctgttgttttatgtgttgtcgccttggttctctctaacagaaatgttatgaattgtgtctgggtaatattgaaaccagatacaatgtgctcagacatgtttgacttgcattgcaacattagaacttaattttgctctgaactgtgtatgttgtagaagatatatgatgtttgctgtacttgcaggataaggctatcaagcggttcttggtgaggaacattgttgagcaggctgccgtgagagatgtgcaggaggcctgtgtacatgatggatatgttctacccaaattgtatgcaaaggttcatcactgtgtctcatgtgcaatccatgcgcacattgtccgggtccgctctcgtgagaacaggaggaaccgtgagcccccgcagcgcttcagacgccgggatgatggcccaaggcctggtcagggcccgccgcgcccaggcggtgcagctcctgcagctgcagctgctgctgctcctcgtacctaagttctggaattagtttcggggcttagttttgtgaaacattacctgttttgagaaaccattgttactgtatccccttgatgtcaaactttttagcacaatttgtggttctgaaaaggttggttgaatgttgcagctaatggttgaatgtactagagctaatggtgccgctaaaa

SEQ ID NO: 129627 - DNA, 1529 bp, Zea Mays
cgagcgagagagagagagaggagggtttccagagcggcagcggctgcggctgcctgccaacccctctacccccagctctgcaggctgcaccctaaagcagcgagcctttttaccactcttcctgctaccaccccacacggcgcacacaccaccatctctcgtcgcctcgcctccacttcctgggctacgtacccatctcaatcgcttcgactcctccgccgccgccgccatgtcggggctctacagccagggcttctcccctgcgcgaaacctctcccctcagattagaagcaacccggatgtcgatagccagtacttggcggagctgctcgctgaacaccagaagctggggccgttcatgcaggtgctgcccatatgcaacaagctgctgagccaagagattatgcgggtgtcaagcattgtccacaaccatggatttggcgatcatgacaggcatcggtttagaagtcctagtccgatgtcttctccgaaccctagagctaatctccctggcaatgggttcagtccttggagcggactacaagagagattaggttttcctcaacgaactagcatggactggcaaggagcaccaccaagtcctagcacccaagttgtgaagaagattcttcgtctggaggttccggttgattcttatccgaatttcaattttgtggggcgcattttaggacctagaggtaattctctaaagcgtgtagaagcatccactgggtgccgtgttttcattagaggaaatggttccatcaaagatccagggaaggaggacaaactacggggaaaaccaggctatgagcacctgagtgatcctctgcatatcttgatagaggccgagttccctgccagtatcatcgatgcaaggttgagacatgcgcaggagattatagaagaattgcttaaaccagtggacgagtcccatgatttctacaagaggcaacagctcagggagctggcgctgctgaactcaaccctgagagaggacagccctcaccctgggagcgtttctccattcagcaacggcggtatgaaacgcgcgaaaacaggccagtagagaaacacccgtgctctcctacctggccctgtccaggtgtgttacgcggtcgtcgtcacgaaagacgccatgcctgccttggggagggcaatgttttgccatgggcatgcgtgaaggaagcaatgcgccttcactggcggagtccgtcgtccggtgccagctaggtttcacctccatacaggggaagctgctgctgggaaagatgagatagatagtcgcggtcgcggatcgttggttggttgttgtatggtgttagaacattccttctatttgttattgacggtttgaccctagtatgtggtggtacactgcgaagttgctaaactagaggcctaagctttatttaggtggttcattgaccttgtatcataaccttttgacattatcgagttgcaaaataaggaccatcagctttgtacattgttgtgatctgtgtgccataaaccgccactagaacatg

SEQ ID NO: 129628 - DNA, 1031 bp, Zea Mays
acccaatccacagcacgagcgtgtcaaacgttatccggttcaaagccgagcggcgtctcctctctccagcggctccagccaatccggcaatcccgctcccccagctcgctgctcgcccgctctcctccgccctccgccatggcggccttcccctccgcctccccgtcgccggcgatctccgcctcgacctggagcatggcttccctccgtacgtccctccccgcactccgcccctcccccgcgggaaggctccgttcgtcgttctcgcccgcggcggcggccacggctgcatcggtcggctgcctcgggtccttctccggcctcgcgcccgtctcgaatctcctctccctcggcgctgagaactcaagctttgagcatcggttgtttggtattgatgcccgtggaaggatagttgcgatgcgacatgggagacgcgttcctaaacttaacaggcctccggatcaaaggaaagcgctgttgcgtgggcttaccacacagctgctgaagcatgggaggataaagactacaaagccaagggcaaaggcaatgaggaagtatgtcgagaagatgatcacgttggcaaaggatggatctcttcacaagaggagacaggctctggcatttatttatgagaagcatatcgtccatgccttgtttgctgaggttgcagacaggtatggagaccgagaaggtggctacacaaggatcatcccgacgttcccgaggcggggagataatgcacctatggcgtacattgagcttgtttaggattttccatcggttgctgtggtttcattggttggtgccatgcaggctgagtggtcatgtttgcgcattgccgttcggagatctgtttttttttccctttccttatcaagttgttctgtaccaaagtgtagatcacgcgtgaaatttggaactcgtcaaacttcgttctgtaattgacaaggcgccattatataatctggaaaataagttcgtggcctcacataaaaaaaagaataattatatacatgacattcaaaatttac

SEQ ID NO: 129629 - DNA, 1688 bp, Zea Mays
atgggtcctgaatcagctgacgtcgcccgtgacgccacccgcggtcccgtccaatcccgggtcgctgaggtggccgtccacgagcctgtcgcaccaccacgtgccctttccctcccgaacccacacccacctccgctttcccgcggcatcgcactaccgcccgcccgccgctatatatccttcctctgcccgcggttctcagcttcaatgacagcgcagaacccgcccacaggacaggacacacagagccgagccaccccacccaccatcggcgaccagcagccagccgcgggagcgagctgtttaaagacaccgagtcggagtcggacggaggactggcaggcacaaccgaagccaccgcttctagttctcgggttcatcgccagcaatccagaccacataatgggacagccggtgacgaggaggagggagagggacgcggaggcggagctggacctgccgccggggttccggttccaccccacagacgacgagctggtggagcactacctgtgccgcaaggcggcggggcagcgcctccccgtgcccatcatcgccgaggtggacctgtacaggttcgacccgtgggacctgccggagcgcgcgctcttcggggcccgggagtggtacttcttcacgcccagggaccgcaagtaccccaacggctcccgccccaaccgcgccgccggcgacgggtactggaaggccaccggcgccgacaagcccgtcgcgccgcgcgccgccgccgccgacgcccgcacgctcgggatcaagaaggcgctcgtcttctacgccggcaaggcgccgcgcggggtcaagacagactggatcatgcacgagtacaggctcgctgacgccggccgccgcgccaagaaggggtcgctcagggtaagtttctacacacaaaaaaaagagagggctgaacgaggaattttttagcttttaattctgtcttggatcgatctgtgtgtgtgcagttggatgactgggtgctgtgccggctgtacaacaagaagaacgagtgggagaagatgcggctggggaagggggcagccgccggcgcagtcaaagaggaggaggccatggacatgagcacctcccactcgcagatcacccactcgtggggcgagacgcgcacgccggagtcggagatcgtggacaacgacctgccgttcccggatccggcgatgatggtgcccaagaaggagcgggtggacgacggcggcagcgccaggaccagcgacctgttcgtggatctcagctacgacgacatccaaggcatgtacagcggcctcgacatgctgccgccggccggcgaggacttgtactcctcgctcttcgcgtcgcccagggtcagggggaaccagcccaccggacccgcggggttgggccccttctgagtgagctcaggcgaggatggaggcatggagatcaggagagaagacggacggcgttgccaactctgtaaatacagcataggacgaggagtcgaacctgactgaacctggtcggggttacaagtcgagtgtgtcggtgtttcgtacatgggaaccgggccttacatgggagccggcccggtcttggtttggcgctggctcattctttagtttcacttcctgcgcagacggtagatgtgtatgcatagctgttcactatcacttcctcttcaacagaaccgattcactccg

SEQ ID NO: 129630 - DNA, 1284 bp, Zea Mays
cagcgaatcgggtatacatatgatcccctcgctcgatcgctccgtcgctcgtggatcaattgctgggaacttgctctacgtttgccgcccacatgcccaacacttacacctcctcgctcgtcgtccaagctgatgcccacctggctggcctgtggcctgcatgtatatatataagatacgacgcatgtcgtccgtccaagtccaacgcaattaatccaaggcggagtcgacgatctcttcgatccacggcaacagtacgtacgtcaaattgagacatgttggagctgctggtgctgccgccggcgctggacctcctcctccacagctgcctcatcgtgtcggtgtcatctctactgatcatgctcgcgctccagccgctactgcccggcggcaccgacgtggcctcagcgagcaggggcgtgcgctccgcgtcgcgggcggtcctcgcgcgcctcctgccgtcgtcgtcccgcacccgcagcggcgtgcccgtggcgccgcctcctcctcctcctcccccgcggcattgcgagctgtgcgccgcgtcgtcgtggccgggcaccgtggcggccgtgacggcgaccctgcacctggacgccgacgccgacggcgacacggagcgctcctccatctcctccgccgaggaggacggcaccgcgtgcggcgggtgcgcggcgttggcggcggtggaggagctgctgggaagcaaggaggcgacggagcgcgagctgcgcgaggcgttccgcgtgttcgaccgcgacgaggacgggttcgtgggcgccgccgagctctggtacgtgctgcgccgcctcgggatgggcggctcgagctcggcgcgggaggactgcgcccggatgatcgcggcgcacgacgccgacggcgacggccgcatcagcttccgcgagttcagggacatgatggagcgcgcggtctgagcgagcgccgtgggtggaggtggaccctggaccgtgcgtggacgtagcacgcggttggctggggcggccggggtggttttcgttttcgttttcgttgctcgatctatgtaaattgcacagtaagtgccggccgtgaacttaactagctgtgtagttagttagtaccactacttagctacggcattgagatgtttgataaataaacggtaagtaagatgttgaggtttggagtcccaagaaaacgggagcctcgaacttctggttcacaccggtgttggcgtttagtactctgagagagagagagagtgtgtgtgtgtgtgtgtgtgaacgaaacgaagcggttttccca

SEQ ID NO: 129631 - DNA, 2710 bp, Zea Mays
gagacacgggacccacccccggtctgcccgtggtatctctctcttgtccctgcctcccttcctccctccctccaacccagtgtgcgcacttcaccccccctctcggtctcaccctcctggcgacgactgggcggccgaacggccgtcgccgccgccccacgccaggtttcaaagtcttcgtcaggcccttctccggcgactcgagcaccacagggtgacaaggatagctttctcgggtcactgaaggaagacatcttctcgacgcggtagaccttctgacggttggctggttgtgctataagtgttcaaggggtggattaggaccgggaaactctgtactgaagggaaggtcaaaagtgtcaagagagcttgttccaagatggatgaaggtcagggagttaggtattggtgccacatgtgtcaggaggtgatagatcctatgcccgagatgaagtgcccaggctgcgagggcgggtttgtggaggagatggactccgaagacttcgagccagctgcgaacgcgaggtctgatcgctccgtctctctcttggctccactgctgcttggtatgatggggggttcgtcgcgcagatcaagactcaggagggaggccatggttgaagctgatgccgaccaggatgacgaagaggatgattcagaccatgagcttgaactttccaggaggaggcggaggaggaggcgctcatcagcgcttttcagtgtgcttgaggctatgcgtgaccgtgatgaagtaaggggctcggatgacaccgacagtgatacagagagagacctggagagagggagaagggagaggatggagaggcagagggagaggttaaggcagatcgagagggtgagtgctcgtggcagagagaggacggaaagcttaatactgatcaactccaacaacgaggctattattctgcagggaacattcggatctgatgacaaccaggaggactcaagcaacacaagttctggtgtatcacttggggattactttcttggtcctgccttagacactctcttgcagcgtttggcggagagtgacctcagtcgttctggcacaccgcctgccaagaaggaagcagtcgccgcgctaccaaccgtgaacatcgaggaagcgttgggctgttcagtctgtcttgaggatttcgagatgggaggagaagcgaagcagatgccctgtcagcataagttccactcgcactgcatactcccgtggctggagctccacagctcttgcccaatctgccggtttcagttgcctactgaggagacgaagaacaacccatgcgaatcagccagcaccgcagggaccgtgaacggcggtggagacaacgctgctgcaagcggcagcgatacagaaagtactaaccacaatgaagatgaccattccgatagccctatcttctctgctctgagcacactcttctctgatccgttctcatccgacgatgatgaaagtgttccacactcttacgagaactgaagatagcgtcggacgcaggcttgcaatatggtgaagacgttctgcttctgaggctggcatctttatattgtagcttctgtacatatctctctgaacggtcgccccccataagacaaactattacctctccgttttactgaaaactatgtggcttgtaatctgctagtgcttgctatgttcacttgcctcgaataaatgttatcctttagcgtgcttattaccatctccggacggccctagacgtgcatgtggacgcagatttgattgacagtatggccaatgtaaggcatatatgtatgcagtggcgttgcgtcttactcctatattttaactgtcaatgagaaggtccttggaagatggctggatagttacttctgtgaaggcgaatatcgtccagtggtcctcacaacacgctccactgcattctgaggtggatggaacgttgcaggtgatgctgccccatatggtcctgaatgtcacgcccttgaggatctccgccagctccaagcgcattcgtgttggtattttgtcgtaaggaggtcgctgaaaggaaaaaaaaaaacatttgccatcgtagctggaccagtcgggcgacgggtgggataagcggagcaggttgctgccatgcgtatcaccacctccttggaactattgcctgagcaagaacaattctgcttgctgattattctgacggcgtggtcgtttggtaggttcgggttggtcgcccggttcttcactctgttggttcttctgcttgtacagttgtgctgcagcgtcccatttgggagggcatcaaacttggaatgtttttgatttgcaacgctttgcttagcaggcatggctggattcgaagacaaattcaagattgtttctgggaatttcaagctcctttttttttcttcctttctcgcgatttttggtgttggtttgccacgcttgttcggtgtagtgtaggcggtagcttgcgtgcagtgtggactgtggagtctcggctgctgcctgctggagtgctggtgttgccggtccttgttcttcggctctggtctcttgacttggaggcaagggggtgcgcgacgctcacggaatgtttgggacgtcttttcttctcggtgctgcggcgaccgaagacgcctgagtcaaccgggaccgtagctctccagtctccaccgtcatctatcatatctcatcatcttttattttaaactttactataca

SEQ ID NO: 129632 - DNA, 1160 bp, Zea Mays
aacccagtgtgcgcacttcaccccccctctcggtctcaccctcctggcgacgactgggcggccgaacggccgtcgccgccgccccacgccaggtttcaaagtcttcgtcaggcccttctccggcgactcgagcaccacagggtgacaaggatagctttctcgggtcactgaaggaagacatcttctcgacgcggtagaccttctgacggttggctggttgtgctataagtgttcaaggggtggattaggaccgggaaactctgtactgaagggaaggtcaaaagtgtcaagagagcttgttccaagatggatgaaggtcagggagttaggtattggtgccaagaaggaagcagtcgccgcgctaccaaccgtgaacatcgaggaagcgttgggctgttcagtctgtcttgaggatttcgagatgggaggagaagcgaagcagatgccctgtcagcataagttccactcgcactgcatactcccgtggctggagctccacagctcttgcccaatctgccggtttcagttgcctactgaggagacgaagaacaacccatgcgaatcagccagcaccgcagggaccgtgaacggcggtggagacaacgctgctgcaagcggcagcgatacagaaagtactaaccacaatgaagatgaccattccgatagccctatcttctctgctctgagcacactcttctctgatccgttctcatccgacgatgatgaaagtgttccacactcttacgagaactgaagatagcgtcggacgcaggcttgcaatatggtgaagacgttctgcttctgaggctggcatctttatattgtagcttctgtacatatctctctgaacggtcgccccccataagacaaactattacctctccgttttactgaaaactatgtggcttgtaatctgctagtgcttgctatgttcacttgcctcgaataaatgttatcctttagcgtgcttattaccatctccggacggccctagacgtgcatgtggacgcagatttgattgacagtatggccaatgtaaggcatatatgtatgcagtggcgttgcgtcttactcctatattttaactgtcaatgagaaggtccttggaagatggctggatagttacttctgtgaaggcgaatatcgtccagtggtcctca

SEQ ID NO: 129633 - DNA, 558 bp, Zea Mays
gagacacgggacccacccccggtctgcccgtggtatctctctcttgtccctgcctcccttcctccctccctccaacccagtgtgcgcacttcaccccccctctcggtctcaccctcctggcgacgactgggcggccgaacggccgtcgccgccgccccacgccaggtttcaaagtcttcgtcaggcccttctccggcgactcgagcaccacagggtgacaaggatagctttctcgggtcactgaaggaagacatcttctcgacgcggtagaccttctgacggttggctggttgtgctataagtgttcaaggggtggattaggaccgggaaactctgtactgaagggaaggtcaaaagtgtcaagagagcttgttccaagatggatgaaggtcagggagttaggtattggtgccacatgtgtcaggaggtgatagatcctatgcccgagatgaagtgcccaggctgcgagggcgggtttgtggaggagatggactccgaagacttcgagccagctgcgaacgcgagatcaagactcaggagggaggccatggttgaagc

SEQ ID NO: 129634 - DNA, 1205 bp, Zea Mays
cgacccgcagcaaaaggaagcttggctcggttcccctcctgcggcctattggcttctggcctcgtataaaaaaggcgaggacgcgctccaccgccagaatcatcgtcaccccggagcctctccttcccggtctcctccgcccgttgccttcgtcccctccatctccggctgcgtcgccggcgagcccgacaccgcgaatcggatccgccgacaaggtgagagggaagagatggggctcacgttcaccaagctgttcagccggctgttcgccaagaaggagatgcggatcctgatggtgggactcgacgccgccggaaagaccaccatcctctacaagctgaagctcggcgagatcgtcaccaccatccccaccatcggattcaatgttgaaactgtggagtacaagaacatcagcttcactgtctgggatgtcgggggccaggacaagatcaggccactgtggaggcattacttccagaacacgcagggtctcatctttgttgtggacagcaatgatagggaccgtgttgttgaagcaagggatgagctccaccgaatgctgaatgaggatgagttacgtgatgctgtgttgcttgtttttgctaacaagcaagatcttccaaatgctatgaatgccgctgagatcactgataagcttggactgcattcacttcgccaacgtcattggtacattcaaagcacttgtgctacaacgggtgagggattgtatgaaggcctggactggctgtccagcaacattgcaaccaaggtaagctccccaattatgtcacctactatttcgaaaaagatgatgactgcaaacgtttacttgactgtgacctcatattaacagaaattgttgggttgggttggtatttccgtatgtaagatgtatgcccctgagctcggcagtttttgagctctgcttaagattctcacagttaaattgttttatgtaatttgggccttgagatgtttctgaaccaaacagctaaaagagttcagttgagttaactggttgccattattacattatgagattctttgatgctccatatgttcaacaccacatcagaaagatgcctgtttttgtgccaggaattgacttgggtctttacctttctgtttgggattaccgaaaacctccgcagtaaaacagtcccatgaaaaatctttgatcaccacttcttttacagagccgagtt

SEQ ID NO: 129635 - DNA, 750 bp, Zea Mays
atggtggcggagacagcggctattggaggtcgaccgtcgtcgcagccttcgcgggtgcgcaagtcggctgtgctctccgtcgccgcttcgtcggcctcctccgctcaccagtaccgtgcctcgcctcgccttccatttggttgtgagagggaagagatggggctcacgttcaccaagctgttcagccggctgttcgccaagaaggagatgcggatcctgatggtgggactcgacgccgccggaaagaccaccatcctctacaagctgaagctcggcgagatcgtcaccaccatccccaccatcggattcaatgttgaaactgtggagtacaagaacatcagcttcactgtctgggatgtcgggggccaggacaagatcaggccactgtggaggcattacttccagaacacgcagggtctcatctttgttgtggacagcaatgatagggaccgtgttgttgaagcaagggatgagctccaccgaatgctgaatgaggatgagttacgtgatgctgtgttgcttgtttttgctaacaagcaagatcttccaaatgctatgaatgccgctgagatcactgataagcttggactgcattcacttcgccaacgtcattggtacattcaaagcacttgtgctacaacgggtgagggattgtatgaaggcctggactggctgtccagcaacattgcaaccaagaaagatgcctgtttttgtgccaggaattgacttgggtctttacctttctgtttg

SEQ ID NO: 129636 - DNA, 1084 bp, Zea Mays
gacgcgacccgcagcaaaaggaagcttggctcggttcccctcctgcggcctattggcttctggcctcgtataaaaaaggcgaggacgcgctccaccgccagaatcatcgtcaccccggagcctctccttcccggtctcctccgcccgttgccttcgtcccctccatctccggctgcgtcgccggcgagcccgacaccgcgaatcggatccgccgacaaggtgagagggaagagatggggctcacgttcaccaagctgttcagccggctgttcgccaagaaggagatgcggatcctgatggtgggactcgacgccgccggaaagaccaccatcctctacaagctgaagctcggcgagatcgtcaccaccatccccaccatcggattcaatgttgaaactgtggagtacaagaacatcagcttcactgtctgggatgtcgggggccaggacaagatcaggccactgtggaggcattacttccagaacacgcagggtctcatctttgttgtggacagcaatgatagggaccgtgttgttgaagcaagggatgagctccaccgaatgctgaatgaggatgagttacgtgatgctgtgttgcttgtttttgctaacaagcaagatcttccaaatgctatgaatgccgctgagatcactgataagcttggactgcattcacttcgccaacgtcattggtacattcaaagcacttgtgctacaacgggtgagggattgtatgaaggcctggactggctgtccagcaacattgcaaccaagtcctaaattgtcaagcgaggtttggatcatctaggagcttttggatgatgatgatgatgatggtgctggatatttagggttgggttggtatttccgtatgtaagatgtatgcccctgagctcggcagtttttgagctctgcttaagattctcacagttaaattgttttatgtaatttgggccttgagatgtttctgaaccaaacagctaaaagagttcagttgagttaactggttgccattattacattatgagattctttgatgctccatatgttcaacaccacatcagaaagatgcctgtttttgtgcc

SEQ ID NO: 129637 - DNA, 1081 bp, Zea Mays
cccggtctcctccgcccgttgccttcgtcccctccatctccggctgcgtcgccggcgagcccgacaccgcgaatcggatccgccgacaaggtgagagggaagagatggggctcacgttcaccaagctgttcagccggctgttcgccaagaaggagatgcggatcctgatggtgggactcgacgccgccggaaagaccaccatcctctacaagctgaagctcggcgagatcgtcaccaccatccccaccatcggattcaatgttgaaactgtggagtacaagaacatcagcttcactgtctgggatgtcgggggccaggacaagatcaggccactgtggaggcattacttccagaacacgcagggtctcatctttgttgtggacagcaatgatagggaccgtgttgttgaagcaagggatgagctccaccgaatgctgaatgaggatgagttacgtgatgctgtgttgcttgtttttgctaacaagcaagatcttccaaatgctatgaatgccgctgagatcactgataagcttggactgcattcacttcgccaacgtcattggtatcatacactatcaacagatttcttctttcctcattatattgctctatgtagtcatagtgtcgtagttctgctcttctgcttggtaatgtagtatattatttagctagcagtcagctggtgcttgatttattggattttggcggcaggtacattcaaagcacttgtgctacaacgggtgagggattgtatgaaggcctggactggctgtccagcaacattgcaaccaagtcctaaattgtcaagcgaggtttggatcatctaggagcttttggatgatgatgatgatgatggtgctggatatttagggttgggttggtatttccgtatgtaagatgtatgcccctgagctcggcagtttttgagctctgcttaagattctcacagttaaattgttttatgtaatttgggccttgagatgtttctgaaccaaacagctaaaagagttcagttgagttaactggttgccattattacattatgagattctttgatgctccatatgttcaacaccacatc

SEQ ID NO: 129638 - DNA, 289 bp, Zea Mays
ccaaagagcaagcataacatgtacttatccaaaaagataggtctatattcaagtaatccagtttacaatgcgaaattacaagtcgtgcaaaatgcagagaaacaaacaaataaaaaatgatgccccaccgcataactgtagcccggtgaaatcagcaaggaggcagatgagatctaagattttttaccaaaaattcaaaatcgtgctgaaacagctgacgaaaagttaagagattcaacaagtcaaggaagcctgtatcggtgtccatagcctttgccagtggtggtag

SEQ ID NO: 129639 - DNA, 373 bp, Zea Mays
cggtgccacccaataagataaatgggccacgcagcaagatgtaaaaaacagagttaagcacaacagctttgtgcaagtgctattacatttaaacaatcaagaatcgaacattttaagagaaagtaacaatatctgctcatattattccactgcaaatacatgatggtgcagtttccagtttttgctacatgcttctcttgatatcatcgtaccaactggccctattcaacatctgcttaaaaatgtcagcgtatggtagaaggcctgatatattatttttctccattcttgaacagggcagctaaacccagccgccaattgaacttcatagacatctcttgcctcgccaccttcgaagtcctgaaaaacgcag

SEQ ID NO: 129640 - DNA, 351 bp, Zea Mays
atacttacctggacggggtcgacgggggatcaagaagcctcgtggcctaggccagtgtcccacattgcacatggtgggtgcgcaggcttaccatctccccaagtgggagagtggacgtcataatttgtggtagaggggatacgcgttcgcgcggcccctgccaaatcttataaatttcatataagtccccttcagataagggcttgaaatgttatctttatttcgccacattttataaattataatttaatttttctctttctaagaatgtaaatcgtaagtaatcctggattgcatttaagtttcgtaagtggtcggtcctgtagttttaaagtttatctttgtgagaga

SEQ ID NO: 129641 - DNA, 436 bp, Zea Mays
acttacctggacggggtcgacgggggatcaagaagcctcatggcctaggccagtggctcgcattgcacatggtgggtgctccccaagtgggagagtggacgtcataatttgtggtagagggggtacgcgttcgcgcggcccctgccaaatcttataaattttatttaagtcccctttagagatagagaagggcttgaaatgtaatctttgttattagtccccttcagtgaaaggcttgaaatggtaactttgtttcgcccgattttataaattataatttaatttacatgtcttctaagaaagggttacgaaagtactcctggactgcttgaaagtatatctttgtgaggaagatgatgaagatgatttgttccaaagtagtcctcgcttacgtaacaattattattgtaattacaatgctgattattcaaaaaaa

SEQ ID NO: 129642 - DNA, 2532 bp, Zea Mays
gcacgagagcggccaccaccatggcgacgcccaccgcgctctccacctcactcccctacctcccgccccgccgcgtcatctcattcccatccgccgccgccgtctccctccccgtcacctcccgccccgcccggctgcgggattcccgcctcgcggccgcggcaacctcggcctccgaggtcctcgagtccaccaacggcgccgtccccactgcggccaaggacggcgcgtggcgcgggtatgggagggagtacttccccctggctgccgtcgttgggcaggatgctatcaaaactgctctgctgcttggggcgattgatcgtgagatcggaggcattgccatctcagggaagcgtgggacggcaaagacagtgatggctcgtggtttgcatgctatgcttccacccattgaagtggtggttggttccattgcaaatgctgaccctaactcccctgacgaatgggaggatggtttagctgatcaaatacagtatgactctgatggtaatgtcaaatccgagattgtcaaaacaccttttgtgcagattccacttggtgtgacggaggataggctcattggatcagttgatgttgaagcatctgtgagatcagggactactgtatttcaacctggtcttcttgctgaagcacatagaggtgttctttatgttgatgaaataaatctattggatgatggcataagcaatctacttctgaatgtcttgacggagggagttaacattgtggaaagagagggcattagctttcgccatccctgcaaaccacttctaattgctacttacaatccagaggaagggtctgtacgtgaacacttgcttgatcgtattgcaattaatttaagtgctgatcttccaatgagttttgatgaccgcgttgaagcagtggatattgcaacacggtttcaggagtctagcaaagaagttttcaaaatggtggaagaaaaaactgaaactgcaaaaactcagataatttttgcaagagagtatctgaaggatgttactattagcacagagcagctcaaatatcttgtcatggaagctatacgaggtggctgtcaggggcatcgtgctgagttgtatgctgctcgagttgcaaaatgtctagctgctatggaaggacgtgaaaaagtatttgtggatgacctcaagaaagctgtagagctagtcattctacctcgctccatcctatctgataatccacaggatcagcagcaagagcaaccacccccacccccgccaccaccacctccagaaaatcaagattcttcagaagaccaagatgaggaagacgaagaccaagaggatgatgaagaagaaaatgaacaacaagaccaacagatacctgaggagttcatatttgatgctgaaggtggtttagtagatgacaaacttcttttctttgcccagcaagcacagagacgacgtggaaaagctgggcgagcaaagaatgtcatcttctcagaagataggggccgttacataaagcctatgcttcctaagggtccagtaaggaggttagctgttgatgccacgcttagagcagctgcaccataccaaaaactgcgcagagagaaagaacgtgacaaaacaagaaaggtttttgttgaaaagactgacatgagagccaaaagaatggctcgaaaagcaggtgctctagtcatatttgttgtggacgctagtggtagcatggctctgaatcgtatgcagaatgctaaaggtgcggcgttgaagttgcttgcagaaagctacaccagcagagatcaggtttcaattattccttttcgtggagattatgctgaggttttgcttccaccatcaagatctatagcaatggcccggaaacgtcttgagaagctaccatgtggtggtggttctcctttagctcatggcctaagtacagctgtcagagtgggtctgaatgctgaaaagagtggcgatgttgggcgtatcatgattgttgcaatcaccgatggaagagctaatgtatcactgaagagatccactgacccagaagctgctgctgcttcagatgcaccaagaccttcttctcaagaactgaaggacgagatacttgaggtggctggcaaaatatacaaggcaggaatgtcccttcttgtcatcgacactgagaacaagtttgtatccacgggatttgccaaggaaattgcaagggttgcccaggggaaatattattacctccctaatgcttcggatgctgtaatttctgctgccaccaagaccgccctgacagacttgaagagctcatgattttgcagcagcggcacccgttttctgtaccttttgataggggtggtgaaccttcattcatgcagtagtttttgtgtaggcctctacaatgacagggggaaacaaacccgagcatggcatcgtgtaaagtgttaaggtccaatggcctcctgtccacgtttggcgatgtaaatcctccgtaacatagcttgaaccattgagtgtcacgtagtgccatggctagcagttaaaagtaccatgcgtc

SEQ ID NO: 129643 - DNA, 2258 bp, Zea Mays
gcacgagagcggccaccaccatggcgacgcccaccgcgctctccacctcactcccctacctcccgccccgccgcgtcatctcattcccatccgccgccgccgtctccctccccgtcacctcccgccccgcccggctgcgggattcccgcctcgcggccgcggcaacctcggcctccgaggtcctcgagtccaccaacggcgccgtccccactgcggccaaggacggcgcgtggcgcgggtatgggagggagtacttccccctggctgccgtcgttgggcaggatgctatcaaaactgctctgctgcttggggcgattgatcgtgagatcggaggcattgccatctcagggaagcgtgggacggcaaagacagtgatggctcgtggtttgcatgctatgcttccacccattgaagtggtggttggttccattgcaaatgctgaccctaactcccctgacgaatgggaggatggtttagctgatcaaatacagtatgactctgatggtaatgtcaaatccgagattgtcaaaacaccttttgtgcagattccacttggtgtgacggaggataggctcattggatcagttgatgttgaagcatctgtgagatcagggactactgtatttcaacctggtcttcttgctgaagcacatagaggtgttctttatgttgatgaaataaatctattggatgatggcataagcaatctacttctgaatgtcttgacggagggagttaacattgtggaaagagagggcattagctttcgccatccctgcaaaccacttctaattgctacttacaatccagaggaagggtctgtacgtgaacacttgcttgatcgtattgcaattaatttaagtgctgatcttccaatgagttttgatgaccgcgttgaagcagtggatattgcaacacggtttcaggagtctagcaaagaagttttcaaaatggtggaagaaaaaactgaaactgcaaaaactcagataatttttgcaagagagtatctgaaggatgttactattagcacagagcagctcaaatatcttgtcatggaagctatacgaggtggctgtcaggggcatcgtgctgagttgtatgctgctcgagttgcaaaatgtctagctgctatggaaggacgtgaaaaagtatttgtggatgacctcaagaaagctgtagagctagtcattctacctcgctccatcctatctgataatccacaggatcagcagcaagagcaaccacccccacccccgccaccaccacctccagaaaatcaagattcttcagaagaccaagatgaggaagacgaagaccaagaggatgatgaagaagaaaatgaacaacaagaccaacagatacctgaggagttcatatttgatgctgaaggtggtttagtagatgacaaacttcttttctttgcccagcaagcacagagacgacgtggaaaagctgggcgagcaaagaatgtcatcttctcagaagataggggccgttacataaagcctatgcttcctaagggtccagtaaggaggttagctgttgatgccacgcttagagcagctgcaccataccaaaaactgcgcagagagaaagaacgtgacaaaacaagaaaggtttttgttgaaaagactgacatgagagccaaaagaatggctcgaaaagcaggtgctctagtcatatttgttgtggacgctagtggtagcatggctctgaatcgtatgcagaatgctaaaggtgcggcgttgaagttgcttgcagaaagctacaccagcagagatcaggtttcaattattccttttcgtggagattatgctgaggttttgcttccaccatcaagatctatagcaatggcccggaaacgtcttgagaagctaccatgtggtggtggttctcctttagctcatggcctaagtacagctgtcagagtgggtctgaatgctgaaaagagtggcgatgttgggcgtatcatgattgttgcaatcaccgatggaagagctaatgtatcactgaagagatccactgacccagaagctgctgctgcttcagatgcaccaagaccttcttctcaagaactgaaggtactattcatcggctgatatctacaaattagtatgatatgggaagtatctagtctagttccgataatggtggaacagtgtaatcgcccttccaaacttcactgtggcgcaaaccaattccagatagcttcattttagaagctgcttatatcaactatttgctggctaatgtgattt

SEQ ID NO: 129644 - DNA, 83 bp, Zea Mays
cttcatcgtctccagcaacgtctcctaaaaatcatcatctatatctcatcctctttaatataccaactcaattaaccattcct

SEQ ID NO: 129645 - DNA, 1262 bp, Zea Mays
cacgaaacgccaaatgcccggtgcgctgtcgtttactggcccacgtgcgccagctcctccacccagattttgacaacgccttcccaacttgctcgctcccgcaacgacagcgcgcacttggattcggcgaccaccggagcgcggaggaggcacaggcgccgatctaaagacgatggccgccgcgggctcctcgccgtccttctcctcctcgagtaagcggctggaagggaaggtggccctcgtcactggtggcgccaccggcatcggtgaggccatcgttcgcctcttcatggagcacggcgccaaggtctgcatcgcggacatccaggatgaggctgggcagcagctgcgcgacgccctgggaggtgacgcgcagggcgccatgttcgtccactgcgacgtgacgtcggaggaggacgtgagccgcgccgtggacgctgcggcggagcggttcggcgcgctggacgtgatggtgaacaacgccggcgtgacgggcaccaaggtgacggacatccgcaacgtggacttcgcggaggcgcgcagggtgctcgacgtcaacgtgcacggcgtgttcctggggatgaagcacgcggcgcgcgctatgatcccgcggaagcggggctccatcgtgtcgctggccagcgtggccagcgccatcggcgggacgggcccgcacgtctacacggcgtccaagcacgccgtggtcgggctcaccaagagcgtcgccgcggagctcggccgccacggggtgcgcgtcaactgcgtgtccccctatgccgtgcccacggcgctgtcgatgccgcacctgccccagggcgcgcgcgcagatgacgcgctcaaggacttcctggcctttgtcggcggcgaggccaacctcaagggcgtcgacgccatgcccgaggacgtcgcccaggcggtgctctacctggccagcgacgaggcgaggtacgtcagcgcggtcaacctcatggtggacggaggcttcacagccgtaaacaataacctcagggcgtttgaggattagttgaggcatttatgccagctctgggattgggagggagtattaccgctatttcttctgctgttgtgacaagtgtgtgcaagactaataaaccgcagcatgttcatgtagccaacagatgattgaacattccaagtatcattgctgaattcacgcatatagttgctcttcaaatagatcaagtacaatttcgtcctacagcgttgctgctgtggctatataatgaccttccaaaatcaag

SEQ ID NO: 129646 - DNA, 1449 bp, Zea Mays
atgcccggtgcgctgtcgtttactggcccacgtgcgccagctcctccacccagattttgacaacgccttcccaacttgctcgctcccgcaacgacagcgcgcacttggattcggcgaccaccggagcgcggaggaggcacaggcgccgatctaaagacgatggccgccgcgggctcctcgccgtccttctcctcctcgagtaagcgggcgatgaattgaaggatccacccaggccaagcactggtgctctgtgcttatcttttagcgagcgaagtggtcatttccccctctcttctttatgggaggaaaataggaaatggtgtgccaagtgtatcctcaaccattctactgttccaaacgtgcagtatacatcggcatacagtcgatccagttgcaacaccatagtacggtgctgctccatctccatccagtagctgtgcctgtgtttttgtccttcagatttgatcttgcgtttcttgccccaaacacaggctggaagggaaggtggccctcgtcactggtggcgccaccggcatcggtgaggccatcgttcgcctcttcatggagcacggcgccaaggtctgcatcgcggacatccaggatgaggctgggcagcagctgcgcgacgccctgggaggtgacgcgcagggcgccatgttcgtccactgcgacgtgacgtcggaggaggacgtgagccgcgccgtggacgctgcggcggagcggttcggcgcgctggacgtgatggtgaacaacgccggcgtgacgggcaccaaggtgacggacatccgcaacgtggacttcgcggaggcgcgcagggtgctcgacgtcaacgtgcacggcgtgttcctggggatgaagcacgcggcgcgcgctatgatcccgcggaagcggggctccatcgtgtcgctggccagcgtggccagcgccatcggcgggacgggcccgcacgtctacacggcgtccaagcacgccgtggtcgggctcaccaagagcgtcgccgcggagctcggccgccacggggtgcgcgtcaactgcgtgtccccctatgccgtgcccacggcgctgtcgatgccgcacctgccccagggcgcgcgcgcagatgacgcgctcaaggacttcctggcctttgtcggcggcgaggccaacctcaagggcgtcgacgccatgcccgaggacgtcgcccaggcggtgctctacctggccagcgacgaggcgaggtacgtcagcgcggtcaacctcatggtggacggaggcttcacagccgtaaacaataacctcagggcgtttgaggattagttgaggcatttatgccagctctgggattgggagggagtattaccgctatttcttctgctgttgtgacaagtgtgtgcaagactaataaaccgcagcatgttcatgtagccaacagatgattgaacattccaagtatcattgctgaattcacgc

SEQ ID NO: 129647 - DNA, 1355 bp, Zea Mays
atgcccggtgcgctgtcgtttactggcccacgtgcgccagctcctccacccagattttgacaacgccttcccaacttgctcgctcccgcaacgacagcgcgcacttggattcggcgaccaccggagcgcggaggaggcacaggcgccgatctaaagacgatggccgccgcgggctcctcgccgtccttctcctcctcgaggcgatgaattgaaggatccacccaggccaagcactggtgctctgtgcttatcttttagcgagcgaagtggtcatttccccctctcttctttatgggaggaaaataggaaatggtgtgccaagtgtatcctcaaccattctactgttccaaacgtgcagtatacatcggcatacagtcgatccagttgcaacaccatagctggaagggaaggtggccctcgtcactggtggcgccaccggcatcggtgaggccatcgttcgcctcttcatggagcacggcgccaaggtctgcatcgcggacatccaggatgaggctgggcagcagctgcgcgacgccctgggaggtgacgcgcagggcgccatgttcgtccactgcgacgtgacgtcggaggaggacgtgagccgcgccgtggacgctgcggcggagcggttcggcgcgctggacgtgatggtgaacaacgccggcgtgacgggcaccaaggtgacggacatccgcaacgtggacttcgcggaggcgcgcagggtgctcgacgtcaacgtgcacggcgtgttcctggggatgaagcacgcggcgcgcgctatgatcccgcggaagcggggctccatcgtgtcgctggccagcgtggccagcgccatcggcgggacgggcccgcacgtctacacggcgtccaagcacgccgtggtcgggctcaccaagagcgtcgccgcggagctcggccgccacggggtgcgcgtcaactgcgtgtccccctatgccgtgcccacggcgctgtcgatgccgcacctgccccagggcgcgcgcgcagatgacgcgctcaaggacttcctggcctttgtcggcggcgaggccaacctcaagggcgtcgacgccatgcccgaggacgtcgcccaggcggtgctctacctggccagcgacgaggcgaggtacgtcagcgcggtcaacctcatggtggacggaggcttcacagccgtaaacaataacctcagggcgtttgaggattagttgaggcatttatgccagctctgggattgggagggagtattaccgctatttcttctgctgttgtgacaagtgtgtgcaagactaataaaccgcagcatgttcatgtagccaacagatgattgaacattccaagtatcattgctgaattcacgc

SEQ ID NO: 129648 - DNA, 1552 bp, Zea Mays
atgcccggtgcgctgtcgtttactggcccacgtgcgccagctcctccacccagattttgacaacgccttcccaacttgctcgctcccgcaacgacagcgcgcacttggattcggcgaccaccggagcgcggaggaggcacaggcgccgatctaaagacgatggccgccgcgggctcctcgccgtccttctcctcctcgagtaagcggtgcgtgccctgcttctttcttcaattttcccccgatccatggctcgtgcgtgggttccctgctcctagctccactcccccgtccatggcttgcatctatgctgcacagctcggttgctgttgcagttcaacctacttgttactccaaaaagaaggcgggcttatccaagatattgatcaaaatttccaccttttcgcgtcgaagggcgatgaattgaaggatccacccaggccaagcactggtgctctgtgcttatcttttagcgagcgaagtggtcatttccccctctcttctttatgggaggaaaataggaaatggtgtgccaagtgtatcctcaaccattctactgttccaaacgtgcagtatacatcggcatacagtcgatccagttgcaacaccatagctggaagggaaggtggccctcgtcactggtggcgccaccggcatcggtgaggccatcgttcgcctcttcatggagcacggcgccaaggtctgcatcgcggacatccaggatgaggctgggcagcagctgcgcgacgccctgggaggtgacgcgcagggcgccatgttcgtccactgcgacgtgacgtcggaggaggacgtgagccgcgccgtggacgctgcggcggagcggttcggcgcgctggacgtgatggtgaacaacgccggcgtgacgggcaccaaggtgacggacatccgcaacgtggacttcgcggaggcgcgcagggtgctcgacgtcaacgtgcacggcgtgttcctggggatgaagcacgcggcgcgcgctatgatcccgcggaagcggggctccatcgtgtcgctggccagcgtggccagcgccatcggcgggacgggcccgcacgtctacacggcgtccaagcacgccgtggtcgggctcaccaagagcgtcgccgcggagctcggccgccacggggtgcgcgtcaactgcgtgtccccctatgccgtgcccacggcgctgtcgatgccgcacctgccccagggcgcgcgcgcagatgacgcgctcaaggacttcctggcctttgtcggcggcgaggccaacctcaagggcgtcgacgccatgcccgaggacgtcgcccaggcggtgctctacctggccagcgacgaggcgaggtacgtcagcgcggtcaacctcatggtggacggaggcttcacagccgtaaacaataacctcagggcgtttgaggattagttgaggcatttatgccagctctgggattgggagggagtattaccgctatttcttctgctgttgtgacaagtgtgtgcaagactaataaaccgcagcatgttcatgtagccaacagatgattgaacattccaagtatca

SEQ ID NO: 129649 - DNA, 236 bp, Zea Mays
atcatgaactcgttgttcattacatagattttggatcatgatatcattaatcattacgatacttattgattatgagaagataattatattggagatgaaacccgcgggtaacccatgggtacccgttaacccgatgggtacgggtttgggcaaaatctcaaacccgtcacgggtacgggttttttaatgggcatatatatttttcacgggtacgggtttgggacggcaaaacccag

SEQ ID NO: 129650 - DNA, 297 bp, Zea Mays
atgggaggccctcgccacccattcgggatgccatcggaaaatgacgaggaagacttacaggccaacccagacctcggcatcaattctgaggaccaaatgctgctcaaaagccttcgcacgcgcaactccaaacttcagaagaaaagagatgccctcgcggccaagcaaccgcgcagcgaggctcaaaccagggtgtgtcgcctattaagcaagagaaagaacaccttcaagccctcaagcaagaaatccaacacctgcatgcccaagactcaacacacccttcacatggccatatga

SEQ ID NO: 129651 - DNA, 1014 bp, Zea Mays
atggcggcccccgcgatggcagcgccgccgccaccgccggcctgcttccccatgcccaccaggctgacgatgccgccgacgtcgatcacgctcccggacccgccgccgctgtctgtcggcggcgcctgcaggcgcgtggcggccaagcacaaggccgtggtggtgctgggcgccacgggcaccggcaagtcccgcctggcgatcgacctcgcgctgcgcttcggcggcgaggtcatcaactcggacaagatccaggcgcacgccggcctggacgtggccaccaacaaggtgggcctcgccgagcgcgggcgggtgccgcaccacctgctgggcgtggtgcacccggacgccgagttcacggcggccgacttccgccgcgaggcctcgcgcgccgcggaccgcgccgcggcgcggggccgggtgcccgtcatcgccggcggctccaactcgtacgtggaggagctcgtcgagggggaccggcgcgcgttccgggaccggtacgagtgctgcttcctctgggtggacgcgcagctccccgtgctgcacggcttcgtcgcccgccgcgtcgacgacatgtgccggcgcggcctcgtcgacgaggtggcggccgcgttcgacccccgccgcaccgactactccaggggcatctggcgcgccatcggcgtgccggagctcgacgcctacctccgggcgcgcggccgcggccacggccaccaccacgaccagatgctcgccgcggccctccacgagatcaaggccaacacgtcccgcctcgccgtgcgccagcgcggcaagatccagcggctcgagcgcatgtggcgcgtccgccgcgtcgacgccacggaggtgttcctgaagcgcggcctcgccgccgacgaggcctggcagcggctggtcgccgcgccctgcattgacgccgtcaggtccttcctgctggaggaccaacaagagtacagcagcatgggcaccgccggcgccatgttgcctgccgccgtcgcagccgcggctgtctaa

SEQ ID NO: 129652 - DNA, 1148 bp, Zea Mays
cgcgcgccagcccaactgcccaacgaagctatcctcatgcaatgcatagagggctccatacctgtctcctcgagcacaaggatcgccgtggtgaccggcgggaataaagggatcgggctggaggtctgccggcagctagccgccgcctccaccagcggcctcgccgtcgtcgtcgtcttgacggccagggacgaggcgaggggcgcagctgccgtcgggaagctcagaggcctggggctctccaacgtcttcttccaccagctggacatcacggacgccccgagcatcgctcggctggccgatttcttgaagtcccggtttgggaagctggatatcctggtgaataatgccgggtttgttggccttgagtacatccaagatcgtatagatggcacttcaacgacgagcgaggagttttgtggcatggacatggacaagaggctggagctgctgctgaaatggtgcctccgggagacttgcgatgctgggaaggaatgcatgaggataaactaccacggcacgaagcaagtcacccgagcactcctgccactgctgctggcctccgacagcggaaggatcgtcaatgtctcctcggtgcttgggcagctcaggtttttcggcagcgaggcgctgaagcgggagctggacgacgtggcgagcctgaccgaggagaggctggacgaggtggcgggcgcgttcgtggcggacctggaggccggcgccgtggaggcgcgagggtggtggcccgccgggttctcgccggcttacatggtgtccaaggcggcgctgaacgcctactcgcgcgtcctggcgcggaggcaccccgcgctgcgcgtcaactgcgtgcacccgggcttcgtcaggaccgacatgaccgtcaacttcggcatgctcacgcccgaggaaggcggcagcagggtggtggccgtcgctctgctccccgacggcgggcccaccggcgcctacttccaggagcgccagcaggcgccgttcgtgtgacgcgctctgcctctgctctgcttccttcaccacccgatgcttgatagctatgtatctcttgaagttttcgcttgataatagttgatacacattcaatccccgcgcgtaatctctccgttgcaaaaataatggaatcctaagttttggac

SEQ ID NO: 129653 - DNA, 558 bp, Zea Mays
atgccagtgaaccactggcagtttgtccaagaaacgatgactgcaaggaatacacatgatgccattgtggatagaaccatccaaaatctctccgtttcatctgtactctcagtagggcttgaagaaagggcagttgagtttgatctaccgaatagttatggttatcacttggctgggtgttgtcatgattctcttgcaaccgatcagaaatttcctcatctgaagctttggtgccgcaactatggagatccttcttgcaactcaaaccatccttctcagagagcttcttctcccggaccaactccatgggcggcgcctcctcctccatcttcgtgttcctcctcttccccccttggcctgcgctcccgcccccgcccccgaagccacctccacgtcaacttcgtccagatcgagctgcttcctcaccgtccccttcggccggcgcgcctagcgggtcctgccccacagcgggtcgatcttgtcctccacgtcgctgccgtcgcccgtcgtcgggggtgtcgatcggcggcaacggtgacgacgcatctggtggcgtga

SEQ ID NO: 129654 - DNA, 721 bp, Zea Mays
tctatggaatgaacatgaactccagatgagaaccagatgtattcgtccttttgtgatttgctgacaatatattcagagtacctgtttcaaaatcctcataaagtgtgtaaatgtaatagatcatacatacattacaattattgtggcccatatcgttattttttcaatggattttgtgcttcattagcttagttgtagacttgtagtgcttatatagatgcgcatttgtatagctttatgacatcattttacataagtggttattatgatcaattattatattcatggcttgtatttctcctaagtgcttcacaaccaaggattaaagtttttttaactttcagaggagcagtgctccagctataggtaatagattacactcggccttgatcctctcaagaaattctgcgtgcaatctgaagggcatacgagcatgaaagggaattaggctttcacctagttcctaaataattttggtggttgaattgcccaacacaaatctttggactaactagtttgcccaagtgtatagataatacaggtgaaaaaggttcacactcagccaataaaaagaccaagttttggattcaataaaggagcaaagaggcaaccgagggcacccctggtctggcgcaccggactgtccggtgtgccaccggacagtaaacagtacctgtccggtgcaccaggggactcagactccaactcttcactctcggga

SEQ ID NO: 129655 - DNA, 771 bp, Zea Mays
atggatttgctggcgtccttggccgccgaggagcggtggctgttcccggcgttcctcgccatgtacgccgccatctactgcgccggccagctcgtcgtgttccggcggtgggcgccgcggcagaggctcgacggcgccagctgcctcatctcgctattccacggcacccccgccgcgctggccgccgcgggggccatcctcgcgcttcccgcggagtcccgctccttcgccgcgcccaacgcgcgcctccaggaccacgtcctcgactacagcgtcgcctacttcaccatggacctgctccactacctcgccttcctgccgggcgacgtcctcttcatcgcgcaccacctcgccacgctcttcgtcttcctgacctgccgctacctcgtccgccacggcgcctacgcgctcctcgtcctccttgtcctcgctgaggtcaccagcctgctgcagaacgtctggacgctcgccgggatctggcgggaccagtcccccgccgccgcccgcgtctacggcgccctctcgccgcccttctacgcgctctacacgctcgtcaggggcgtcgccggcccgctcttcctcctcaagatggccgccttctacctgtccggccaggccgtcgacgtcattccgtggtgggtgcggatctcctggatcctggttgtcggcaccgccattgcggtcagcaacctgtggatttggaacctctggaaggagctcgtcagggaatggaagcagcaggcccctcccaagtcaaagaaagacacatag

SEQ ID NO: 129656 - DNA, 1617 bp, Zea Mays
atgggcaactgctgcgccgcgccgtcgacggagggaagcggcaagacccgccccaagaagcagaaggagaacccctacaacgtcgcctacaaccgcggcgcggcggcgccgccgccgcccccggcgcgcccgggcctggtggtgctgcgggacccgacggggcgggacctcggcgcggagtacgagctgggcggcgagctggggcgcggcgagttcggcgtcacgtacctgtgcacggagcccgccacgggggcgcgctacgcgtgcaagtccatatccaagcgcaagctgcgcacgcccgtggacgtggaggacgtgcgccgggaggtggacatcatgcgccacatgccgccgcaccccaacatcgtcagcctccgcgccgcctacgaggaccgagacgccgtgcacctcgtcatggagctctgcgagggaggggagctcttcgacaggatcgtcgcccgcgggcactacaccgagcgcgccgccgccgccgtcatgcgaaccatcgttgaggtcgtccagaagtgccacaggcatggcgtcatgcaccgggatcttaaaccagagaactttttatatgcaagcaaggacagttcccctctaaaagcaattgattttggcctgtctgtgttcttcaggcctggtgagcgatttacggaaattgtaggcagtccatactacatggccccagaggttctgaagcgaaactatggccctgaagttgatgtctggagtgctggagtgatactttacatacttctttgtggtgtaccaccattttgggcagaaaccgaacagggagtagcgcaggcaatcatacgatctgtggtagatttcaaaagagaaccatggcccagagtatctgagcctgctaaagatcttgtcaggcgcatgcttgacccaaatccattgacacggtttactgcagcacaagtacttgttgaatgggcagagcatccatggctacatgactctaaaaacacgccagacgtttctcttggcgatactgtccgagcaagactgcagcaatttgctgcgatgaacaagttaaagaagaaagcactaagggtgattgctgagcatctgtctgcggaggaagtagctgacataaagcaaatgttcgataagatggacgtgaacaagaacggcaagctaacattcgaggaattcaaggccggcctccgtaagctgggaaaccaaatgcatgattcagaccttcagatactgatggatgctgccgacgtcgacagaaacgggaccttagattacgaggaattcgtcacggtgtctgtccacgtgaggaagataggcaacgacgaacacatccagaaggccttcgcatacttcgaccggaataagagtgggtacatagagatcgaggagcttagagaggcactggctgatgaactggatggcagtgatgaagacatcatcggtggcatcatccgggacgtggacacagataaggacgggaagataggctacgacgagttcgcggcgatgatgaaggccggcactgactggaggaaggcctcccggcagtactcgcggcagcggttcagcaacctgagcctgaagctccagaaggacgggtccctcggcgccgacacacggtag

SEQ ID NO: 129657 - DNA, 252 bp, Zea Mays
atgggcgagttcgacgactactgggcgcgggcgtacaggggcgaccccgcggtcccgcactccgacccgcagcggctcatctccacctggaccggcgcctttgccctcggcgcggccgcctgcgtccaccaccacgcctccgcgcttgcatcccgcctcaagtccctaccggcgacttggcaagacatgacattggcccttgatcaaaagcgatggaagaaagcttttgagaaaaagcggcagcaaccttaa

SEQ ID NO: 129658 - DNA, 1145 bp, Zea Mays
caggtcggcgaccaggcgaaacgtgctgctgcaagaagaagaataggtacacagacagcatgtccggagttcaggcgatgccggcggccgtgggcgtggcggggctgagagggtcagggttggttagcagcagcagtaccggcttgttcgccggcgactgcaagaggaaggctcgtcgcccggcgtgctcggcctgggccctcaggcagagccggatcggcagcaggagcaggagcaagaggggcctcggcatcgtctgcaacctcgcgggacagtacgaggattccttcgacgacgtccagcggcaactgatgaactacttcacctacaaggccgtgaggaccgtgctgacccagctctacgagctgaacccgccgagctaccgctggttctacaacttcgtcgctgtcaacaagcctaccgacggcaagcatttcctccgtgctctcggcaaggagaggcaggagctcgcagagcgagtgatggtcaccaggcttcacctgtacgggaaatggataaagaaatgcgaccatgccaagacgtacgagaagatctccgacgagaacctggcgctgatgcgggagcggctgatggagacggtcatctggccaaccgacgacagcagcacggagaagatcggctgatgcctgatgcctgcggaggcgccgagtcctttcgggttgctgatcaagcttagctccttctattagcatgtagagcagcactctgggtttctctatcagtcagtcagtcagccagccagtcagtgggttgtatataatcggagttgtagtagacagtatacatttctctgggcaggcaatcactgtttgaggtgttaacagtgccgttttgccctcccaattaagcctctacagtcggtctaagtgaagcaaaaatgcttaccttgtagtagctaaatttacatgtgcggggatatacgttgtaatagaatatttctgcgccccgtacgtggctgtttgatgaaagcattctgtacggtagtcaggaaccctcttctacctgaaccagtcgcgagcgttcgatcgggcaaactggccaggatgacgttgctctcagttcttgttgctagttctgcttcttgcgttgatatatagggtcctgccctgcgtcgtcttcgtctc

SEQ ID NO: 129659 - DNA, 825 bp, Zea Mays
atggcggagcgcggcggcgagcgtggtggagagcgcggcgggttcggccgtggcttcggtcgcggcgggcgcggtgaccgtggtgggcgtcgcggcggccgccgtggcccgcgccaagaggaagagaagtgggttcccgtcaccaagctcggccgccttgtcaaggagaacaagatcaccaagatcgaggagatctacctgcactcgctccccgtcaaggagcaccagatcgtcgagaccctcgtcccggggctcaaggacgaggtcatgaagatcacgcccgtccagaagcagacccgtgccgggcagcgcacccgcttcaaggccttcgtcgttgtcggcgatggcgacggccacgtcggcctgggagtcaagtgcgccaaggaggtggccaccgccatccgcggcgccatcatcctagccaagctctccgtcgtccccgtcaggagggggtactgggggaacaagatcggacagccccacaccgtgccctgcaaggtcaccggcaagtgtggctccgtcactgtgcgcatggtgcccgcgcccaggggttctggcatcgtcgccgcgcgcgtgcccaagaaggtgctgcagttcgctggcattgaggatgtcttcacctcgtcccgtggctccactaagacccttggcaacttcgtcaaggcaaccttcgactgcctgatgaagacctacggcttcctcactcctgaattctggagccagaccaagttctccatggccccgttccagcagtacaccgacctgctggcaaagcccaccaagggccttgtgctcgaggccccaactgagacagtagaggcttag

SEQ ID NO: 129660 - DNA, 725 bp, Zea Mays
ttcttgcttcctatattcacaaggtaggtcgtcgatcagagggggtgtgtgtggcagcttaattattggacgacgacaggagagatcgatcgagcatttgcaattaatggcggccatgggcatgaagaagggtgtgctgatgctggctctcgggctcgcgatggccgttacctcgtcggccgtcgtctacaaggtcggcgacgcctctgggtggacgatcctcggcaacgtcaactacaccgactggacttccaagcagaacttccgtgtcggagacaccatagagttcacgtaccccccgggcatccacaacgtgctggaggtgaacaaggccgactaccacagctgcaccaactccacgccgatcgccacgcacacctccggcgacgacaagatcgtcatcaagagccccggccaccgcttcttcatctgcggcgtgcccggccactgcgccgcgggacagaagctcagcatccgcgtcctcaagacgcgctcctctgacgccccttcccctgcgcccgccgcgcgctcagcctcggcggcgtcgcccagccccagcggcagcaccagcaccgatccgagcggcgccggcgcctcggcgtcgccgcctgcgtcgtccacggacagcacgcccgacgcgacgaccaccaccgcgcccgcgcccgacgccaatggcgcgggggtcagtgcaggccaccgggccgtcgtcgctgccatggcactgg

SEQ ID NO: 129661 - DNA, 1133 bp, Zea Mays
atatcctctcatccacttggccacccgcgcgccgtctccactctccaccaccacaccacccgctcctcttagctagctgcatgctcgcgccgccctcttccattccattccattccattccagtactcgctcatcttgctccgccttctgcttctgcgcatcctccaaggatcgtgatggccatggccacgcaagcctccgcggccacgcgccacctggtggccgccgccgcttccgcctgggcgccgtcggcgaagccgcggcagctaagctcacagctcgcgctgccgccgtcgtcctcccgcgcgccggccccgctccgcgcgaccgccggggaggcggtgaccgaggaggcgcccaaggggttcgtggccccgcagctggaccccagcacgccgtccccgatcttcggcggcagcacgggcgggctgctccgcaaggcgcaggtggaggagttctacgtcatcacgtgggtgtcccccaaggagcaggtgttcgagatgcccaccggcggcgccgccatcatgcgggaggggcccaacctcctgaagctggcgcgcaaggagcagtgcctcgcgctcggcaccaggctgcgctccaagtacaagatcacctaccagttctaccgcgtcttccccaacggcgaggtgcagtacctccaccccaaggacggcgtctacccggagaaggtcaaccccggcagggagggcgtcggccagaacttccgcagcatcggcaagaacgtcaaccccatcgacgtcaagttcaccggcaagagcaccttcgactaatcacacatcacgccgcccgcccgcccggccggtgatccaaatcaaaggacttcttcttcttcttatattaataattaagctagctgctggtggtgcgccatatacatgcatggtttgatctaaatatatgtggacatggatgtgtaatttgttttagtaatttcttggtgaccgtggaggcgcagcgtgggactctatgtacatgtgcatctgctcctcatgtctatgcatatgacaacgttgccataacacctgaatctttcaatagtgcatttatgagtttttggtgtttggatgacaacacaattaaaggtctaataaaagtgttaagtgttggacgag

SEQ ID NO: 129662 - DNA, 847 bp, Zea Mays
tatattttacccacgggtttgcgagttcttggtagcataagaacgtatccgtacccgcaaacccgacgagtacgactttgttcccattaataaaccaatgggtaagcaaattaacctttatccaagccctggtagagtaaaactcgtcgggtttcaggcaacgggtacttattgccatctctaattagcactatgctgcaaagttctttcccatttttattttgcctgaattcatatgagaagtggcttttgtttgacacctggcatttcttgcaggtgaaaaaggaaaacgctgagcgtgaagcactgggagcccttccactctaccagagaacgcttccctaaatcgctggctaaacatggttgcaagtcttctctttacggcaaatcagaatgcatgcaataaaatgcagtgggtgttttttttggttccaaccaaagttacattttacttgtccacgcagtggtgcattgaccatgcgctctacctgtttttttttcttccgattaatgggagcaaattattgtaacactataattaacttgtgaatcttcagctgcgggtggctgacgtagtgttctttgatcgtgattttttgtatccattgagctttttttcgaggttgacactggctctacggccttgtattaagaactagctcagttgaatgacgagatgctgcagctagtgcaacattttttttaaagtttgagaacgtatccgcccaggcatgcgagtcctggatcctaactcctagcgggctgagatagcactagcacatgcgcagccgaattacaagagcgtggaacatgcacgaaactttaaataggaaaaaaaagaaagaaa

SEQ ID NO: 129663 - DNA, 994 bp, Zea Mays
cacgcacccacgcacacgcacgccccccagagcgagaaccgagaaggacaatcgcgtcccaccgccgctgcacaagacgaggaagaggttcccggtcccggcgccgccactatgtcgtcgatgatgaacgcgctgtcaaactggctggtgaacccgcgccgcaacccgctcgcgcgcctccacatgcacaccgtctcctcgcgcctcaggaaatacgggctgaggtacgatgacctgtacgacccctacttcgacctggacatcaaggaggcgctcgggaggctgcctagggaggtggtcgacgcccgcatccagcgcctcaagcgcgccatggacctctccatgaagcatcagtacctccccgaggacctccaggcacagcaggtcccattcagaggatatttgagtgacatgttggctctggtgaaaaaggaaaacgctgagcgtgaagcactgggagcccttccactctaccagagaacgcttccctaaatcgctggctaaacatggttgcaagtcttctctttacggcaaatcagaatgcatgcaataaaatgcagtgggtgttttttttggttccaaccaaagttacattttacttgtccacgcagtggtgcattgaccatgcgctctacctgtttttttttcttccgattaatgggagcaaattattgtaacactataattaacttgtgaatcttcagctgcgggtggctgacgtagtgttctttgatcgtgattttttgtatccattgagctttttttcgaggttgacactggctctacggccttgtattaagaactagctcagttgaatgacgagatgctgcagctagtgcaacattttttttaaagtttgagaacgtatccgcccaggcatgcgagtcctggatcctaactcctagcgggctgagatagcactagcacatgcgcagccgaattacaagagcgtggaacatgcacgaaactttaaataggaaaaaaaagaaagaaa

SEQ ID NO: 129664 - DNA, 896 bp, Zea Mays
cacgcacccacgcacacgcacgccccccagagcgagaaccgagaaggacaatcgcgtcccaccgccgctgcacaagacgaggaagaggttcccggtcccggcgccgccactatgtcgtcgatgatgaacgcgctgtcaaactggctggtgaacccgcgccgcaacccgctcgcgcgcctccacatgcacaccgtctcctcgcgcctcaggaaatacgggctgaggtacgatgacctgtacgacccctacttcgacctggacatcaaggaggcgctcgggaggctgcctagggaggtggtcgacgcccgcatccagcgcctcaagcgcgccatggacctctccatgaagcatcagtacctccccgaggacctccaggcacagcaggtcccattcagaggatatttgagtgacatgttggctctggtaagaatctttttacttcattccattggcatttcatatgcctttgaattagagtcactccattcccctttttttaatgcgtgcaagggacctaatctacatgatatgaattatgcttaggagtgtactgcctatcaatcgttgctagatttaatatgggtacaacggacaagtttacagcattgttagttagcatttaagtagggatagacatggaagagtcagggaaaatgtgcattgctgtatattttggactgagtattaagccattgtatcaggtaggtcattaatcactattaccatatcatgtggcatctaattatgaagtttgtctcagcctatatatcatgccttgttcttgtgttgctccatggacttcacttctctcttactgttatttctctagggtttcacttcttttcatgttcactatcatattgatgccttttttacttttgcaaaccaatattcag

SEQ ID NO: 129665 - DNA, 686 bp, Zea Mays
cacgcacccacgcacacgcacgccccccagagcgagaaccgagaaggacaatcgcgtcccaccgccgctgcacaagacgaggaagaggttcccggtcccggcgccgccactatgtcgtcgatgatgaacgcgctgtcaaactggctggtgaacccgcgccgcaacccgctcgcgcgcctccacatgcacaccgtctcctcgcgcctcaggaaatacgggctgaggtacgatgacctgtacgacccctacttcgacctggacatcaaggaggcgctcgggaggctgcctagggaggtggtcgacgcccgcatccagcgcctcaagcgcgccatggacctctccatgaagcatcagtacctccccgaggacctccaggttcgtgccccttcatttcccccgatctgggtctctcagttcgtattacggtcgtggtcgttgtgacggcagcgtccgaggttgcgtaagataggttctatgtcgaaaactaatcctgacgtgattcattatcggtgtaaagttgcggatgattgcatgtcaagtgagatgtgtccgctgatgtgtttgggttgtacctgtgattcgagaattttgcaaccatggcactcccttcggcgggcttcagattattggcaccgcgatcgtcgcaattgaatctgtggcattataatctcgcccgttttgaaaaa

SEQ ID NO: 129666 - DNA, 1267 bp, Zea Mays
tgccaaatccagcctccgcacgcggagaaaattccgaagcggaagaagttgaaccgacaggtgagagagaaagagataggagagacgaggccacgactccacgggggaggcagggagagaaggtgagagaagatgcgttgcgccgccgccgcgcttgcggtcgccctcatcgctgtcgttgccggcgcaaccgcgccggggtcgccggccgcgggcacgtgcgcgcggaggggtgcgctaccgttcctcgacgccgtcggatcccgctgccccttcgtccggatcgagccgtccccgcctctcgaggtgagaggagaggctgtggatactgagttgaaccttcgaaggaggggtgcttcatactccattctcttctatgctgcatggtgtcctttttcgagcaaatttcgaccgatatttgaaactgtcagcactatgtaccctcaggtacatcactttgctgttgaagaatcttctgcgacaccaagtttgttttcaagatatggagttcgtggtttcccagccattcttcttgtaaatgagactacaatggttcgatatcggggttcaaaagatcttaactctctcgtcgatttctataaagaaactacaggtctggatccagttgcatacattgatgttgttgtccagcaagagagcacagcaagcttgagctcagttgcaccatgggatcgttctccgcttgagatggccaaagacgagccgccgtatctgttggtcgcagttctcttcatcatcctgaaggccgcagcgcgcttggtacctgctgccatgtctcatctgagggccttcttggccgtccgtgtccagaacctgaacctagggatccgcaggggatcaagccaggtcttggaacgagccttgaacgcccttgacgtgaggaggctgtgcagcaagctggggctgagcaacagggcaacagatctgaggaagggtgcaagcaatgctcgagcctgggcttcctcgtttgcttccgtctcactgggtgaaccttcatcttcgagacaagcttagccatttttttttgttttttttttggagatgtcgcttgttagggtagctagctgctcacatgatgcaaagaccatataaggtttgcttcccatcctgtttgtttctgtgcagtcaggaggagaggggaaatcttacatgcctgtaaattttgacgacatcatgtgctgttgtatattaggaatacctttgcatttcctgtttcggttttagaagtgcggtctcaaatgagctg

SEQ ID NO: 129667 - DNA, 1426 bp, Zea Mays
tgccaaatccagcctccgcacgcggagaaaattccgaagcggaagaagttgaaccgacaggtgagagagaaagagataggagagacgaggccacgactccacgggggaggcagggagagaaggtgagagaagatgcgttgcgccgccgccgcgcttgcggtcgccctcatcgctgtcgttgccggcgcaaccgcgccggggtcgccggccgcgggcacgtgcgcgcggaggggtgcgctaccgttcctcgacgccgtcggatcccgctgccccttcgtccggatcgagccgtccccgcctctcgagattggtgaacgatctttacttttagctgctgctggtcatattttgacttaataaagtgccttgtttatcgattaattctgatggtgcaatgtatgtggatactttgtattgcaaatttgggaagttgtagtttcttatataccttgtcttgtactgaaggtgagaggagaggctgtggatactgagttgaaccttcgaaggaggggtgcttcatactccattctcttctatgctgcatggtgtcctttttcgagcaaatttcgaccgatatttgaaactgtcagcactatgtaccctcaggtacatcactttgctgttgaagaatcttctgcgacaccaagtttgttttcaagatatggagttcgtggtttcccagccattcttcttgtaaatgagactacaatggttcgatatcggggttcaaaagatcttaactctctcgtcgatttctataaagaaactacaggtctggatccagttgcatacattgatgttgttgtccagcaagagagcacagcaagcttgagctcagttgcaccatgggatcgttctccgcttgagatggccaaagacgagccgccgtatctgttggtcgcagttctcttcatcatcctgaaggccgcagcgcgcttggtacctgctgccatgtctcatctgagggccttcttggccgtccgtgtccagaacctgaacctagggatccgcaggggatcaagccaggtcttggaacgagccttgaacgcccttgacgtgaggaggctgtgcagcaagctggggctgagcaacagggcaacagatctgaggaagggtgcaagcaatgctcgagcctgggcttcctcgtttgcttccgtctcactgggtgaaccttcatcttcgagacaagcttagccatttttttttgttttttttttggagatgtcgcttgttagggtagctagctgctcacatgatgcaaagaccatataaggtttgcttcccatcctgtttgtttctgtgcagtcaggaggagaggggaaatcttacatgcctgtaaattttgacgacatcatgtgctgttgtatattaggaatacctttgcatttcctgtttcggttttagaagtgcggtctcaaatgagctg

SEQ ID NO: 129668 - DNA, 1357 bp, Zea Mays
tgccaaatccagcctccgcacgcggagaaaattccgaagcggaagaagttgaaccgacaggtgagagagaaagagataggagagacgaggccacgactccacgggggaggcagggagagaaggtgagagaagatgcgttgcgccgccgccgcgcttgcggtcgccctcatcgctgtcgttgccggcgcaaccgcgccggggtcgccggccgcgggcacgtgcgcgcggaggggtgcgctaccgttcctcgacgccgtcggatcccgctgccccttcgtccggatcgagccgtccccgcctctcgagattggtgaacgatctttacttttagctgctgctggtcatattttgacttaataaagtgccttgtttatcgattaattctgatggtgcaatgtgagaggagaggctgtggatactgagttgaaccttcgaaggaggggtgcttcatactccattctcttctatgctgcatggtgtcctttttcgagcaaatttcgaccgatatttgaaactgtcagcactatgtaccctcaggtacatcactttgctgttgaagaatcttctgcgacaccaagtttgttttcaagatatggagttcgtggtttcccagccattcttcttgtaaatgagactacaatggttcgatatcggggttcaaaagatcttaactctctcgtcgatttctataaagaaactacaggtctggatccagttgcatacattgatgttgttgtccagcaagagagcacagcaagcttgagctcagttgcaccatgggatcgttctccgcttgagatggccaaagacgagccgccgtatctgttggtcgcagttctcttcatcatcctgaaggccgcagcgcgcttggtacctgctgccatgtctcatctgagggccttcttggccgtccgtgtccagaacctgaacctagggatccgcaggggatcaagccaggtcttggaacgagccttgaacgcccttgacgtgaggaggctgtgcagcaagctggggctgagcaacagggcaacagatctgaggaagggtgcaagcaatgctcgagcctgggcttcctcgtttgcttccgtctcactgggtgaaccttcatcttcgagacaagcttagccatttttttttgttttttttttggagatgtcgcttgttagggtagctagctgctcacatgatgcaaagaccatataaggtttgcttcccatcctgtttgtttctgtgcagtcaggaggagaggggaaatcttacatgcctgtaaattttgacgacatcatgtgctgttgtatattaggaatacctttgcatttcctgtttcggttttagaagtgcggtctcaaatgagctg

SEQ ID NO: 129669 - DNA, 1514 bp, Zea Mays
tgccaaatccagcctccgcacgcggagaaaattccgaagcggaagaagttgaaccgacaggtgagagagaaagagataggagagacgaggccacgactccacgggggaggcagggagagaaggtgagagaagatgcgttgcgccgccgccgcgcttgcggtcgccctcatcgctgtcgttgccggcgcaaccgcgccggggtcgccggccgcgggcacgtgcgcgcggaggggtgcgctaccgttcctcgacgccgtcggatcccgctgccccttcgtccggatcgagccgtccccgcctctcgaggtgagaggagaggctgtggatactgagttgaaccttcgaaggaggggtgcttcatactccattctcttctatgctgcatggtgtcctttttcgagcaaatttcgaccgatatttgaaactgtcagcactatgtaccctcaggtacatcactttgctgttgaagaatcttctgcgacaccaaggtttgtgtatgttgaaagcgttggtgttagacacttagactgttgaattgagatagtttgtccctttgtttgtttcaatggattcctacagatcattatattgcatcttattgtagtttgttttcaagatatggagttcgtggtttcccagccattcttcttgtaaatgagactacaatggttcgatatcggggttcaaaagatcttaactctctcgtcgatttctataaagaaactacaggtacaattgttgctcaccttgttcacgcatacatagcttcagtaaatgatcacaaattctttcaagtatgcgcttaattgaggagggttgtgataggcttgtcaagccaatgtactgaagctatacagtacattgatgttgttttcctgctgcaggtctggatccagttgcatacattgatgttgttgtccagcaagagagcacagcaagcttgagctcagttgcaccatgggatcgttctccgcttgagatggccaaagacgagccgccgtatctgttggtcgcagttctcttcatcatcctgaaggccgcagcgcgcttggtacctgctgccatgtctcatctgagggccttcttggccgtccgtgtccagaacctgaacctagggatccgcaggggatcaagccaggtcttggaacgagccttgaacgcccttgacgtgaggaggctgtgcagcaagctggggctgagcaacagggcaacagatctgaggaagggtgcaagcaatgctcgagcctgggcttcctcgtttgcttccgtctcactgggtgaaccttcatcttcgagacaagcttagccatttttttttgttttttttttggagatgtcgcttgttagggtagctagctgctcacatgatgcaaagaccatataaggtttgcttcccatcctgtttgtttctgtgcagtcaggaggagaggggaaatcttacatgcctgtaaattttgacgacatcatgtgctgttgtatattaggaatacctttgcatttcctgtttcggtttt

SEQ ID NO: 129670 - DNA, 710 bp, Zea Mays
caagcgggcacgtccctgccacgccgaccgccggtgcggatccggcaacgtcgggcgcggccggcccctcgcggagttcggcgtggccgcctcctggtgcggggttggctgacaccggcgcgcatgacgaggacgcccagacgctgctgctcttggcgccggatggagcagactgcggcggcccggcggaggccgtggtggctctccaaggcggtcgcggaccgcgatgcatggcgagcgcctggatcccggcgagggcgcggtcgccccttgcctggtcgcggctaccagccccagccaaggcgcagtccggcctcagacggggcggcgactccctggtggcggctactgctggagctatgggcggttagggtttgaaaccctagccgcccctcataataggcgttttggatccttgttgggcctcctgggccggccagccaggctgggccggcgtgcaggccgccaggccgctgtctggtccgcctgacagcttgggctgttttccagggtccagaatagtctattttaccatttttaaattttaaatttaagtataagttaatttcagttcaaatatatcttaagcatctagattcattatttagattgctaaagatatatgtaattgtacatatttgtccattttattatggaaattacagacttattagtgaattatattttctatttacatttataattcacaa

SEQ ID NO: 129671 - DNA, 717 bp, Zea Mays
atgccgctggggtcgaccctctcgccgggcaactcggcgacgtggacgtcgcccaacagtaccttctcgctcggcttcacggcgtccgcgtcctccccgtcgctcttcgtcgccgccatcacctacgccgacggcgtgcccgtctggtctgcgggcaacggcgccgccgttgacttggggagctcgctccgcctctcgtccaacggcgacctccagctcgtcaacggatccggggccgtgctctggtcctccaacacggtgggccagaacgtgtccgccgcggccgtccaggagagcggcaacctcgtgctcaaggacaacctcggggcagcaacgccgccacagaggagtgtgacggagctggtggaaggggactcgtcgcggaagatcgtggacatcaactgcctctccggcggctcctgcgtcgcgtccaccgcgctctccgacggctctcgcctctgcttcctcaagaggcgtaccgcgacgacgaagccccagttggcaacagggccccagaagtgggtggtcttggggccaacggggctgttcaagaacgacttgagcgcggtcgccatgagggaagcagccgaaatcacctgtccctgtcacgcgtaccgaatcaataccacaacgaattcgataacattggcaacaaaatcgggagggggggagtggggtgttggcggcgatctcgacaggacgtatgaccagccgtag

SEQ ID NO: 129672 - DNA, 2457 bp, Zea Mays
gaacttttgtccccctccctcctccacacctctcgttctctccccctccgcctgctccctctcaggagcgcgcgcgcgcgcgcccagatctagggtttcgtccgcggcaagatgagcagcccgcatggcggtctcgacgaccagatcgagcggctcatgcagtgcaagccgctcgctgagcctgaggttagagctctttgtgagaaggcaaaggagattctgatggaggaaagcaatgttcagcctgtaaagagtcctgttactatatgcggtgatattcatggacaatttcatgatcttgctgaactcttccgaatcggtggaaagtgtccagatacgaactacttgtttatgggagattatgttgaccgtggttactactctgtcgaaactgtcacacttttggtggctttaaaagttcgatatcctcagaggatcaccattctcagaggaaaccatgaaagccggcagattactcaagtgtatgggttctatgacgaatgcttaaggaagtgagtgtcttctcttagtttactgtacatattgtggattttttaaaattctgatatcacgaaacaggattttggaagtattagtgaaggacttaataattgcttcactgccaaatcaccacattttgtccttgaaaactattgcattctggaaaattgttttatgcttgtcctatgtccgaacaaaattgaccataccaccttcttttcgtgaaatttgtaagtttacaagatacgtcccgtggtcattttgtaggtatggaaatgcaaatgtctggaaaacctttacagatctatttgattacttccccttgactgcattggtcgagtcagaaatattttgcttgcatggtggattatcgccatccattgagaccctcgacaacatccgcaactttgaccgcgtccaagaagttcctcacgaaggtccaatgtgtgatcttctgtggtctgatccagatgatcggtgtggctggggtatttctcctcgtggtgctggttataccttcggacaggatatatcagagcagttcaaccataccaatagtctaaggctaattgctagagctcaccagttggttatggagggattcaattgggctcatgagcaaaaagtcgtgactatatttagtgcacctaattattgctaccgctgtgggaacatggcatcaatcttagaagtggatgattgcagagagcatactttcatccagtttgagccagccccaagaaggggagagccagatgtaactcgtaggacacctgactatttcctgtgacgcaaaagtgatgtggatcatgcagagcgaaggtttgatagataggcgcagtttcctggttgcagatatatatatttatatatgtttttgctgggacccctccgtgtgctattcttattatttttgccctggctcgccggccgctctgccgcgtcgtgattcaagtgtatacctacagcctgctacagctggaaggactggactgtgttctcaccttttctcaaactggttggtgcttttggctcggtgtggggccgcagtggtgtggggggttgaagcatcaagcagcgatttgtgttatgggaggaaactgttcccgctgtattgttcattttattccccttctctttctcaccgcctgattttcttcccctttgttccctccttgctgtgattcttgtagagttctgcacttgtatggttctatgttgttgggccattagttttttttccctttctgtttttgactacctcgatttgccatatagatttttttaccatttaagcgcagctagtcaacctgtagcattgtttgcaatcggcatctgagttgagcactggttttctttttccacatctcattctgttctgaacacagtgcatagtacggtggtgcaaatgttctatacgtatgcgatctgtaccacaccgcagtttttgttcaaattgccctgtatttgagctctttgctgtcgcgctcgctcgctcattatctgatgttgcctgcgattccttttgatgttgtccatgtgacctggaagttgtgctggaatgttttgacttggacggcatggaattcatggttgcttctctggtgttcatcccgcccgtcgtgatcggttgaccgcccgagcaggatccggcctctccaaggccgtggcttcctggctggtgccgcctcgcccacagatcgtgcagtgccatgccatgtggtctgggggcaggtctgggattcgttgggcgctcgctattccctcgtttcgctgtcgcaaccagctaatgctgtgggttgaagctgagatttcagtggtctagggccaacataaacaattgggcctcctttatacatataatatttttagtatacatttatataatgttataatatattgataaaaaatagtgtgatatcaaaatattatatcaaataaattttacaatacctt

SEQ ID NO: 129673 - DNA, 2202 bp, Zea Mays
agaacttttgtccccctccctcctccacacctctcgttctctccccctccgcctgctccctctcaggagcgcgcgcgcgcgcgcccagatctagggtttcgtccgcggcaagatgagcagcccgcatggcggtctcgacgaccagatcgagcggctcatgcagtgcaagccgctcgctgagcctgaggttagagctctttgtgagaaggcaaaggagattctgatggaggaaagcaatgttcagcctgtaaagagtcctgttactatatgcggtgatattcatggacaatttcatgatcttgctgaactcttccgaatcggtggaaagtgtccagatacgaactacttgtttatgggagattatgttgaccgtggttactactctgtcgaaactgtcacacttttggtggctttaaaagttcgatatcctcagaggatcaccattctcagaggaaaccatgaaagccggcagattactcaagtgtatgggttctatgacgaatgcttaaggaagtatggaaatgcaaatgtctggaaaacctttacagatctatttgattacttccccttgactgcattggtcgagtcagaaatattttgcttgcatggtggattatcgccatccattgagaccctcgacaacatccgcaactttgaccgcgtccaagaagttcctcacgaaggtccaatgtgtgatcttctgtggtctgatccagatgatcggtgtggctggggtatttctcctcgtggtgctggttataccttcggacaggatatatcagagcagttcaaccataccaatagtctaaggctaattgctagagctcaccagttggttatggagggattcaattgggctcatgagcaaaaagtcgtgactatatttagtgcacctaattattgctaccgctgtgggaacatggcatcaatcttagaagtggatgattgcagagagcatactttcatccagtttgagccagccccaagaaggggagagccagatgtaactcgtaggacacctgactatttcctgtgacgcaaaagtgatgtggatcatgcagagcgaaggtttgatagataggcgcagtttcctggttgcagatatatatatttatatatgtttttgctgggacccctccgtgtgctattcttattatttttgccctggctcgccggccgctctgccgcgtcgtgattcaagtgtatacctacagcctgctacagctggaaggactggactgtgttctcaccttttctcaaactggttggtgcttttggctcggtgtggggccgcagtggtgtggggggttgaagcatcaagcagcgatttgtgttatgggaggaaactgttcccgctgtattgttcattttattccccttctctttctcaccgcctgattttcttcccctttgttccctccttgctgtgattcttgtagagttctgcacttgtatggttctatgttgttgggccattagttttttttccctttctgtttttgactacctcgatttgccatatagatttttttaccatttaagcgcagctagtcaacctgtagcattgtttgcaatcggcatctgagttgagcactggttttctttttccacatctcattctgttctgaacacagtgcatagtacggtggtgcaaatgttctatacgtatgcgatctgtaccacaccgcagtttttgttcaaattgccctgtatttgagctctttgctgtcgcgctcgctcgctcattatctgatgttgcctgcgattccttttgatgttgtccatgtgacctggaagttgtgctggaatgttttgacttggacggcatggaattcatggttgcttctctggtgttcatcccgcccgtcgtgatcggttgaccgcccgagcaggatccggcctctccaaggccgtggcttcctggctggtgccgcctcgcccacagatcgtgcagtgccatgccatgtggtctgggggcaggtctgggattcgttgggcgctcgctattccctcgtttcgctgtcgcaaccagctaatgctgtgggttgaagctgagatttcagtggtctagggccaacataaacaattgggcctcctttatacatataatatttttagtatacatttatataatgttataatatattgataaaaaatagtgtgatatcaaaatattatatcaaataaattttacaatacctt

SEQ ID NO: 129674 - DNA, 1451 bp, Zea Mays
tttgtccccctccctcctccacacctctcgttctctccccctccgcctgctccctctcaggagcgcgcgcgcgcgcgcccagatctagggtttcgtccgcggcaagatgagcagcccgcatggcggtctcgacgaccagatcgagcggctcatgcagtgcaagccgctcgctgagcctgaggttagagctctttgtgagaaggcaaaggagattctgatggaggaaagcaatgttcagcctgtaaagagtcctgttactatatgcggtgatattcatggacaatttcatgatcttgctgaactcttccgaatcggtggaaagtgtccagatacgaactacttgtttatgggagattatgttgaccgtggttactactctgtcgaaactgtcacacttttggtggctttaaaagttcgatatcctcagaggatcaccattctcagaggaaaccatgaaagccggcagattactcaagtgtatgggttctatgacgaatgcttaaggaagtatggaaatgcaaatgtctggaaaacctttacagatctatttgattacttccccttgactgcattggtcgagtcagaaatattttgcttgcatggtggattatcgccatccattgagaccctcgacaacatccgcaactttgaccgcgtccaagaagttcctcacgaaggtccaatgtgtgatcttctgtggtctgatccagatgatcggtgtggctggggtatttctcctcgtggtgctggttataccttcggacaggatatatcagagcagttcaaccataccaatagtctaaggctaattgctagagctcaccagttggttatggagggattcaattgggctcatgagcaaaaagtcgtgactatatttagtgcacctaattattgctaccgctgtgggaacatggcatcaatcttagaagtggatgattgcagagagcatactttcatccagtttgagccagccccaagaaggggagagccagatgtaactcgtaggacacctgactatttcctgtgacgcaaaagtgatgtggatcatgcagagcgaaggtttgatagatagctggaaggactggactgtgttctcaccttttctcaaactggttggtgcttttggctcggtgtggggccgcagtggtgtggggggttgaagcatcaagcagcgatttgtgttatgggaggaaactgttcccgctgtattgttcattttattccccttctctttctcaccgcctgattttcttcccctttgttccctccttgctgtgattcttgtagagttctgcacttgtatggttctatgttgttgggccattagttttttttccctttctgtttttgactacctcgatttgccatatagatttttttaccatttaagcgcagctagtcaacctgtagcattgtttgcaatcggcatctgagttgagcactggttt

SEQ ID NO: 129675 - DNA, 2004 bp, Zea Mays
gtgtcccgcctctcgcggtcccgccccgttttctccaaggcagccgctagaaataccaccacgcggacgcgttcgcacgagccgcatcgcatccatactccactgcatctgccatcttggggaactctttggcctctggaaccggcctgcccagccgctcgatcgacgttcggcgaggaggctgatccggtctgttggatcggaggcgcggcgatgggggcgctgtcgcggccggaggaggtgctggcgctggtaaagctgcgggtggcggcggggcagatcaagcgccagatcccgcccgaggagcactgggccttcgcctactccatgctccagaaggtgtcccgtagcttcgctctcgtcatccagcagctcggacccgaactccgcaatgccgtgtgcatcttctacctcgtgctccgtgccctcgacaccgttgaggacgacactagcatcccgaccgaggtgaaggtgcccatcctccaggaattctaccggcacatctacaaccgcgactggcattattcgtgtggaacaaatcactacaaaatgctaatggataagtttcgccacgtatccactgccttcctggagcttggtgaaggttaccaaaaggcaatagaagaagtcactaggcgaatgggtgcaggaatggcaaaatttatatgcaaagaggttgaaactgttgatgactatgacgagtattgtcactatgtagctgggctagttggttatggactttccaggctcttctatgctgctgggacggaagatctggctctagattcactgtcaaattcaatgggcctatttttacagaaaactaacataattagggactatttggaggacataaatgagataccaaagtcccgcatgttctggcctcgagagatatggagtaaatatgcagataaacttgaggacttcaaatatgaggagaactccaaaaaagcagtacaatgcttgaacaatatggtgactgatgcactgattcatgctgaagagtgccttcagtacatgtcagccttgaaggatcctgccattttccgtttttgtgcaataccccagataatggcaattggaacatgtgctctttgctacaataacgtgcatgtcttcagaggagttgtgaagatgagacgtggtctcacggcacgaataattgacgagacaaactcaatgacagatgtctatactgctttctatgagttttcttcattgatagagtcaaagattgatgacagtgatccaaatgctgctctaacacagagacgtgtggattcaataaagcaaacttgcaagtcatctggtttggtaaagcaaagggggtaccatttggagaagtcaccttacaggcctatgctgatcatgattgtcctcctgctggtagctattcttttcggggtaatgttctagctggccctttcttttccgcgatggagacttgagagaaactatgccaatcagatcctttttgtactgtgtattctccaaaggctgcagcaaattcggaagtactgactgtagatcgatacggctgcatgctactgtttccatgactccgttgatgctctcaattcgtttgttcattttattttctcgcgctttgtattgtttgaagctgttttaaggcagaaaatactatcgtgacatgtatgatgtatcctacgaacatgtgtctcagtttagttagcaatggctgcacctctgttcttaaggcgtcgcctaggcgtccgggcgatgggcgatggtctaacgcctaagcgctttgcccgcctacctcacctaggcgttcagaaggtgctccaacgtcttggaccgccttaccgctttaaaaactatgggctgcactgtagttattctatgtgttgtcttgttttcatatctgatatgtttgtgtttatcataactgtgtactctcccatggcgctaattatattcaatattatatgtatgtttagctaaattttaaaacatctaatgataatagttatgtactaa

SEQ ID NO: 129676 - DNA, 2054 bp, Zea Mays
gtgtcccgcctctcgcggtcccgccccgttttctccaaggcagccgctagaaataccaccacgcggacgcgttcgcacgagccgcatcgcatccatactccactgcatctgccatcttggggaactctttggcctctggaaccggcctgcccagccgctcgatcgacgttcggcgaggaggctgatccggtctgttggatcggaggcgcggcgatgggggcgctgtcgcggccggaggaggtgctggcgctggtaaagctgcgggtggcggcggggcagatcaagcgccagatcccgcccgaggagcactgggccttcgcctactccatgctccagaaggtgtcccgtagcttcgctctcgtcatccagcagctcggacccgaactccgcaatgccgtgtgcatcttctacctcgtgctccgtgccctcgacaccgttgaggacgacactagcatcccgaccgaggtgaaggtgcccatcctccaggaattctaccggcacatctacaaccgcgactggcattattcgtgtggaacaaatcactacaaaatgctaatggataagtttcgccacgtatccactgccttcctggagcttggtgaaggttaccaaaaggcaatagaagaagtcactaggcgaatgggtgcaggaatggcaaaatttatatgcaaagaggttgaaactgttgatgactatgacgagtattgtcactatgtagctgggctagttggttatggactttccaggctcttctatgctgctgggacggaagatctggctctagattcactgtcaaattcaatgggcctatttttacagaaaactaacataattagggactatttggaggacataaatgagataccaaagtcccgcatgttctggcctcgagagatatggagtaaatatgcagataaacttgaggacttcaaatatgaggagaactccaaaaaagcagtacaatgcttgaacaatatggtgactgatgcactgattcatgctgaagagtgccttcagtacatgtcagccttgaaggatcctgccattttccgtttttgtgcaataccccagataatggcaattggaacatgtgctctttgctacaataacgtgcatgtcttcagaggagttgtgaagatgagacgtggtctcacggcacgaataattgacgagacaaactcaatgacagatgtctatactgctttctatgagttttcttcattgatagagtcaaagattgatgacagtgatccaaatgctgctctaacacagagacgtgtggattcaataaagcaaacttgcaagtcatctggtttggtaaagcaaagggggtaccatttggagaagtcaccttacaggcctatgctgatcatgattgtcctcctgctggtagctattcttttcggggtaatgttctagctggccctttcttttccgcgatggagacttgagagaaactatgccaatcaggtacggcaaacaatttgaaccacattgctttgaacaatttccatttcccccgaggctaactatgttgcgttactggttttgtatagatcctttttgtactgtgtattctccaaaggctgcagcaaattcggaagtactgactgtagatcgatacggctgcatgctactgtttccatgactccgttgatgctctcaattcgtttgttcattttattttctcgcgctttgtattgtttgaagctgttttaaggcagaaaatactatcgtgacatgtatgatgtatcctacgaacatgtgtctcagtttagttagcaatggctgcacctctgttcttaaggcgtcgcctaggcgtccgggcgatgggcgatggtctaacgcctaagcgctttgcccgcctacctcacctaggcgttcagaaggtgctccaacgtcttggaccgccttaccgctttaaaaactatgggctgcactgtagttattctatgtgttgtcttgttttcatatctgatatgtttgtgtttatcataactgtgtactctcccatggcgctaattatattcaatattatatgtatgtttagctaa

SEQ ID NO: 129677 - DNA, 2878 bp, Zea Mays
caaccgtccaacacgagtctcttctctcttctccgttccttccctcctgaaattctccgctcacgccaatcgaggcacgcaaatggctgagagcccgagctgagcaaccagccaaagcgagaaatccacttggagaagcttctgcgcctccctcccgaacggaggcgggccggggcggggaggggagcacgcctgcgctctgcgcctgcgggtagggtttctcccggcccgacgatggcgtccgccaagtcgtcgaggtcgcggcccgccggccactccggagtgttcccggtgaacgctgcggccggcgcgggaggcagcgatggcggggtgcagctcgcggacaagctcaagatattcaagaccgacaacttcgaccccgacgcctacgtgcagtccaagtgccgcgccatggacgagaaggaaataaggcacctgtgttcctacttgcaagatctaaagaaggcttctgctgaagagatgcgcagaagtgtttatgcaaattatgctgcattcatcaaaacatcaaaggagatatcagaccttgaaggggagctactatcagttagaaatttgctaagtacacagtcagctttaattcatggtctgtctgaaggggttcagatagattcgttggccacagggcctgaaggttctgctgaacaagacatatccagtgttgaagatcaggagccatcagaaatatggaaatggtccacagatttccctgacatgcttgatgttctgctagccgaaagaagagtggatgaagcactggatgccttggatgaggcagaacggatcgctgctgatgccaaacaaaagggaactctatccacgactgacattctggctttaaagagggttatatctgaaaaccgtcagaagttggctgatcagctagctgaagctgcttgccagtcttctatttgtggtgttgagcttcgagctgcagcttctgctctcaagagacttggtgatggacctcgtgctcatagtttgttgctcagtgcacacaatcagagacttcagttaaacattcaaacaatacaaccatctagcacatcatatggcggggaatacactgcttctcttgcgcaacaattttttcctgttatagctcaggctctcagtgactcagttgaggtcttcagtgaaaaatcagcttacacatctgaactagttacttgggctactaagcaggcaatgtcattttcgcttcttgtaaagaggcatactttagcctcttgtgctgctggtggggggttaagaactgctgcagaatgtgttaagatagcgattggttattcagacttgctggaagctcgtggtctatcactttcgtcagttctgatgaagcaactcagaccctctgttgagcaagcattagattccaatttgaggagaattgaagagagtactgctgctttagctgcagctgatgactggatactcacctatcctccaactggtatacgtccactggctagatcatctggtaatctggcactccagccgaagctctcaagcagtgctcaccgtttcaattcaatggttcaggatttctttgaggatgttggaccactggttagcttacagctaggtggttccgcgatggatgggcttctgaaaatattcaactcgtatgtaaacttgctgataagtgctctaccagggtcagtggatgatgaagttaacttggaaggtttggggaataagattgttagaatggcagagacagaggaccagcagttagctttgttagctaatgcatctttactagctgaagagttgctaccgagagcagcgatgaagctgtactctatgaacccggtcagcaaagatagcttgcgtagaagaggtcctgaaaaccaaaatcgtgcggcagagcagcgggcatggaaaaggaagctgaaccgcatggtagagaaacttagagatagtttctgcagacagcatgctctagatcttatattcacagaagaaggtgacacccgtctgagcgcagagatgtacatcgatatggataatactgttgaagatcccgaatgggttccatctgcgattttccaggaattgtatgcgaaattgaataagatggcaagcgttgcggcagacatgtttgttggtagggaaaggtttgccacgctgcttatgatgagacttacggaggcagtcatgctttggctctcagacgaccagagcttttgggaagaggttgaagaaggaccaagggctctgggtccggttggacttcagcagttctacctcgatatgcaatttgtgatccttttcgggcaaggtcgtttcttatctcggcatgtgcatcaagtcatattggacatcattgatagagcgatgagagcgttttctgccacggggatggaccctgataggatccttccaagcgacgactggttcatcgacgttgcccaggagagtattagtaggatcggcggcgggagggcacgagtcgccaatggggacagggaggtgaacagccccacagcctccgtgtcagcgcagtccgtgtcgtcagttagatctctcggcagctcctagcgtgcacagtttctgtatcaatattactgtagggatttgtttggatgtgtttgtgctggtacatatgtgtgagtaattaattgtatgcctaggccaagaaaatccttgaagctggtcttgttcacctgttctgagactttgggccggtccacgcatcggcattccctacggtagtggtaggtattgatggaccaaatgtaccggctggtacagccacgggcacaacacgaatcggctatgctattgctagctacgacacggttatagttccgtgacaggtattgtctgctcttataaagctctagttttttttttt

SEQ ID NO: 129678 - DNA, 871 bp, Zea Mays
caaccgtccaacacgagtctcttctctcttctccgttccttccctcctgaaattctccgctcacgccaatcgaggcacgcaaatggctgagagcccgagctgagcaaccagccaaagcgagaaatccacttggagaagcttctgcgcctccctcccgaacggaggcgggccggggcggggaggggagcacgcctgcgctctgcgcctgcgggtagggtttctcccggcccgacgatggcgtccgccaagtcgtcgaggtcgcggcccgccggccactccggagtgttcccggtgaacgctgcggccggcgcgggaggcagcgatggcggggtgcagctcgcggacaagctcaagatattcaagaccgacaacttcgaccccgacgcctacgtgcagtccaagtgccgcgccatggacgagaaggaaataaggcacctgtgttcctacttgcaagatctaaagaaggcttctgctgaagagatgcgcagaagtgtttatgcaaattatgctgcattcatcaagtgagtacacagtggtccatttcaggggcgtacccagtgccgtaggcttcccgcactgtaccgggtccagggaagggtatctttaagcgtcaagccttacccgcataatatgtagatagaggctggggctcgaacccgggaccttccgcgccagttacacagtggtccatttcaacctacatgaaatttgtactggtgggagtttccaataaattgcttagaaatgttctggatggcctttttatatatgtacaggctaattgctgtctttttgtttctttatcaccttcgaaacatggatgttccaacttctccattgattttttcttggcgatttgagttactatttg

SEQ ID NO: 129679 - DNA, 463 bp, Zea Mays
aactgatcaaatcataaattatgaccatgttaagagaagttacacagcaaaattcttgtccaccaagatcgctcatgtgtaccagctgggttgtctgacagcaaccacagccaatggtgccaaaaagtaacagttatttaactaagctttctaaccgttccatttacaaatcaagtccccaagcaggtctcatactgctcaaagaactcggtctatacgttgagaaaagaagagggaaaggcgttacaggctgctgtctgttccccttgtttccatttccagctcaaacaccacctggtcagctataccaaaagaattccgttaaatgtccatttgttagtcatctcaagggcttaatttatttccagccaatattcttgaagttaatcttggggctattaggttctcaactccttcgtgaattaggatgggcactaccaccacagaaaagcttaccagtacc

SEQ ID NO: 129680 - DNA, 534 bp, Zea Mays
ttggatattaaaccaaacagtgtcgaggaaaaaacataaagccgaagtcgcgagatagtgatacatccaccaactgatcaaatcataaattatgaccatgttaagagaagttacacagcaaaattcttgtccaccaagatcgctcatgtgtaccagctgggttgtctgacagcaaccacagccaatggtgccaaaaagtaacagttatttaactaagctttctaaccgttccatttacaaatcaagtccccaagcaggtctcatactgctcaaagaactcggtctatacgttgagaaaagaagagggaaaggcgttacaggctgctgtctgttccccttgtttccatttccagctcaaacaccacctggtcagctataccaaaagaattccgttaaatgtccatttgttagtcatctcaagggcttaatttatttccagccaatattcttgaagttaatcttggggctattaggttctcaactccttcgtgaattaggatgggcactaccaccacagaaaagcttaccagtacc

SEQ ID NO: 129681 - DNA, 460 bp, Zea Mays
aactgtcttaaatagcagtgcttagaagaagataggccacctccccctagttacacccaacatcccagtctctgttcctcttcgtccatgcaacgcatcttctgtttgcttgcggccgctcccaacatgtcgccggcctcttcggaatcggacgcttccatgcacgcctccgcatgcgcgctgccgacgtcacgctcggcccggcgaccgtcctgatttgccggttcccctggagaaggcgcaaggatttgaaaccggattacaagggtgagaggcctgaagcagcagcagcagcagtctttttctttcagcaggtgatgcactgaaaccgttaagagttcctgttgtctgtttgtttatttatttatcatgatgatgaaccgtggtgtgctgcctgctgcgctttgtttgaatagtaatgattccgacaatgatgtgtatttggttggatgtacaaaga

SEQ ID NO: 129682 - DNA, 1499 bp, Zea Mays
ttaaggaccttcatgcaaaaccccaaccatttccccttctgcactccacggagcagtgaaaccgacctttctcccctcccccgcgttccacttcgcggagatctagcccttgggtttcgccagcggcgaggcctaagtcatcggcggcgagccaaactccacgagcggaggaagaggaggggaagctgagacgaggaggcagctatggggcagcagtcgctgatctatgcgttcgtggcccgtggcacggtcgtactggccgagtacacggagttcaccggcaacttcacaaccatcgcctcccagtgcctcatgaagctccccgcaagcaacaacaagttcacctacaactgcgacggccacaccttcaactacctcgtggaagacggattcacatactgtgttgttgctgttgaatcagtggggcaacaaattcccattgctttcatggatagggttaaggaggatttcacaaaaaggtatggtggcgggaaagctgctaccgctgcggctaacagcctcaaccgagagttcagattaaaacttaaagagcacatgcagtattgtgtggatcaccctgaagaggttagcaagctggccaaagtgaaggcacaggtttctgaagtcaagggtgttatgatggaaaacattgaaaaggtccttgatcgtggagagaagatcgagctgcttgttgacaagactgagaatctgcgctcacaggcacaagatttcagacagcaaggaacaaatgtgaggagaaagatgtggttgcagaacatgaaaatcaagctcatcgtcctgggaataatcatcgcacttattctgatcattatcctctctgtctgccatggtttcaaatgccattaagcacagccagaacactggtacattcaactgcgccctattatactgctgcttggaggcacaacaaaaaaaagtactatttttctgttcttttgctagtgtgctcttggccgggtcattgtgcacaggtgttttacattgtcctagtaattgatacatgttggatggtgaatagattagttgtcagccatccaattggtacacgctatgtatgtatagcctggatatgagtaaatttactgaatttctccggaatgttgtgcctcggcgtttgctcctccggacaataatctggggcatcttgcattggccccatttaggacatgtttggtctgtcgcctaatttgacatagtttgtcatgtctaatgctccgctcgatttagggcaactaagctttaatcacttgtagtccctaaagaagtaaatatggtgactaaagtggggtgactaaactttagtcaccccacttttgaaagcgtggcaatatttctttagtcatgtcaatatttctttggtgaatagattagtttcagccatcctaattggtacacgctatgtatgtatagcctggatatgagtaaatttactgaatttctccggaatgttgtgcctcagcatctgctcctccggacaa

SEQ ID NO: 129683 - DNA, 489 bp, Zea Mays
atggcaatgggtaaatacccactgggtattactaccccatacctatacccacgatacaaaaataaccccatcgggtcacccatatacactagcggccgcctgccacccgccgccagccgcgtgccggctatctacccgccgccgctggtgcggcggcataagcagcagaacggcagcggcaccaacgtgctcaccgcggcgctcgccgccgccgccgcgtcgctcctggcgctgctcctgctatacctctgcgctgccatcgcggtgcgccggttccgctcccgcggcgcggcgctggctctggcgcaggagccggcggcgtcccgcgccgcggccttcctccgccgccacgggctccaccaccaccgcccggccttcacctacgagcagctgcgcgccgccaccgcgggcttcgacccggcgcgcaagctcggggacggcggcttcgggacggtgttcctcgcactcagattttgtacatcttggtag

SEQ ID NO: 129684 - DNA, 1356 bp, Zea Mays
cccaaccctggccaagaactcgcagccctgcctccatcccgtggtgggcgcggatggcggcggtgagcgccggcgcaagggcggcctcggcggcggcgaagaaggtcggcgcggcggaggcgtcgtccgggaggagggagaagtcctcgtacccgccggggcagcggagcggcgccgcgtggactggcacggacgccggtgcgagggccgcgaagtgtgccgtggtgacgatggcggccgtggtggtggcggcgacctcgtgctctgtaccggcggctgcggaggaggccgctttggccgcgagcggggcgaagtggctgcgctcgaggaatggcacgaagacgaggtggagaggcgagcggggcgaggtggctgcgctttgtggtttctgtagttctatatgcattaggtggcactagggtccagattcagaatatgagtactggtatgtattttccattttatattttttcagtattgccactatatctgcaacctactcaatcataaatcaagatcttgcacttggttgcttccccggtgtgaagatggtccacatcagactgcaatctaaattgtttactgtgaactagaacttctgcatacacatacgtggatttgtacatgtacaaaatctgcaatgcctcagattttatgcaccctcggcaactggcggaatccaaggtggcctggtagaaaaggggcctccaccgctcatcttgtaggctacagctacaaatcagataataaaactctattagaaaatgctagatgttgaaggtagcgagaaagagaatcttgaagaagaaataggtgttttgagaagtcagttattgcatatgagtatggaagttgatgaggtaattgatactatcattgtcaaggattttgcccctgggaatctgctatttctttttataactcatttttgtttctgacttgaacatgctaccctaacatagtcggtttgttttctcttcattcttatttggtcacatcagacaagaagtcttgataaaggagatggacccaaaaaaatttcctggtttagattcattggtgtcctagactcgaggttcgcaacccagagagcagagcaatggactgaagcaaccaattgccaaattctttgaacaaggtattagttatttgttcttttataggacctgcttgatctgcctacttcctgtaattttgtagatggtgtgcaaaaggatttattgtcctagcaagttaagctttctcataaattaaaatactacctgttcgtacagatgcactagcacattagactgcaaggacgaaaaatgctacctgtcccactgtgctatctttaagcactaagaggttgaagtc

SEQ ID NO: 129685 - DNA, 7647 bp, Zea Mays
ccggtgcccgccccttccctccagcccctcgtcggcgcccatttcgggtacggaaaccacctccccttcccctgtggcgtcgggttcccccgtccttgtctcctctggcttgcccgttcgtaccgtctggccgctccaaggctcagtgctgggctgcgacgagcccctcctcttcagcggcgagtcctggagaggtcgtttgtcgggttccgcagcggtcgttcatggaggtgttcctactcccgtctctgcgtccggttgatcggcaagagccccggcgggaaccacccctagcagaaaaaatcgaggcggttgatagagtcaggatgaagctccacctcaacaaagtgatctcgcagcaggttctgagcagtaatcagaccctaagcatgaaccgagacccctctgaactcaaccatgacaagggaggggaacgtaactatatctgcatgagcaagcctagaccacctgatgaacttgaacgaacctgaaggcgagttgagcacaacaccgttaaccatgtttgatatgcgctccgagtcaaagatcaacacgatgtcctcctggaaagaacgatgtaatgaggagttctccagcaaaccgaacccagctgctgccaccgctgcaagagcattcactgaggtcgcgaaccagtgaccacaacgaacaaagcacagtgttggagtctgaattcctctctgacaagcgcctcagaccgctcgagaacacaaccatgaggaaaatccgtagcaacctcttccaggagctgggggtggcttacacctcaaccgacttcggtgaaagaggactttggacaggtgcacccgctgccggtgcggagggaaccttaggccttatgccccgcgtgcagtggcgacgctttttggcactgccttgcgaccgcccggtggccccgacctttcgaacgtcgcgccatgagaggagacctcacgccacaccaattccggtcgaaccttgggcatacagactttggtcagcaatggtccaagacgatcccacacagacacaggaaccttatggttggagctcgctgggttaccagacaactcccggaggtatgactgtgctgcaagatatgattgatgtgctcgctaggtttgaataccgcaatcgtgataccagaggaaggttacttgataaaaatgataatgatgaaacgataacatctattctgaatgcaatcgtgatatttgtagaggcatttcgattcagatccatataccttgctgtgagacagagtattcgagatgacgagaattcatctgaggttaaggaggcgtttggcagagctctcagagctccgctcccaacgagaaccactcctgccgagccaaacgataaaaatctgaactgctttatggtgagagtggagtgaatctagtctctattttgtactagaaagtgggagccaaaaaaacctgcttcccaccacccccaactcgctccccactctttaacccctcaggaatcacttcacaacctatttgccaaaatgttttcgtcaaatagattcacttccgatagagaatcactaacaatcactctattagagaatcagctctcggagctagagaatcatggagcggagctctaccaaacgagccctgattgaagccaccaactcctgcttcatgactgaggaaagaggaactaatgactacttatcatccgagcggggtaaataaggtggtatggttgtcaactgtggcactcgtgaccttggtctggtgctgcaatatgtgacccacccgttctaagcttgctaaactttcgaatgagattcaagacaattgtgtcagtttagacttcagctctgtacatggtgacatgtactgtgttacactacaacttatttttgtttgataaggcattaaagcttgttgcttattaaagtctgttgtttagcctgctttagttttatgtgtttcatacacagtgttctgaatgcaatttctgaaagagttcggaggtgcgtgttaacacaaccagcacctcctccacacagccacatcactcacacacactgtttttatgaagtgtagagctatttgatgaagtagaacatttattttccaagctagacctagccagcaaggaataccccatagcagcgagccgcctaaaactagtcagcagctcgcatgctagacgatagaatggattgttgataaaattatgttgcatggtccttgcctacttgactgctgtaaattaattttgtttcttcaatcgtgcctaaacctgttagctaccgtttattatttaactgctacgttcatcaattttatagtctatttcaccaattatttattagtattgttgataaaattaatttttatattcagggcttgttcggtttaaaggggtttaagggggattggaggggattaaatcccctcctatttaaatttgtatagaaggggattgaattcccttcaatccctctcaatccaaccctaaccgaacaagtccttatagggataagatggataattttctaattaataaaaagataattctaacaaaacacaatatattaatgagagccatataaagtaaaattcattcttttcaatacttttgcttttcattgatataataaattatatcatttaggtttatcttagtctagtttaaaaaaatttagtccccctactctcattaatccattcttggatctgtcgctgtctttatctagagttgttgtcgtatacacatgttgttatatatcggttacacaagctaatacattcatctaaaagttcacaaacaactctcagacctatggttgttttgcaagatatgattggtgtgctcgccaggtttgaagaccgcaactaggataccagggaaaggttacttaataagaatgataatgatcgagcgataacatatcttctaaaagtaatcgtgatatttgcaaagccatttcgattcagatccatataccttgttgtgggacagagaattcgggatgacgagaattcatctgagattgattgtagccactggctcctacttcatgactgagatcactgttaacgacacttgctggcactatgacaagaaaggccgctgacagctttgagtaatgccgctccagcatatttccaagaaatcaaagtcagaatgtctggatcaaatgaactgagagtacttgacacactagacaatgtgataggatctagaagggagctgttgtttataaggtcatatagcataatgatacttagcaatgaggagttggctgagctggagagggcgaccaggcacaaaccagtaccagttccagaacttggatttaaggatgtacttttactggatgaacccgatgatcctgagtctctatgaatagttgttgatgttgttatctgatttcaagatgtacttttgccggatgaacctagtgatcttgaggctctgagaatagttgttgatgttgtcttctgtatgtgctggcttatcttaaccttttgatgtaaccatcagttgagtcttgcttaatggcaagtaatgtgtgcaaaatttgccttagcgattattgtcatgtgatcctgtttttgatggttttaacggctaaatcttaacatgaaagagttctctcatatcagttttgctgcttaacttgatttagtttgctgacttggtagccctagaaaacatattgtctgctttcattgaatatatgactgtatttgttgttttttaatgctaaatactttagtgttaggatcagtaagtacttgattttacagttttacaacaaatcgagaactgacaataagaaattgtattcagttaattgattaagttgcagtagaatgtcctaacgctagttcgatccatcatggacaggcatctatgtctccggacgcatatttatgcaattatgctattgcgagctgtcacactccttcatcaacctctggcctgcccagccactagaaacgatggtggtgtgctgcctagccgtgatcccgttaactcatgactcgcttggggaaagatccagaacgctacaaaacgtggtgttccgtggtccacgacgaggattgtcccggtgcggcgtcaagcatcacgtagtggactcggccgggtcgaaagcgaacgatcagtctttgctggctcacgaggacgggaccagatatatatatatgtgcaatatgatcatgcataaatccacgaattagtgagattgaaacaaagaaataaagattgagtaaacatgttcgacttatgaatcctcatgtgctcttggtgaacgccttttcttttaacaaagattatctaaacagtgccctttactcaaacagagagattaacgtacaacacagtagtcaaaatctgactggatgtaagcatgctcttttctgtatgtgaaatcattgtctagaagttgtgtcatgtatatggttatatgtgcaaatctaaacttcatggtctgttgagatgagctcagaccgggagggatccaatttgacaacacaatttagatgattttttcttcatgtgctttattagtgcttcgctgataggatgtcaaagcccgtcgattctatccttggtgtgccgcagaagaggaagcgtcgccccagacccccctacttgtagtgccctccctcaccgcagcaggcgtgtcgcaggggttggggtggagagtgtgtcaactcctaaatatgtcaataaaggcaaatttggaattacaaaggagcttggtctcctgaggtcagaacaggttgagttgttgtcctccaacattcttgagtattatgccaaggtcttcaacaaatggctttctgatctgcaacttaaagctttggcgactctttccgattggtccatcccagaggacctgcagagtgtggtagcatctctgtcggtttgatcttttatgtgtattttgttggttgtgtttaaattgtttcccaatggatccgtaaaaaaatctctgttggaacgtgaggggcctgaatggctcggccaggtaggacgcggttcgctgtttggtagaaaatgttaaggctgatgtcatttgcattcaagaaaccaaaatgccggatatttccaggctgtttgtgctccatctcttgggatcagattttgataattttgtcttctcaccttcggttggggcgaatggaggcattcttatggcatggaagaataatattatctctcatagctctagagtgaatgatcattgtgtttcggttaacttctgtctggaagatggatcgtcttggtggttatcttgtgtctatgccccccaaggcaaccaggaaaaaaatcactttcttcaagatctcagaactattagaactcactgctcgggtccgtggttggcggttggtgatttcaacatggtcttgagcaatgaggatagaaaaaagcccaacctggatagggccatgatgggcaggttcaggaggtggaaagatgatctggctctcctagaattacccctagtgggtcgcaaatacacttggtcgaatgggcagagtaaccccacgttggtgcggttggatatgatgttttgtagaatagtgaaaaccctaaccctagaatagggtgggcagtgtattaatagaccaaacaactgggccaggcccattacaagggacgggtatctaacacccccccccccccgcagtcacaactctatcatgtacagatgttgagactggaccgaaagtctaggaatacactagatggtagccccttggtgaagatgtcggcgaactgcagtgttgtagggacgctgaggacccgaacgtcgcctgcggcgacacgctcccggacgaaatacaggtcgatctccacatgcttcgtgcgctgatgctgcacgggattagtggagaggtagacggctgacgttgtcgcagtagactagggtggcgcgctggagggggctgtagagctcgtggaggagctagcgcatccaggaagcctcggccacgccgttggccacagcgcggtactcagcatcagcgctggagcgggagatgacgggctgccgcttggcggcccaagagacgaggttggcgcccaggaacacggcatagccggaggtggaccgacgcgtttcgaggcagccgacccagtcaacgtcggtgtagaccacaagatccgacgtcgaggatggtcggaggaggaggccgtagtcgagtaagccccggaggtagcgcagaatccgcttgagagcggtgaggtggggctcccgtggtgtgtgcatatgaaggcacacctgctgaacggcgtagacgatgtcgggccgagagaaggtgaggtgctggagtgcgcctgtcaagctccggtaagatgtcgcgtcgacgaccggggggccgtcgtcctcagagagcttcgtctgggtgtcaacaggcgtggagcagggcttgcagtcggacatgccagcccgttccagaatgtcgatggcgtacagacgctggtgcaggaagagaccctgaggccgacgttcggcagtgatgccgaggaagtgatggagaggccctatcacccgatccttgtggttaccatacaactactctagtcgccaacgtcaataggttgttgcctgtcagaacataatataaaatttttaatttaattctattattcggaaagaatcttaatgctcttttataaagttcattaattttatatttttcctattcatcttttctatgtccgtaaaattgtaaacaaattgctctatataaaattatgtatttgacgagtgattatagtgataggccccattttagaattttgaacagggtctcagtttatgccggcccaggcctgaccatgctactcgtcttggtgtaacacctccacgcgccccgacctttcctatcggttggttgtcttctaccaccactctaatcctgtgcaacctctggtgaaaacccccaaacccaaacctcagctcaccggacccagctgttgttagggaagacgaacacgatccagagcacgaatcgtgccagacacaggatgaaatcaaaggtgctagtttggttaaatgctcgggtgttggactagaattcatggatggatacaccctcctggttgtagatcctcatctgcttgcttgaaattatgtgccccgccggcccccagcaccacatgctcgtcacaagcatacagctgagcagctgcaacacaggacttcagcaagagcgcagggatgggcagcttgcacgacagtcccaagtgaatggttggcgcggccacggcctcctcccgccactacgccgtgctgctccaccgtcgcgcacgccatcgaccatacagcactcctatattttcacaaacggaaacacgccgccacgcgcttcgatctatctccgattctacatccagaagccaaatcgttcgtcgccccctcttgatttcacgtcacgctccgacactgcagccgatgactggcctccggcctctgccaccactacctgctaccacggcgcaccctccacagatggctgctgctacgtctggctgctgtattccccttccacgctcaccgtcgatcggccccatatccccgaccctgaaaacgctaaatgcactagcaccgccgatcgcgccgtcctgtctcctccgcggccgccaccttgacctcacggc

SEQ ID NO: 129686 - DNA, 90 bp, Zea Mays
ttagctaggcgccggctgtacgggggaatgagaatgggaagtgcgcggggaggagggaatcggaatggaatggcagaacacggaatgggc

SEQ ID NO: 129687 - DNA, 743 bp, Zea Mays
ttttttgccagtcactaactgcttggaatcttcaggaatcaaattacatagcctgcagcttctatccgaacaacaggtatgctctaccaattcttcttcatgttcttcaacaaattatacaattactgttttttcctttcaaatatgatcttcaatgaaaaaagtacaaatcatcactcacaccatgtatatgtccacttatgctaatacgtaaacaattccatgtgcacttcgtacacatatatgtacatagacacacacacaccgtgtttagtatcaaaaaaattcttcacctaaatttacatatgttcctccatcatgaatatttaggtacacataccatttatttttcagttaatcacaacctcctcaacctatacaacacaaccctgaattcttccttaatggtttgccagtcacttcgggagtcaaattatataggctgcaccttctatccgaaaacagctatatttgtaccaattcttcttcctattctccgacaaattatacaatttctattttcccccttttccaacatgatcatgaatcacactgttttccctcatatctatggtagtcaaataaacatgtcttctgcctgaaacacagaagcacctgatagctgcctacaattccttggacctggagcttgtctggagaacgcatgcaggtagtttgccagaaatacacaagcacctgctagctacctgaagcacaaaagcaacaacacaacctatatgtgc

SEQ ID NO: 129688 - DNA, 96 bp, Zea Mays
atggatctgaccagatcgcaaagaagaaaaacaaacaaaaagcaacaagttgtactgccatgcaagccgcctgcagcagctgtttcatcaaaagcg

SEQ ID NO: 129689 - DNA, 1628 bp, Zea Mays
gagccagtaagccacacacagacagtcagacacaggcacacagcgagggagtcctctcctcccccagaaaaggaaaagacgcattccgcacacgcgcggctgggtgtcgaggccgggagacgcggtgaagctagctgctagcgtagccgcgcgcggcgggcgggctcgagctgcgctgtcgctccatgtcggccaccgccgagagcggtggggatctgtcggcggcgcgccgccggtgggatctcaccaacaagggggccgagagcaccccaattttgaaagatgctgtggaaatatctacagatgaagaatcagatggtgttgttacatgccatccgaatggtaacactgatggatgcgaagaaactattagtggcagtcacgatgatgatagcccagaaggccaggaaactagttccattaaggaacctgatgtagaaggtgacacacaggaagacaaacgtgtaaatcaagattcactcaagttgattgatgaagagtctgctcctcccaagtccccagcaaaatccgcgactgcaagttctagatcggagaggcctaaacgtgttgttccccgaccattttctctttctaatcaaagaagtttgtttggagtaaatggtggtgtggccaatccattggccaataaggataaatctggtgataaaagtagcatctctccagcaagcatgacaaagaagagtacgcagatggcacttaggaagactttgcagcctgagaaggtatttcatcctctggaagaggactcttgttctgtgacatcctctacaacatcaacaagagctggcagaactaagatgactgttcccgtcgctccttcatttgtgtgtgctaaccgtgctgacaagaggaaggagttctacacaaaattagaggagaaacataaagctttggaagcagagaaggacgaggctgaggccaggaaaaaggatgagcaagacgttgctttaaaacaactaaggaagtcattggtgattagagcgaaacccatgccaagcttctatcaagaagggcccccaccaaaggctgaactgaagaaggtgcctcctacccgtgccaaatcgccaaagtttacaagttcaaggagaaggagctgcagtgatacaccattgacacctggcggggaaaataccaacgcaacatctacccggccacatcgtcacagcatcgggagtcctagagacgctaacagagtacaacaatgctcgccaaagagcggtgtggcaaccaaaacaagatctgtcaaggctgagctgaaggccctctgaagagcatggagcagccgagtgatgtgtttctctgtacaaaccgaattgtctaaccgtttccatttccatgcatttttgcttctattttatacccaacatctccagcaaaagaaggctgtagggccaatgacgttgttcagcgccgctggaccttatccattttcttacattcgccttgtactcgtaagaactcttggtggcaccatgtgacattccatgtaaattacttgaggatccttgtagggagttcgtccggtgttttgctcctgttaagcccttggccttaactaatctgtgagctgaaaagactatcggaatggcactgttccgtttgatgca

SEQ ID NO: 129690 - DNA, 1628 bp, Zea Mays
gagccagtaagccacacacagacagtcagacacaggcacacagcgagggagtcctctcctcccccagaaaaggaaaagacgcattccgcacacgcgcggctgggtgtcgaggccgggagacgcggtgaagctagctgctagcgtagccgcgcgcggcgggcgggctcgagctgcgctgtcgctccatgtcggccaccgccgagagcggtggggatctgtcggcggcgcgccgccggtgggatctcaccaacaagggggccgagagcaccccaattttgaaagatgctgtggaaatatctacagatgaagaatcagatggtgttgttacatgccatccgaatggtaacactgatggatgcgaagaaactattagtggcagtcacgatgatgatagcccagaaggccaggaaactagttccattaaggaacctgatgtagaaggtgacacacaggaagacaaacgtgtaaatcaagattcactcaagttgattgatgaagagtctgctcctcccaagtccccagcaaaatccgcgactgcaagttctagatcggagaggcctaaacgtgttgttccccgaccattttctctttctaatcaaagaagtttgtttggagtaaatggtggtgtggccaatccattggccaataaggataaatctggtgataaaagtagcatctctccagcaagcatgacaaagaagagtacgcagatggcacttaggaagactttgcagcctgagaaggtatttcatcctctggaagaggactcttgttctgtgacatcaactacaacatcaacaagagctggcagaactaagatgactgttcccgtcgctccttcatttgtgtgtgctaaccgtgctgacaagaggaaggagttctacacaaaattagaggagaaacataaagctttggaagcagagaaggacgaggctgaggccaggaaaaaggatgagcaagacgttgctttaaaacaactaaggaagtcattggtgattagagcgaaacccatgccaagcttctatcaagaagggcccccaccaaaggctgaactgaagaaggtgcctcctacccgtgccaaatcgccaaagtttacaagttcaaggagaaggagctgcagtgatacaccattgacacctggcggggaaaataccaacgcaacatctacccggccacatcgtcacagcatcgggagtcctagagacgctaacagagtacaacaatgctcgccaaagagcggtgtggcaaccaaaacaagatctgtcaaggctgagctgaaggccctctgaagagcatggagcagccgagtgatgtgtttctctgtacaaaccgaattgtctaaccgtttccatttccatgcatttttgcttctattttatacccaacatctccagcaaaagaaggctgtagggccaatgacgttgttcagcgccgctggaccttatccattttcttacattcgccttgtactcgtaagaactcttggtggcaccatgtgacattccatgtaaattacttgaggatccttgtagggagttcgtccggtgttttgctcctgttaagcccttggccttaactaatctgtgagctgaaaagactatcggaatggcactgttccgtttgatgca

SEQ ID NO: 129691 - DNA, 1625 bp, Zea Mays
gagccagtaagccacacacagacagtcagacacaggcacacagcgagggagtcctctcctcccccagaaaaggaaaagacgcattccgcacacgcgcggctgggtgtcgaggccgggagacgcggtgaagctagctgctagcgtagccgcgcgcggcgggcgggctcgagctgcgctgtcgctccatgtcggccaccgccgagagcggtggggatctgtcggcggcgcgccgccggtgggatctcaccaacaagggggccgagagcaccccaattttgaaagatgctgtggaaatatctacagatgaagaatcagatggtgttgttacatgccatccgaatggtaacactgatggatgcgaagaaactattagtggcagtcacgatgatgatagcccagaaggccaggaaactagttccattaaggaacctgatgtagaaggtgacacacaggaagacaaacgtgtaaatcaagattcactcaagttgattgatgaagagtctgctcctcccaagtccccagcaaaatccgcgactgcaagttctagatcggagaggcctaaacgtgttgttccccgaccattttctctttctaatcaaagaagtttgtttggagtaaatggtggtgtggccaatccattggccaataaggataaatctggtgataaaagtagcatctctccagcaagcatgacaaagaagagtacgcagatggcacttaggaagactttgcagcctgagaaggtatttcatcctctggaagaggactcttgttctgtgacatcctcaacatcaacaagagctggcagaactaagatgactgttcccgtcgctccttcatttgtgtgtgctaaccgtgctgacaagaggaaggagttctacacaaaattagaggagaaacataaagctttggaagcagagaaggacgaggctgaggccaggaaaaaggatgagcaagacgttgctttaaaacaactaaggaagtcattggtgattagagcgaaacccatgccaagcttctatcaagaagggcccccaccaaaggctgaactgaagaaggtgcctcctacccgtgccaaatcgccaaagtttacaagttcaaggagaaggagctgcagtgatacaccattgacacctggcggggaaaataccaacgcaacatctacccggccacatcgtcacagcatcgggagtcctagagacgctaacagagtacaacaatgctcgccaaagagcggtgtggcaaccaaaacaagatctgtcaaggctgagctgaaggccctctgaagagcatggagcagccgagtgatgtgtttctctgtacaaaccgaattgtctaaccgtttccatttccatgcatttttgcttctattttatacccaacatctccagcaaaagaaggctgtagggccaatgacgttgttcagcgccgctggaccttatccattttcttacattcgccttgtactcgtaagaactcttggtggcaccatgtgacattccatgtaaattacttgaggatccttgtagggagttcgtccggtgttttgctcctgttaagcccttggccttaactaatctgtgagctgaaaagactatcggaatggcactgttccgtttgatgca

SEQ ID NO: 129692 - DNA, 1146 bp, Zea Mays
gagccagtaagccacacacagacagtcagacacaggcacacagcgagggagtcctctcctcccccagaaaaggaaaagacgcattccgcacacgcgcggctgggtgtcgaggccgggagacgcggtgaagctagctgctagcgtagccgcgcgcggcgggcgggctcgagctgcgctgtcgctccatgtcggccaccgccgagagcggtggggatctgtcggcggcgcgccgccggtgggatctcaccaacaagggggccgagagcaccccaattttgaaagatgctgtggaaatatctacagatgaagaatcagatggtgttgttacatgccatccgaatggtaacactgatggatgcgaagaaactattagtggcagtcacgatgatgatagcccagaaggccaggaaactagttccattaaggaacctgatgtagaaggtgacacacaggaagacaaacgtgtaaatcaagattcactcaagttgattgatgaagagtctgctcctcccaagtccccagcaaaatccgcgactgcaagttctagatcggagaggcctaaacgtgttgttccccgaccattttctctttctaatcaaagaagtttgtttggagtaaatggtggtgtggccaatccattggccaataaggataaatctggtgataaaagtagcatctctccagcaagcatgacaaagaagagtacgcagatggcacttaggaagactttgcagcctgagaaggtatttcatcctctggaagaggactcttgttctgtgacatcctcaacatcaacaagagctggcagaactaagatgactgttcccgtcgctccttcatttgtgtgtgctaaccgtgctgacaagaggaaggagttctacacaaaattagaggagaaacataaagctttggaagcagagaaggacgaggctgaggccaggaaaaaggtaggaagaacttacttctgaattctgatatctctcttggaaagcaacccactgtaggtaaggtcacttgagttttctatattcttcttttgatcgattttgtaaattttgctttgaaaataatagcaataagggcagtattcaaattgagttgtttctgggaccactcaactactaagtgagctttatgccacccttt

SEQ ID NO: 129693 - DNA, 975 bp, Zea Mays
acagagatctcgggaggagaggacacggagcccttcgacgaggcggagctcctggcgctcccaccgtccctcgcgagcctcaccgcctcacttcaagaaatcctactcccaaccaccgctagtacctccagctctcatgtcggctccccacctccgcctacaccgccgctggcgtaggcgacatcgagcgacgaaaccttaacgtccagcccgttctttccccatgacccctccccacacccaccgacgctgccagaagtggatgcgcccgtgtcgccaccgctgcagccgagcgacaccctcgacgacgacaaggacgacgagttcgacccactgttctcggagaccaccggcggcgcgaggtcttcggctggcggctcgcgtggcgcgtgcaggggctcggcgcgaggcggctcggcttcctgctcgggcgtcgagcgcgcgcgggcggggcctggcgcgtagggcgcctggagcgtcgggtcgtcgggcggtcggcgtcgagcgcgcacggcagggcgggtcggggcttcactcgggcgcggtcctagcgcggcttgggcgagcggctcgacgggcaggggcgcagtccttggcggcttcgcgcggtgaagagagcagagagaggaaggtgggggagagggaggagcagaggagagagggaaaagagggagcaggcggcggctgggaggatggcaggggcggcggccacagggaaaatggcggctagggttaggatgttgggcctaatgggccttaggttagttagttttttttatttattttttttcttttcaaatttcgaaatacatattaaataaccctaaaattcttaatgtttaaaccaaaactatttataaaatatttatttttgggactaataattatatttataatttactaggatttccatttaacaagaaatgctgttcagtgaccaaaatcaatcatgcgcattccaaaaatgattccaaa

SEQ ID NO: 129694 - DNA, 1358 bp, Zea Mays
cgccacgatttaagcacggcttcctccgccccgacctccacacataaccagcacacagctctcgccttctctctcccatcggcacacccgagctcgctccctccttccacgtcgaggtccgagtcctgctttgatggcgaccgacgtggctgagactcccgcgccgttggtggatgcggccccagaggcgcccgccgacgccccggcggcgcctgctgccgacgcgaagccggccaaggccaagaaggccaccgcgccgaagaagcgcgccagcccgacccacccgccgtacgccgagatggtctcggaggcgatcacgtcgctcaaggagaggacggggtccagcagctatgcgattgccaagttcgtggaggacaagcacaaggacaagctcccgcccaacttccgcaagcttctgaacgttcagctcaagaagctcgtcgccggcggcaagctgaccaaggtgaagaactcgtacaagctgtcgtccgccgccaccaagccgaatcccaagcccaaggccgccccgaagaagcccaagaccggcgctaagaagcccaaggccgctgccaagaccaaagctaagacccccgccaaggcgaagcccgccacaaagcccaagcccgccgcgaagccgaaagccgtagtgaagccgaagacacccgccaagcccaaggccaagccagctgccaaggcgaagcccaagaccgccggcgctaagccgaagccacttgctaagaaagccggccgccccgccaaggcggcgaagacgtcggccaaggacacgccagggaagaaggcccctgccaagaaggccgctccctcgaagaaggcggcgaccccggtgcggaaagcgccgtcccgtaaggccaagaagtaaagcggccaagaaggggggcgcgatgctgtaaatttgatatcggagaggctcgggtacactggtcattcagtatccgagaccgatagctgaggctagtggcgatggaggactgtgttattactactataaactggtggttgtgtttctgtaactggtgaatgatcaagttggaagcttttagtctatcttagatatatcagtggatagtgttttttgtattttcgttttcttttccaatgtgtgttgggtcttgtggattatcctttttttctaatctaatacaatgaagaggcatgtcttttgaagcttccataaaaaaaagttactttttaacgattgttcagactgttttgtgcgggtgcaagatcctgtagatctgaattccaacgttgcagcctgcatttcctcgtacctctgctgtacgtcccatgttttctttcagatataatagtcttcctacatggctttatgaggtcaa

SEQ ID NO: 129695 - DNA, 205 bp, Zea Mays
gcacgagggcaggaggggtcgtcgtggcatcggtgtcggtgtagtccgagagagcgaccgatggcgtgggcaggtgcgaagcatggtcgaagaggaggttgtttcagtcgctggttgcagctgaggcaactatgtagaagcaccgtgaggtccgcgccggagatggagagcttggccaccgacgacgtggtggcgctgtcgccga

SEQ ID NO: 129696 - DNA, 234 bp, Zea Mays
atggtggagaaggtgtatatggggcggatggagctcccccaggtggcctgcttggacttgcccagctctgtccaagaacatggttgtaacaaaagtggcaagaacctgatggaatcatggaaggcccccaccaatatcctcccaagagacatttgggacttcaacaacttggatccagaaatcaaactgagcaacccagaacaagaggagtattattaccattttgactcataa

SEQ ID NO: 129697 - DNA, 1822 bp, Zea Mays
ggtggtgcttacggtgtcgcacagttcaggaaaagagcattcatctgggctgctgcaccaggagagacccttcctctggactctggagttggcctgaaccagtgcatgtctccgcaagccctcagctgaaaataaacctccttgagaccctgacggcaaaccactacgcagctgttaagagcactggcgcagggggcacctttgcggtcaataagagtgaggatctcccaccagtggaaaaatggcgccagcaagccaacaatacagtccttcctatggtgcatgccaccgtgtcatggttccagaagatcagaggcgtcaccgtgttcttgagtgagcacatatccatggagatgaacgacctggctgaatatcatcagggtgcaagcacattccaaaacgactggcaaaagccactggaggagacggtaaccacagcctgttcctttgtccaccggtcgagtggtggacctgctgcccaacaccgccaaaaggaacaatcaatggaaggggctccatgggaggctggactgggagggcagcttcccccacgtccgtgtccgatccccagcctgtgggcaagctcggcatgtgcttccaccctgagcagattctgtacctctaacggcaacggcaagctttaaacaggtaacgccaacagattctgggatggtgcatacaatacaagcttagaaacataatcaattcatatttcttcaaacagattcaaatcgtaccagtcacatatgttttactctaaaaactacactcaataccagaaccaaactaaaatctcccctaaaaaccgagcacgaaaatcactataggtacaatgcggtctagaagagagggtgcagtaagaacatcacagcaccaacgatgatgaacgccttgcaaaatccgataatggatcagagccaccaagaatcccctgcctcaagaagagagcagaacacgatcaacaaccccatggccgcccaccgtttaccatcagctagggagcgcgtagccgtatgcggtgtccgtgaacgaggcgccggcgacatcgaacgcgtcgctctcgtcgaggtacaggttgaccctgaaggcggcgtgcgcgccgatgacggccgcggcgacgacgagggagacgaggaggttgagccccgcgcgggtgagcgcgacggcgagcacggtggcggccgagagcgcggccagcacgacgcggtcgtccacctcgcggcggaggcacacgagcggctccccgccgccgcggccgaagtagaggccgagccaggcgacgaagagcgccaggaacgcgagcatggacgcggggcggtagacgaggccgaggaagacgagcgcgagcgcggccagcgcgtagttggcgcggaagtaggcgaggttgcggcgcgcccgcgcgcgggcctccccgcagctgtccgggcacgagaacgccgtcgggtccagcacctcacgccacgcgcgcggccggcccgccgcggccccggcgaacgctcgcgcgcgggagaagaaggcgaccccggcctccgccgccgttgccgccgccgaggaggaggagggcgccgcatcgccgcccgcggccgcgacgtcctccggcttgagctgcggcgcagggggggaggtggggagggcgccgtagcgcgaccacgacgcggtggaggaggacatggcgggccgctggcgaaccccagccgccgggcgctggatcgggcctcgggctgtgggattggtgcggtggcttgcgcagctgtgccgggttggccgcttgttggcctggcctggcctcttcgatcgcggggatctgaacggaggaggagag

SEQ ID NO: 129698 - DNA, 1227 bp, Zea Mays
aacgacgagcagtgcaagccaagcattctcacgctagctgttctcttcttgcctcatccatcgtgcatctatattctcggcgcgagttacgtctttttcgtcgtccggccggcgagcattttgcttctgtgatcgatcggcgcgcgcgacgtacggccatggagatgatcgacgcagagctgcgtctgggtccgcccggcagcagcaacagagacgtcatcaacgtcgtgcagccttcgttggcggcggcgaaacggccgtcgtcgtcggtggtggagagcgaggcgtccgggacggacgaccatgaccatgacgacgccgcaccgacctccaaggtgcaggtggtggggtggccgccggtgagagtgtaccggaagaacgcgttccacgcggcggcggaggcgaggaggaccaggcggggcgagcagcagggaggaggaggcctgtacgtgaaggtgagcatggacggggcgccatacctccggaaggtggacctgcggacctacggcggctaccgtgagctgagggacgcgctggacgcgctcttcggctgcttctcctcctcggccgacggcggatgccagttcgccgtcgcctacgaggacaaggacggcgacctcatgctcgccggcgacgtgccatgggagatgttcatctgttcttgcaagaagctcaggatcatgagggggtccgaagcaagataaccaagcaacgaggatgcaaggacctgttgtatgcatatgcatggaggccggccggactcatgctgtcatgcatgagagtttgagagaggagaagaagacgacctactggaactgaaggcggttgggtatacctgcatggggagggagcccacgcatgcacgcgcgcgtcgtcgtgttctacggccagctagccaccagaccggctgccggcccatatgcacaccacggagatggaggtgatggttcaaggatcacggcggcgtacgcgcgcgtcatcagtcacgccgtcctgtcatcagatgagatggaggggtgatgcatgagggcagtgctagctgtggacggctggctggacgtgcagatcggagcgagattgtactgtgcacgcacataagctttgtacagtggcatgtgctggtcatctgtaattttgatttttttccccctccttttgtaagtgagcaagtttgaggaaaaaatgtatgaatgaagaaaaggagaggggggatttcaaatttgagtt

SEQ ID NO: 129699 - DNA, 1326 bp, Zea Mays
aacgacgagcagtgcaagccaagcattctcacgctagctgttctcttcttgcctcatccatcgtgcatctatattctcggcgcgagttacgtctttttcgtcgtccggccggcgagcattttgcttctgtgatcgatcggcgcgcgcgacgtacggccatggagatgatcgacgcagagctgcgtctgggtccgcccggcagcagcaacagagacgtcatcaacgtcgtgcagccttcgttggcggcggcgaaacggccgtcgtcgtcggtggtggagagcgaggcgtccgggacggacgaccatgaccatgacgacgccgcaccgacctccaagtaagtctcggcagccgcgcacatggattttcccgttcgttagcaggcagctagcagctgagctgatgctgtgtccgtgaacgcgccgcgcgcgcgcagggtgcaggtggtggggtggccgccggtgagagtgtaccggaagaacgcgttccacgcggcggcggaggcgaggaggaccaggcggggcgagcagcagggaggaggaggcctgtacgtgaaggtgagcatggacggggcgccatacctccggaaggtggacctgcggacctacggcggctaccgtgagctgagggacgcgctggacgcgctcttcggctgcttctcctcctcggccgacggcggatgccagttcgccgtcgcctacgaggacaaggacggcgacctcatgctcgccggcgacgtgccatgggagatgttcatctgttcttgcaagaagctcaggatcatgagggggtccgaagcaagataaccaagcaacgaggatgcaaggacctgttgtatgcatatgcatggaggccggccggactcatgctgtcatgcatgagagtttgagagaggagaagaagacgacctactggaactgaaggcggttgggtatacctgcatggggagggagcccacgcatgcacgcgcgcgtcgtcgtgttctacggccagctagccaccagaccggctgccggcccatatgcacaccacggagatggaggtgatggttcaaggatcacggcggcgtacgcgcgcgtcatcagtcacgccgtcctgtcatcagatgagatggaggggtgatgcatgagggcagtgctagctgtggacggctggctggacgtgcagatcggagcgagattgtactgtgcacgcacataagctttgtacagtggcatgtgctggtcatctgtaattttgatttttttccccctccttttgtaagtgagcaagtttgaggaaaaaatgtatgaatgaagaaaaggagaggggggatttcaaatttgagtt

SEQ ID NO: 129700 - DNA, 727 bp, Zea Mays
aacgacgagcagtgcaagccaagcattctcacgctagctgttctcttcttgcctcatccatcgtgcatctatattctcggcgcgagttacgtctttttcgtcgtccggccggcgagcattttgcttctgtgatcgatcggcgcgcgcgacgtacggccatggagatgatcgacgcagagctgcgtctgggtccgcccggcagcagcaacagagacgtcatcaacgtcgtgcagccttcgttggcggcggcgaaacggccgtcgtcgtcggtggtggagagcgaggcgtccgggacggacgaccatgaccatgacgacgccgcaccgacctccaaggtgcaggtggtggggtggccgccggtgagagtgtaccggaagaacgcgttccacgcggcggcggaggcgaggaggaccaggcggggcgagcagcagggaggaggaggcctgtacgtgaaggtgagcatggacggggcgccatacctccggaaggtggacctgcggacctacggcggctaccgtgagctgagggacgcgctggacgcgctcttcggctgcttctcctcctcggccgacggcggatgccagttcgccgtcgcctacgaggacaaggacggcgacctcatgctcgccggcgacgtgccatgggagtaagtagtaccgccgggcagcagcagcatctatatctatccatggataaaggaggaacaacaacacctgacctcacttgc

SEQ ID NO: 129701 - DNA, 598 bp, Zea Mays
gacgtgggcattggcaaatggcgattgcatttttggtgctaaaccgcacgacccactcggcccattccataccccaccttgcgtacgcgagccgaacgctcgtgggtactgcagcctccgtccctacctagggttccggcgatggcgcacggcggctacccgcgccgcggcgctgccgtacgcaggcccaagtcctcggcctctgccgctgttgccgaccgcaagcggaagcggaccgccgccgccgccaagaccacctcccttaagaaccagatccgctccaccgagcgcttcctccgcaaggaccttccggatgagattagggttgctcaagagaagaaactggaagaactgaagaggcaacaagagcttcagaatcaacttgttgtccagcggacattacagtttagagatagaaagataaaattctttgagagacggaagattgagaggatgataaggcgactcgagaagcaacaacgttcaaatggtgacggtgtcaacaataatctgtcaaaattgcgagaagatcttgaatatgttagagtaagcttcctacattactgccctgcccatgatgatatgacatataagtatc

SEQ ID NO: 129702 - DNA, 114 bp, Zea Mays
gtaaacgaccaggtcgaccagaggtcgattagtcgacctagtcgacgactaatcgagattagtcgcctggtcgttcctccagttcgactagctggtggagcgaccagaaaacat

SEQ ID NO: 129703 - DNA, 1940 bp, Zea Mays
gatccccctacttcactcgccgacgagcaaacggcctccgttccgagccgtcggcggcagctggagagcgaggccgagcgaccagttacagttgccggcgggcaaagtgggccacttggtgccaggacatggccgggcaaccgccaccgcagggccccgaagacgatttcttcgaccagttcttctccatgacggccggcggctcctaccccggcgcaaccgcgggcggcggccgcgcaccgggtgaccagccgttttcccttgcgctcagcctcgacgccgcggccgctgaggcttccggaagcgggaagcacgccgacggtggcaaggcggaccgggaggctatacagctccctgggctcttcccgccggcgttcggcggcggtgtgcagccaccccacctccgcgccaccccgcctacacaggtgttccacgcgcagcagccgaagcaaggcggtgcggcagtcgggccacaaccgccggcaccgaggccaaaggtgcgggcgcggcgtgggcaggcgaccgacccccacagcatcgcggagaggctaagaagagagagaatagcagaaaggatgagggccctacaggaattggtgcccaatacaaacaagacagatagagcagctatgctagatgagatcctagattatgtgaagtttctgaggcttcaagtcaaggttctaagcatgagcaggctgggtggtgctggtgctgtggcacagctggttgctgatatcccactttcagttaagggggaagcaagtgatagtgggagcaaacagcagatttgggagaagtggtcaacggacggcacagaaagacaggtcgcaaagctgatggaagaagacattggggcagcgatgcaattcctccagtccaaagcactctgcatgatgcccatctcgctcgccatggcaatctatgacacgcaacattcgcaggacggacaaccagtaaaaccagaacccaacactccttcctagtatagtggcagcaagcgtaacttgcatcctttcggggctgttagcaggcgttaacctaccaatcaaagcgtaagatagaaatgccggcttcgattcactaacaaggaggaggcagggaaaaaagacctaaaagatcctctccacttgaagttgtaccaaatggtatatgatatcgcctttccctttccgatcttttgttcaaaggtgctttaattgcaaggatatggtaagcaataacctgctcatgctcctccatctttcaatgccccctatgagtgtgagtgatggagagagggagctgctaaaagagtctggcatgctctcataatgtttctttccgggtctgtagtgcactagctagccatacactttgtggtgggggggctgctgcttttctggtagtgggtgtatatggactaatcaaaagggactgatgtatgagtgtgtctgcggcctgcgcaaatggttgacaaagtttagatacaggatgaaatggaagatgatgttgatagcgatgttcttccttctccatttttccaaagtggaggtccgaggcaggctttggtcaatggaggctgagcatgcgtttcagcgttggtggatctgctatctgcgttgaatactttatttatactaggtggatgcccgtgcgttgcaacggaaacatatcgtcagtataggaaacacaactcctaccaatctggtatcaaaggtctcgatgatcataagctctgccgctgcctccaggcagcagccgccgccagcatcaatgtgctctgctctgtgttgtgtgctatctctctgtcttaattgtttttatacttgatgctctgctctgtgttgtgtgctatctctctgtcttaattgtttttatacttgtacttcaatacttatctgtggtataagctatctttgaagtgcatggtataagaaaaactacaaaatagatacaaa

SEQ ID NO: 129704 - DNA, 2600 bp, Zea Mays
ctgttccccccgatttttccctctcccttccgagttccaatctcatcggtcgtcgccccgctgctccagctcttcccattcgttcccactccctcgcgccgaagcaactcctgaatcctcctgcgcgccaaaaccctagccgcagatcccgcacctcgccgcccggagcccaagcggcggcgtcgacgtccgcgcacgcaccgaccattgccgctcgccgcattggggcgcttacggcgtcgcctccgctcccggggcagagatctgggtcgaggagacctggttgcgcgtgggctgcgtaggggatgtggcgggggcggtgtgccccggggatcagcgtggcggcgctggccctgctcgccgtcgcggctgctgcaggagccgccgcgggggatcccgatcccgacgacctcgagcgcgcgtttccaatagtggagccagaccacagacacactaaacttcgtctctcagagcaaggtctagaagcaattcgaaggatcgaaactcctattgctgttgttggtgtcattggtccctatcgatctggaaaatcatttctcctcaaccagcttctctccttatcttgtgataaaggttttggagttggtcatatgcgagatactaaaactaaaggtatttggatttggggtactcctgttgagatggatgttgatggttccaaagtttctgtcctttatctagacactgaagggtttgaaagtgttgggaaatcaaatgtgtatgatgataggatatttgctttggcgactgtcttaagctcggtccttatctacaaccttcctgagacggtacgtgaagctgatatatctaggctttcatttgccgttgaaattgctgaagagttctatggaagtcttcaggggcaagatgttgcttttgagccagcaaagcttctctggcttatccagagggatttcctccaaggaaaatctgttcaacaaatggtcaatgaagccctccaacgggtgcctaatgataatggtgacagatatattaatgaggtcaatcaaatacgagattctttggcagttatgggcaaccacagcactgcttttagcttgccccagccacatcttcaaagaacaaaattatgtgatatggaggacaaagagcttgaacccttatatgtaaaacggcgggagcaactaaagcagcttgtttcgtccattgtaaaaccaaaaatcgtgcagggtagaactctaaatgggaaggactttgtgtctttcttgcagcagattcttgaggctttgaataaaggcgaaattccatcaactggatctctggttgaaatttttaacaaagccattcttgatcgctgtctgaaggtgtacagggagaaaatggatagcttaaacctaccagtgccggtagacgaactgcagaaacttcatgagatgacaaatggtgaagctagaattctctttgataagcagcactttggcaaacatcatgctgctcagtcggccctcaagcttgaagatgagattaaagaggtgtacagaaacttccttctagctaatgaatatcaatcgtcaaagctatgtgaagctcgcttttctgagtgtgaagataagatggatcaccttcaagtcttgaaacttccttcaatggcaaaattcaatgcaggctttactcactgcaaccaaagtttcgtaaaggactgcgtgggacctgcaaaagaaagctacgaacgtagaatgtcaaagatgcttgccaagtctcgtgctcttttcatcaaggagtacaataacaagcttttcaattggttggcgacattctctttggtcatggtggtgatcgggcgctttgtcatcaagttcttcctacttgaaattgttgcttgggtgatgtttatcttcctagagacgtacacgagaatgttctggtcagcggaatcactgtattataatccagcttggcacatcattgtttcttcctgggagatgatcgtgtacagccctattcttgatctggacagatgggccatcccaattgtcataatgctatcattgggggttctttactggaggtgcttcggccgcagaaggaagcgggtaaagggttccctcctcccattgtacaagaattcttacaagaactcgagtcgcccgagatcagattagttatacgcaatgtttaagtttttcttttaaaggatggtacaaaacatctgcttatagaagaggctacactgcccgtgcttttggatgggcatgttttgatgctgccttgcctatggatctccaattgttttttggtggacgaagagagacagtgaagctgctagcgatggccgatggggcacctgcacaagcctccgttgtaattgtaattctacttctctgccttctgtagctaggctatccttacatgtcacggtctcaattctttgcttattgtttacatccactgcaatttttgcaaggattttgtttttatcgggtcatatacaatgtagttgttatttagagcgtgcaccgtgacattcatatgctcgaagtctggcggtggaatttggaaacgtgccttttttatactgctattatacagttaatgtactcatgctatccttttggcca

SEQ ID NO: 129705 - DNA, 2600 bp, Zea Mays
ctgttccccccgatttttccctctcccttccgagttccaatctcatcggtcgtcgccccgctgctccagctcttcccattcgttcccactccctcgcgccgaagcaactcctgaatcctcctgcgcgccaaaaccctagccgcagatcccgcacctcgccgcccggagcccaagcggcggcgtcgacgtccgcgcacgcaccgaccattgccgctcgccgcattggggcgcttacggcgtcgcctccgctcccggggcagagatctgggtcgaggagacctggttgcgcgtgggctgcgtaggggatgtggcgggggcggtgtgccccggggatcagcgtggcggcgctggccctgctcgccgtcgcggctgctgcaggagccgccgcgggggatcccgatcccgacgacctcgagcgcgcgtttccaatagtggagccagaccacagacacactaaacttcgtctctcagagcaaggtctagaagcaattcgaaggatcgaaactcctattgctgttgttggtgtcattggtccctatcgatctggaaaatcatttctcctcaaccagcttctctccttatcttgtgataaaggttttggagttggtcatatgcgagatactaaaactaaaggtatttggatttggggtactcctgttgagatggatgttgatggttccaaagtttctgtcctttatctagacactgaagggtttgaaagtgttgggaaatcaaatgtgtatgatgataggatatttgctttggcgactgtcttaagctcggtccttatctacaaccttcctgagacggtacgtgaagctgatatatctaggctttcatttgccgttgaaattgctgaagagttctatggaaggcttcaggggcaagatgttgcttttgagccagcaaagcttctctggcttatccagagggatttcctccaaggaaaatctgttcaacaaatggtcaatgaagccctccaacgggtgcctaatgataatggtgacagatatattaatgaggtcaatcaaatacgagattctttggcagttatgggcaaccacagcactgcttttagcttgccccagccacatcttcaaagaacaaaattatgtgatatggaggacaaagagcttgaacccttatatgtaaaacggcgggagcaactaaagcagcttgtttcgtccattgtaaaaccaaaaatcgtgcagggtagaactctaaatgggaaggactttgtgtctttcttgcagcagattcttgaggctttgaataaaggcgaaattccatcaactggatctctggttgaaatttttaacaaagccattcttgatcgctgtctgaaggtgtacagggagaaaatggatagcttaaacctaccagtgccggtagacgaactgcagaaacttcatgagatgacaaatggtgaagctagaattctctttgataagcagcactttggcaaacatcatgctgctcagtcggccctcaagcttgaagatgagattaaagaggtgtacagaaacttccttctagctaatgaatatcaatcgtcaaagctatgtgaagctcgcttttctgagtgtgaagataagatggatcaccttcaagtcttgaaacttccttcaatggcaaaattcaatgcaggctttactcactgcaaccaaagtttcgtaaaggactgcgtgggacctgcaaaagaaagctacgaacgtagaatgtcaaagatgcttgccaagtctcgtgctcttttcatcaaggagtacaataacaagcttttcaattggttggcgacattctctttggtcatggtggtgatcgggcgctttgtcatcaagttcttcctacttgaaattgttgcttgggtgatgtttatcttcctagagacgtacacgagaatgttctggtcagcggaatcactgtattataatccagcttggcacatcattgtttcttcctgggagatgatcgtgtacagccctattcttgatctggacagatgggccatcccaattgtcataatgctatcattgggggttctttactggaggtgcttcggccgcagaaggaagcgggtaaagggttccctcctcccattgtacaagaattcttacaagaactcgagtcgcccgagatcagattagttatacgcaatgtttaagtttttcttttaaaggatggtacaaaacatctgcttatagaagaggctacactgcccgtgcttttggatgggcatgttttgatgctgccttgcctatggatctccaattgttttttggtggacgaagagagacagtgaagctgctagcgatggccgatggggcacctgcacaagcctccgttgtaattgtaattctacttctctgccttctgtagctaggctatccttacatgtcacggtctcaattctttgcttattgtttacatccactgcaatttttgcaaggattttgtttttatcgggtcatatacaatgtagttgttatttagagcgtgcaccgtgacattcatatgctcgaagtctggcggtggaatttggaaacgtgccttttttatactgctattatacagttaatgtactcatgctatccttttggcca

SEQ ID NO: 129706 - DNA, 2510 bp, Zea Mays
ctgttccccccgatttttccctctcccttccgagttccaatctcatcggtcgtcgccccgctgctccagctcttcccattcgttcccactccctcgcgccgaagcaactcctgaatcctcctgcgcgccaaaaccctagccgcagatcccgcacctcgccgcccggagcccaagcggcggcgtcgacgtccgcgcacgcaccgaccattgccgctcgccgcattggggcgcttacggcgtcgcctccgctcccggggcagagatctgggtcgaggagacctggttgcgcgtgggctgcgtaggggatgtggcgggggcggtgtgccccggggatcagcgtggcggcgctggccctgctcgccgtcgcggctgctgcaggagccgccgcgggggatcccgatcccgacgacctcgagcgcgcgtttccaatagtggagccagaccacagacacactaaacttcgtctctcagagcaaggtctagaagcaattcgaaggatcgaaactcctattgctgttgttggtgtcattggtccctatcgatctggaaaatcatttctcctcaaccagcttctctccttatcttgtgataaaggttttggagttggtcatatgcgagatactaaaactaaaggtatttggatttggggtactcctgttgagatggatgttgatggttccaaagtttctgtcctttatctagacactgaagggtttgaaagtgttgggaaatcaaatgtgtatgatgataggatatttgctttggcgactgtcttaagctcggtccttatctacaaccttcctgagacggtacgtgaagctgatatatctaggctttcatttgccgttgaaattgctgaagagttctatggaagtcttcaggggcaagatgttgcttttgagccagcaaagcttctctggcttatccagagggatttcctccaaggaaaatctgttcaacaaatggtcaatgaagccctccaacgggtgcctaatgataatggtgacagatatattaatgaggtcaatcaaatacgagattctttggcagttatgggcaaccacagcactgcttttagcttgccccagccacatcttcaaagaacaaaattatgtgatatggaggacaaagagcttgaacccttatatgtaaaacggcgggagcaactaaagcagcttgtttcgtccattgtaaaaccaaaaatcgtgcagggtagaactctaaatgggaaggactttgtgtctttcttgcagcaggtgtacagggagaaaatggatagcttaaacctaccagtgccggtagacgaactgcagaaacttcatgagatgacaaatggtgaagctagaattctctttgataagcagcactttggcaaacatcatgctgctcagtcggccctcaagcttgaagatgagattaaagaggtgtacagaaacttccttctagctaatgaatatcaatcgtcaaagctatgtgaagctcgcttttctgagtgtgaagataagatggatcaccttcaagtcttgaaacttccttcaatggcaaaattcaatgcaggctttactcactgcaaccaaagtttcgtaaaggactgcgtgggacctgcaaaagaaagctacgaacgtagaatgtcaaagatgcttgccaagtctcgtgctcttttcatcaaggagtacaataacaagcttttcaattggttggcgacattctctttggtcatggtggtgatcgggcgctttgtcatcaagttcttcctacttgaaattgttgcttgggtgatgtttatcttcctagagacgtacacgagaatgttctggtcagcggaatcactgtattataatccagcttggcacatcattgtttcttcctgggagatgatcgtgtacagccctattcttgatctggacagatgggccatcccaattgtcataatgctatcattgggggttctttactggaggtgcttcggccgcagaaggaagcgggtaaagggttccctcctcccattgtacaagaattcttacaagaactcgagtcgcccgagatcagattagttatacgcaatgtttaagtttttcttttaaaggatggtacaaaacatctgcttatagaagaggctacactgcccgtgcttttggatgggcatgttttgatgctgccttgcctatggatctccaattgttttttggtggacgaagagagacagtgaagctgctagcgatggccgatggggcacctgcacaagcctccgttgtaattgtaattctacttctctgccttctgtagctaggctatccttacatgtcacggtctcaattctttgcttattgtttacatccactgcaatttttgcaaggattttgtttttatcgggtcatatacaatgtagttgttatttagagcgtgcaccgtgacattcatatgctcgaagtctggcggtggaatttggaaacgtgccttttttatactgctattatacagttaatgtactcatgctatccttttggcca

SEQ ID NO: 129707 - DNA, 2510 bp, Zea Mays
ctgttccccccgatttttccctctcccttccgagttccaatctcatcggtcgtcgccccgctgctccagctcttcccattcgttcccactccctcgcgccgaagcaactcctgaatcctcctgcgcgccaaaaccctagccgcagatcccgcacctcgccgcccggagcccaagcggcggcgtcgacgtccgcgcacgcaccgaccattgccgctcgccgcattggggcgcttacggcgtcgcctccgctcccggggcagagatctgggtcgaggagacctggttgcgcgtgggctgcgtaggggatgtggcgggggcggtgtgccccggggatcagcgtggcggcgctggccctgctcgccgtcgcggctgctgcaggagccgccgcgggggatcccgatcccgacgacctcgagcgcgcgtttccaatagtggagccagaccacagacacactaaacttcgtctctcagagcaaggtctagaagcaattcgaaggatcgaaactcctattgctgttgttggtgtcattggtccctatcgatctggaaaatcatttctcctcaaccagcttctctccttatcttgtgataaaggttttggagttggtcatatgcgagatactaaaactaaaggtatttggatttggggtactcctgttgagatggatgttgatggttccaaagtttctgtcctttatctagacactgaagggtttgaaagtgttgggaaatcaaatgtgtatgatgataggatatttgctttggcgactgtcttaagctcggtccttatctacaaccttcctgagacggtacgtgaagctgatatatctaggctttcatttgccgttgaaattgctgaagagttctatggaaggcttcaggggcaagatgttgcttttgagccagcaaagcttctctggcttatccagagggatttcctccaaggaaaatctgttcaacaaatggtcaatgaagccctccaacgggtgcctaatgataatggtgacagatatattaatgaggtcaatcaaatacgagattctttggcagttatgggcaaccacagcactgcttttagcttgccccagccacatcttcaaagaacaaaattatgtgatatggaggacaaagagcttgaacccttatatgtaaaacggcgggagcaactaaagcagcttgtttcgtccattgtaaaaccaaaaatcgtgcagggtagaactctaaatgggaaggactttgtgtctttcttgcagcaggtgtacagggagaaaatggatagcttaaacctaccagtgccggtagacgaactgcagaaacttcatgagatgacaaatggtgaagctagaattctctttgataagcagcactttggcaaacatcatgctgctcagtcggccctcaagcttgaagatgagattaaagaggtgtacagaaacttccttctagctaatgaatatcaatcgtcaaagctatgtgaagctcgcttttctgagtgtgaagataagatggatcaccttcaagtcttgaaacttccttcaatggcaaaattcaatgcaggctttactcactgcaaccaaagtttcgtaaaggactgcgtgggacctgcaaaagaaagctacgaacgtagaatgtcaaagatgcttgccaagtctcgtgctcttttcatcaaggagtacaataacaagcttttcaattggttggcgacattctctttggtcatggtggtgatcgggcgctttgtcatcaagttcttcctacttgaaattgttgcttgggtgatgtttatcttcctagagacgtacacgagaatgttctggtcagcggaatcactgtattataatccagcttggcacatcattgtttcttcctgggagatgatcgtgtacagccctattcttgatctggacagatgggccatcccaattgtcataatgctatcattgggggttctttactggaggtgcttcggccgcagaaggaagcgggtaaagggttccctcctcccattgtacaagaattcttacaagaactcgagtcgcccgagatcagattagttatacgcaatgtttaagtttttcttttaaaggatggtacaaaacatctgcttatagaagaggctacactgcccgtgcttttggatgggcatgttttgatgctgccttgcctatggatctccaattgttttttggtggacgaagagagacagtgaagctgctagcgatggccgatggggcacctgcacaagcctccgttgtaattgtaattctacttctctgccttctgtagctaggctatccttacatgtcacggtctcaattctttgcttattgtttacatccactgcaatttttgcaaggattttgtttttatcgggtcatatacaatgtagttgttatttagagcgtgcaccgtgacattcatatgctcgaagtctggcggtggaatttggaaacgtgccttttttatactgctattatacagttaatgtactcatgctatccttttggcca

SEQ ID NO: 129708 - DNA, 2601 bp, Zea Mays
ctgttccccccgatttttccctctcccttccgagttccaatctcatcggtcgtcgccccgctgctccagctcttcccattcgttcccactccctcgcgccgaagcaactcctgaatcctcctgcgcgccaaaaccctagccgcagatcccgcacctcgccgcccggagcccaagcggcggcgtcgacgtccgcgcacgcaccgaccattgccgctcgccgcattggggcgcttacggcgtcgcctccgctcccggggcagagatctgggtcgaggagacctggttgcgcgtgggctgcgtaggggatgtggcgggggcggtgtgccccggggatcagcgtggcggcgctggccctgctcgccgtcgcggctgctgcaggagccgccgcgggggatcccgatcccgacgacctcgagcgcgcgtttccaatagtggagccagaccacagacacactaaacttcgtctctcagagcaaggtctagaagcaattcgaaggatcgaaactcctattgctgttgttggtgtcattggtccctatcgatctggaaaatcatttctcctcaaccagcttctctccttatcttgtgataaaggttttggagttggtcatatgcgagatactaaaactaaaggtatttggatttggggtactcctgttgagatggatgttgatggttccaaagtttctgtcctttatctagacactgaagggtttgaaagtgttgggaaatcaaatgtgtatgatgataggatatttgctttggcgactgtcttaagctcggtccttatctacaaccttcctgagacggtacgtgaagctgatatatctaggctttcatttgccgttgaaattgctgaagagttctatggaagatcttcaggggcaagatgttgcttttgagccagcaaagcttctctggcttatccagagggatttcctccaaggaaaatctgttcaacaaatggtcaatgaagccctccaacgggtgcctaatgataatggtgacagatatattaatgaggtcaatcaaatacgagattctttggcagttatgggcaaccacagcactgcttttagcttgccccagccacatcttcaaagaacaaaattatgtgatatggaggacaaagagcttgaacccttatatgtaaaacggcgggagcaactaaagcagcttgtttcgtccattgtaaaaccaaaaatcgtgcagggtagaactctaaatgggaaggactttgtgtctttcttgcagcagattcttgaggctttgaataaaggcgaaattccatcaactggatctctggttgaaatttttaacaaagccattcttgatcgctgtctgaaggtgtacagggagaaaatggatagcttaaacctaccagtgccggtagacgaactgcagaaacttcatgagatgacaaatggtgaagctagaattctctttgataagcagcactttggcaaacatcatgctgctcagtcggccctcaagcttgaagatgagattaaagaggtgtacagaaacttccttctagctaatgaatatcaatcgtcaaagctatgtgaagctcgcttttctgagtgtgaagataagatggatcaccttcaagtcttgaaacttccttcaatggcaaaattcaatgcaggctttactcactgcaaccaaagtttcgtaaaggactgcgtgggacctgcaaaagaaagctacgaacgtagaatgtcaaagatgcttgccaagtctcgtgctcttttcatcaaggagtacaataacaagcttttcaattggttggcgacattctctttggtcatggtggtgatcgggcgctttgtcatcaagttcttcctacttgaaattgttgcttgggtgatgtttatcttcctagagacgtacacgagaatgttctggtcagcggaatcactgtattataatccagcttggcacatcattgtttcttcctgggagatgatcgtgtacagccctattcttgatctggacagatgggccatcccaattgtcataatgctatcattgggggttctttactggaggtgcttcggccgcagaaggaagcgggtaaagggttccctcctcccattgtacaagaattcttacaagaactcgagtcgcccgagatcagattagttatacgcaatgtttaagtttttcttttaaaggatggtacaaaacatctgcttatagaagaggctacactgcccgtgcttttggatgggcatgttttgatgctgccttgcctatggatctccaattgttttttggtggacgaagagagacagtgaagctgctagcgatggccgatggggcacctgcacaagcctccgttgtaattgtaattctacttctctgccttctgtagctaggctatccttacatgtcacggtctcaattctttgcttattgtttacatccactgcaatttttgcaaggattttgtttttatcgggtcatatacaatgtagttgttatttagagcgtgcaccgtgacattcatatgctcgaagtctggcggtggaatttggaaacgtgccttttttatactgctattatacagttaatgtactcatgctatccttttggcca

SEQ ID NO: 129709 - DNA, 1031 bp, Zea Mays
accaaatcagccttagcgtagcaaatacgcccctcttccagccttcccctccctgtacctactacccgccccgcccttccagttccagaagtttctggaagccaacccaagccatggacgccgccagcatagccgccgccgccgccgccgtggccaccccgccccctggcccggccgtgaccgtgcaggtaccgcgcgggcaggtggatctgattgacttcatcgactggactggcgtcgagtgcctaaaccaggactcctcccacagcatcgtcaacgcgctcaagcagagtttgagggacgacgaggggctgtacctcgccagtgattcggacgagcagctgctgatctacatccccttcatgcaagtggtcaaactgcattccgtgctattcaaaggccccgaggaagagggccctaaaacagtaaaactcttttccaacaaagagcatatgggtttcagcaatgtcaatgactatccaccaatggacacccttgagctatcctccgatcatttgatagagaataaacctttgccgctaaagtatgtcaagttccaaaatgttcgcagcctgactgtatttattgaggacaatcaatctggaagtgatgtctcgaaaattcaaaaggttgctctttatggcacaactgtggacacgacaaatatgaaggatctgagaaagacagaagagcactgagaccatttaaaggctgagcttaatccagtgggtgtatgacatactagaaacagttagatgttgaattgagcaatttctagttgaccctggcaaactttttccccaatttttatacacgaggagttaaaagacggtctggtgatgccgaagctattacctcttggcatcttgtaatcctgcaatttatgtcttggggatccgaattcatttcatgaatttaccaaaattagtccatgcgtcgatggtctcgcaaactttgccagcagagcttagttcgttcatggcgctgtgatatgcgtaagatttaatcaagtcgtggctgtacttgccgta

SEQ ID NO: 129710 - DNA, 2231 bp, Zea Mays
ggaaattaagtggggcggcgccctgttacgccttgaccaaacctttgccgcagaagctgggtctttataatttcggaattgcttataactgaggcattgggctccggaccgattcaatcagatctcggcccagcctggtcagccaggcccaactgccgatcgtcagttccttctccaagtagaaaccccgaaggcccgaagcgtcgctaatctcttctccggtgccgctactctctctcgaagataacgggactggggtgctgggcgggcggccatgtcgtccgcgcctctgaccgccacgccagcccctctccttcccgccaacaaacccaagagcgcagcaccgcagcacccgctcctctcccacctcccgcactgcaccagcctccgcgggctcgcccagctccacgccgccgccgttaaggccggcctcgccgcgcaccccgccttggtcaccaggctcctcacgctctgcaccggcccgggcgcgggccccgcccacctcgcctacgcccgccaggtgttcgacagggtgacccaaccgtcggacgccgtctggtacaacaccttgctccgcggctacgcgcgctcctcctcctcctcctcctcctcctcggcggcggcggtgcgggtgttcgtgcggatgctggaggagggcgtcgcgcccgacacgtacacgttcgtgtcgctgctcaaggcgtgcgccgcggcgcgcgcgggggagcacgggcggcaggcgcacgccgtggcggtcaagctcggcgccgcgggccacgactacgtccgccccacgctcatcaacatgtacgccgagtgcggggacgcgcgcgccgcgcgcgtcacgtttggcagggcggacggggactgcgtggtctcgtacaacgcgatgatcgccgcggccgtcaggagcagccggcccggggaggcgctggtgctgttccgggagatgcaggccaaggggctcaacccgacgcccgtgacggtgatcagcgtgctctcggcgtgcgcgctgctcggggcgctccaacttgggaggtggctccacgattatgttcggaagctagggctcggttccctcgtcaaggtcagcactgcactggtcgacatgtatgccaagtgtgggagcctggaggacgccattgctgtgtttcaggggatggaatcaagagacaggcaagcttggtcagtgatgatcgttgcgtacgctaaccatgggtatggcagggaggccatttcgctgtttgaggagatgaagaagcaagggatgaaacccgatgatattacattccttggtctgctctatgcctgtagccactctggtctcgtgagtgaagggcttcggtattttgacgatatgaaagatcatggcattgttccagggatcaagcactatggttgcgtgacagatttactagctcgctcagggcagctggagagagcttataagttcatcgatgaactgccaataaatcccacccccatcttatggaggacgttgctttctgcttgtggaggccatggagatgtcgaacttggcaagcgtgtctttgagaggattcttgagctggacgattctcatggtggtgattatgtaatattctcgaatttgtgtgcaaacactggatactgggaagagatgaatagggtaaggaaactgatgagcgacaaaggtgtggtaaaggtgcctggctgcagctcaatcgagatagataacacggttcatgagttcttcgcaggagatggaaggcaccccaaatcacaagaagcacggaaaatggttgatgaagtgatcgatcaactaaagcttgttggttatatccctgatacctcacatgtgtttcatgtcgaaatgggtgaggaggagaaggcgataagcctaaaataccatagtgagaagctggcaattgcttttgggcttctaaatactgctccaggggctacactgcgtgttgtcaagaatctccgcgtatgcccagattgccattcgatggcaaagtttgtctcaatggtcttcaataggcgaattatactcagagatctcaatcgcttccatcactttgaaagagggatatgctcttgtggtgactattggtaaatttgtaggaacaaaattcttgcacctcgatatcttgtattgcaatgccttccactcaggttgtggtgaatctgtatatccatggaaaacctactgacgactgatgattctttctatgaatattattggcactgaa

SEQ ID NO: 129711 - DNA, 555 bp, Zea Mays
atggaggttagcaacaagacaccctggccatcgaccggaaagaacgcatcatggccgatgcgaaccacccttctttccccgtcaccagaattagcgggattcttctttgactcattggataacgcaaacacatgtcgagatgccgtctccgtcgtcaagcaggtctccgcattcgcttggctcgtactccttaatctctgtcagatctttccccagcaaatccagccactttacattgcctttgtcggcacacctgtcatcgccgcagctggttctcttcaggcaactcttagccggcgccgtcgccttctcgtcatcctcgtgcttctcagcgtcgccgtcctttccggcttccggcacctctatcttctgaaccggaggcggctcctcctcggcgacggcggccgggcgcggcgccggcgcggaggcagcgtcgcggctggcatctttggatgggaggaggcaggggatgaagcggaaggggccggcgcagtggctctcacaatgggagagcctcatcaaagtcgggaatgggggagtacgggaagctgttga

SEQ ID NO: 129712 - DNA, 2214 bp, Zea Mays
cgcatactgtctactgctattcggttgccatttgttgtcaacatgggtcccgtgttgttgtcttcatttgtctattatctatgcatatttcaggtccagaaatacgtggaaggtctttgttgggttatgagatactactatcaaggtgtttgttcatggcagtggttttatccctatcattatgcgcctttcgcatctgatctaaaaggcttggctgaattggaaataaccttttttttgggtcaacctttcaagccatttgatcaactaatgggaaccctaccagctgcaagctccaatgcactgccaaaatactatggggatttgatgagtgatccagattcaccgttgaagtctttctacccaaaagattttgagatagacatgaatgggaaacgttttgcatggcagggtgttgcaaaattgccttttattgatgaaaggcgtctgcttgcggaaacaagaaaacttgaagatactttgacagaagaagagaaattcaggaataggactatgcttgacataatttacgttagagatactcatccattgatcactcagattatcttcctgtatcagaactattaccatctatcaagaacagacccttatgttattcccattgagcctgctgctagtggtggaatgaatggattcctatgtttatctgaaaggaactggtatagtgtcactgtcacttctccagttaaggggttcaatggcattgctcagaacagagttttgaatgctgcctatctcaatcctcagtatcacaaacacatcccagagcctccagcgggggtcatcatacctgcgaagatactgaagcctagtgatttcaaaccctttcctgtgttgtggcatcaagataatagtcgtcgacaagtaagagaaaggcctcaggtttctggagccctgtccggttctctcttaggagaagctgcacaccgactggtgaaaaactccctccagatcagatctggcaatgctgctgggttactttatatgccatacagaggtgcaccctatggccctggaaacagaccaaggcctgctgggccattggggtatgagaggggttttgtggataatccataccatgcacacatgtctagaagtgttccaaaccctcacgctcaattctttggtgattctcaagctaacagacagcccatgcggatactagaacggccagactcccgaagtcatgatgctggtatccgtgcatcaatgtctaaactgacaatccaagaagggccaaggcctcatcaaaataacaggatgcagaattccgggtactggcccaatcaaccacatcctactcactttactggacccccagcccagcggcctatgcagaacatcagttttacacctcagcgacctttccaaaccgggggatttccgcagcagagacctgtaaatggggctccaccaccattacctcccagtaactggattggtaagcaaccaagtggatgccacatgagtgtatcacctgcaaaactcgatccaaggacagctccagacagacagcccaagcaggataacccaagatctcaacaggataagaggcagcaggcgaccaaggtataccgtgtcaaaactcaagctactaatgttaatggtttgtcagagccaggtaaacaggaagaacctgaagggtaactgggttgctgcaaatccacacgccaagtttaatgtgcgtggagagaatacgctggctcttggtgatagcagcagagggtttccatgtatccctcccacaatttacctttcgatgttgaattgtttgttgtattacccggaaaggagtcggctaaattttaggtcaggggatttagacacagcttttgtttagttgataggacatggtatgggcattcactgcttgttgtaaagctgttagttggatagctgaaactgttttgtgctggctgactgctgcatattcaacatagacccgtgcggaggctggctcaactgccctgctcctgctctatctcatggaagttgggggcagatgtgcttgtggtcttcaaactgagcagtttgtgtctctgagaaaggaggaagcattccgaatttttcattgtaccgttgaaccaagttgagtctttaacactgaaaagaacatgttcctctcgagcttaacgagtgccataattaggacatggaataatatatatatttttcttttctgggatgcaaaca

SEQ ID NO: 129713 - DNA, 3754 bp, Zea Mays
agacggaagcccaacccgcccgcctgcccgcacacacgcgcgtggccatcgcccctccttccccttcccccgcacacacgcgcctcacctttcgtcccttcgcccctacagatcgaaccaaggaggcagcaaccagcgcacgccactgcggcgctaggagctcgcagaagcgccgccccacgagagggagtccagagcaaggaagagatccggtggcagagcaggtcggtcggagatgggagtaccggcgttctaccggtggctggcggaccgctacccgctgacggtgtctgacgcggaggaggaggagcccgtggagctcgagcccggcgccttcgtccccgttgacctccgccgccccaatcccaacggcctcgagtttgacaacctctacctcgacatgaatggtatcatccacccatgcttccaccccgagggccggccggcgcccaccacctacgacgaggtgttcaagtcgatttttgattacatcgaccacctcttcggcctcatccgccccaggaagcttctctacatggccattgatggtgttgctccaagggcaaaaatgaaccagcagaggtccaggcgattccgggctgctaaggacgcggctgatgcggcagcggaggaagagaggctgaggaaggagtttgaggcagagggtaggactctagcccagaaagagaagtcggaggcaattgactccaatgtcattactccagggacggagttcatgtttgtactatctacggcgcttcagtactacatacagctgaggctgaatcacacgcttggatggcagtctgtaaagataatactgtctgattccaatgtccctggagagggagagcacaaaattatgtcatacatccgcctgcagcgcaatcttcctggctttgatcccaatacacgccattgcttatatggcctggacgctgatttgattatgcttgctctagcgactcacgaggttcacttctcaattttaagagaggtgatctccatgccagggcaacatgaaaaatgttttctttgtggtcaagttgggcatttggctgctgaatgcagaggtcctagtcagcctgataattctgtggagctacctcctattcataaaaagaaataccagtttcttaacatatgggtgttgcgtgaatacctggcaaaggatttggaaattatagatgctcccttcaagataaactttgaacgtcttattgatgattttgtgtttatgtgtttctttgttggcaatgactttcttcctcatatgccaactttggaaattcgtgagggtgccattaatcttctcatgagtatctacaggtcggagttcacatcaatgggtggttacctaactgatgtgggtgaggttatattggaccgagtggaacatttcatccagtctgttgcggtcaatgaagaacagattttccagaaacgggcacgcattcaacaggcacgtgagaataatgaagagaaacataaaatgcagagagagaattctgaggaggatcaatatgtggataaggtgaagttaggagagccaggatacagggagcgttattatgctgataagtttaaagaagaggcagaatcaaaacccattgttcaagttcggagagatgttgtccagaaatacgtggaaggtctttgttgggttatgagatactactatcaaggtgtttgttcatggcagtggttttatccctatcattatgcgcctttcgcatctgatctaaaaggcttggctgaattggaaataaccttttttttgggtcaacctttcaagccatttgatcaactaatgggaaccctaccagctgcaagctccaatgcactgccaaaatactatggggatttgatgagtgatccagattcaccgttgaagtctttctacccaaaagattttgagatagacatgaatgggaaacgttttgcatggcagggtgttgcaaaattgccttttattgatgaaaggcgtctgcttgcggaaacaagaaaacttgaagatactttgacagaagaagagaaattcaggaataggactatgcttgacataatttacgttagagatactcatccattgatcactcagattatcttcctgtatcagaactattaccatctatcaagaacagacccttatgttattcccattgagcctgctgctagtggtggaatgaatggattcctatgtttatctgaaaggaactggtatagtgtcactgtcacttctccagttaaggggttcaatggcattgctcagaacagagttttgaatgctgcctatctcaatcctcagtatcacaaacacatcccagagcctccagcgggggtcatcatacctgcgaagatactgaagcctagtgatttcaaaccctttcctgtgttgtggcatcaagataatagtcgtcgacaagtaagagaaaggcctcaggtttctggagccctgtccggttctctcttaggagaagctgcacaccgactggtgaaaaactccctccagatcagatctggcaatgctgctgggttactttatatgccatacagaggtgcaccctatggccctggaaacagaccaaggcctgctgggccattggggtatgagaggggttttgtggataatccataccatgcacacatgtctagaagtgttccaaaccctcacgctcaattctttggtgattctcaagctaacagacagcccatgcggatactagaacggccagactcccgaagtcatgatgctggtatccgtgcatcaatgtctaaactgacaatccaagaagggccaaggcctcatcaaaataacaggatgcagaattccgggtactggcccaatcaaccacatcctactcactttactggacccccagcccagcggcctatgcagaacatcagttttacacctcagcgacctttccaaaccgggggatttccgcagcagagacctgtaaatggggctccaccaccattacctcccagtaactggattggtaagcaaccaagtggatgccacatgagtgtatcacctgcaaaactcgatccaaggacagctccagacagacagcccaagcaggataacccaagatctcaacaggataagaggcagcaggcgaccaaggtataccgtgtcaaaactcaagctactaatgttaatggtttgtcagagccaggtaaacaggaagaacctgaagggtaactgggttgctgcaaatccacacgccaagtttaatgtgcgtggagagaatacgctggctcttggtgatagcagcagagggtttccatgtatccctcccacaatttacctttcgatgttgaattgtttgttgtattacccggaaaggagtcggctaaattttaggtcaggggatttagacacagcttttgtttagttgataggacatggtatgggcattcactgcttgttgtaaagctgttagttggatagctgaaactgttttgtgctggctgactgctgcatattcaacatagacccgtgcggaggctggctcaactgccctgctcctgctctatctcatggaagttgggggcagatgtgcttgtggtcttcaaactgagcagtttgtgtctctgagaaaggaggaagcattccgaatttttcattgtaccgttgaaccaagttgagtctttaacactgaaaagaacatgttcctctcgagcttaacgagtgccataattaggacatggaataatatatatatttttcttttctgggatgcaaaca

SEQ ID NO: 129714 - DNA, 1785 bp, Zea Mays
agacggaagcccaacccgcccgcctgcccgcacacacgcgcgtggccatcgcccctccttccccttcccccgcacacacgcgcctcacctttcgtcccttcgcccctacagatcgaaccaaggaggcagcaaccagcgcacgccactgcggcgctaggagctcgcagaagcgccgccccacgagagggagtccagagcaaggaagagatccggtggcagagcaggtcggtcggagatgggagtaccggcgttctaccggtggctggcggaccgctacccgctgacggtgtctgacgcggaggaggaggagcccgtggagctcgagcccggcgccttcgtccccgttgacctccgccgccccaatcccaacggcctcgagtttgacaacctctacctcgacatgaatggtatcatccacccatgcttccaccccgagggccggccggcgcccaccacctacgacgaggtgttcaagtcgatttttgattacatcgaccacctcttcggcctcatccgccccaggaagcttctctacatggccattgatggtgttgctccaagggcaaaaatgaaccagcagaggtccaggcgattccgggctgctaaggacgcggctgatgcggcagcggaggaagagaggctgaggaaggagtttgaggcagagggtaggactctagcccagaaagagaagtcggaggcaattgactccaatgtcattactccagggacggagttcatgtttgtactatctacggcgcttcagtactacatacagctgaggctgaatcacacgcttggatggcagtctgtaaagataatactgtctgattccaatgtccctggagagggagagcacaaaattatgtcatacatccgcctgcagcgcaatcttcctggctttgatcccaatacacgccattgcttatatggcctggacgctgatttgattatgcttgctctagcgactcacgaggttcacttctcaattttaagagaggtgatctccatgccagggcaacatgaaaaatgttttctttgtggtcaagttgggcatttggctgctgaatgcagaggtcctagtcagcctgataattctgtggagctacctcctattcataaaaagaaataccagtttcttaacatatgggtgttgcgtgaatacctggcaaaggatttggaaattatagatgctcccttcaagataaactttgaacgtcttattgatgattttgtgtttatgtgtttctttgttggcaatgactttcttcctcatatgccaactttggaaattcgtgagggtgccattaatcttctcatgagtatctacaggtcggagttcacatcaatgggtggttacctaactgatgtgggtgaggttatattggaccgagtggaacatttcatccagtctgttgcggtcaatgaagaacagattttccagaaacgggcacgcattcaacaggcacgtgagaataatgaagagaaacataaaatgcagagagagaattctgaggaggatcaatatgtggataaggtgaagttaggagagccaggatacagggagcgttattatgctgataagtttaaagaagaggcagaatcaaaacccattgttcaagttcggagagatgttgtccagaaatacgtggaaggtctttgttgggttatgagatactactatcaaggtgtttgttcatggcagtggtaggtaaatattgaccatctactgtgagaatttgctattgcatttcctgtggaagataaaacatcacttgattgagtgtg

SEQ ID NO: 129715 - DNA, 600 bp, Zea Mays
atggaggtcacggcgacgccaagaatccaagaagccaagaccgtgcccggcactgcgaaggcaaccgtggacgacgaggtgacgctccgtcggttcgagctgaccgacgtggacgccatgatggagtgggcgtcggaccctcaggtggcggccttctgccggtgggagccgtacgcgtcggcggagccgctgctggagttcctgcgcgacgccgtgctcccgcacccgtggtaccgcgccatctgcgtctccggcgcggtggtgggcgcggtgtctctggcgcccacgccggagcgctgccgctgggagctcggctacgtgctggcccgcgcgcactgggggaaaggcgtggcgacggcggccgtgcggcgcgcgctgcgggacgcgttcgcggacctggagcccgagggcctgcggcgcgtggaggcgctggtggacgtgggcaacccggcgtcgcagcgcgtggcggagaaggccgggttccgccgcgagggcgtgctgcggcgccactactggcacaaggggcgcgccagggacatggtcatgtacagcttcctctcctccgacctcctccccgaccccgagtgagaacgatcccca

SEQ ID NO: 129716 - DNA, 144 bp, Zea Mays
gtcgacgtgggatcaagaagccccgtggcctagatcagtggcctgcattgcacttggctggtgcgctggtctaccatctccccaagtgggagagtggacgtcataatttgtggcagagggggtacgcgttcgcgcggcccctgc

SEQ ID NO: 129717 - DNA, 520 bp, Zea Mays
gaacgtgtcctttgctggttgacctgcttttgcattgcaggatagccgggcagttttgcaactaaccgtttgccttttggacagccgtgttgaaacaaggatcggcccgcatctgtacatgtcattaaccacacagctcagaaaaaaaaaacccttctcgtccccaatttggttctctttttttaggagagttagtaaacatacatattttttctttctttgtttctccctttgcatttgggaaatctttttagaatgagattttggagtgtatcagcatgaggtgtaaaatcattgtgaatcggtaaaaggctggaatgatgcttgaaccgaactgatccgtgatcatgatctccattgctgatgagggaacagtggtgatggattgatgtgacttgggaggtttgcaaaggtgtaatcatgtgtataataacccttttatttgtttttttcctctgtccctgtggtgtagtgcctgagaagcgaaatgatgcctgcgtttgctgtgctcattgctgtt

SEQ ID NO: 129718 - DNA, 2445 bp, Zea Mays
ctcgctttcgcattgcacacaccaccatacaccgcactgctgagtgcagattgctgacctctactacactctactctactctactcctcctagtccttgttctgtacaaacctgttttcggcgtctggctgtaccgctagccttaacccctagagccagacggaggaggcctgcggaagcgggagcggaagaggaggaggagagtgtgttcagaatttcagaagcaaagtgctgtcttgccatacccctacagtgctactagcctgtgctgctgcagagaagccaatcgaggcggggcactcgttcctccccgttacaaggagaggaggaagatttaggggcggaggaggtcacagactcacaggaaggaaagatggactcttgatccccgtcgcggtcgcggctggtttgttgtgggcaagccgaaccattttgctgctataatactcgagcagtcgattcgcggctcccggggccagaatcttgctctgagaggcggaatttgtgcgggatttgagctttctttcctccaacgaggtgccctgaggaagggagggagcgccagttctcccactgctgtagtgcgtggtttcagggaggtatgagacaatgagggaagagagcaacaagaagagcaagctctcctggtcgaaatccctcgtgaggaagtggttcaacatcaagactaagccacatgatttccgtgcggattgcgccgccgcccaagggagggtcgggcatgatgatggcgaatggaggaccagctgctcagagcgggaggcaggcgccgccaagaaaagcagaactgaccgaccgtcgaagcggagtagtatggatcgaatcagaggaggaaaaaacgacttcgatgcggcatgcctcacagaagttcagaactacagaatctttgcctccacatggaatgtaggtggtaaatccccaccgaggggattgaatcttgatgactggctccattcttcaccttcagctgatatctatgtgttaggatttcaagaaattgttcctttgaatgctggaaatgttcttggcacagaagataatctcccagcgaaaaaatgggtatcccttgtcaggaggacactgaataagaatcctggttcatgctgttatggtggctatcgcacgccatctcctgtccctgatccagttgtagaacaaaatgctgattttgagggatcgtcgagaaggctggacagtttatcctatttgcatcgtcggtcgttcaaccttagccggagtttaagagttgaaggggatcatatgctaccacaccaaaggttggatcgtaggttcagtgtctgtgacccagttagcttgggaggcaggccaagtgattttgataggaacttcccattcatgggatcaccggatgatcattgtatcgaggaggatacaagcaatgaagcatattttccacccttcccatatggctatggtgcctccgcgcctatggaagaaaatgatcatcagacaaatacatctaggtattgtttggttgccagcaagcaaatggtcggtatatttctcaccgtttgggtgcgcagcgaaataagaaatgatgtgagaaacctgaaagtttcttgcgtgggtagaggactaatgggttatcttggaaataagggttctatatccataagcatgtctttgcaccacacaaccttttgttttgtctgctgtcatctgacctctggtgaaaaggagggagatgaactacggagaaactctgacgttatggaaattctaagaaagactagatttccacaggtccgtggtgctgctgatgtcaagtcaccagaaacgattcttgagcatgaccgtatcatttggcttggggatttgaattatcggattgccctatcgtactgctcagctaaagctcttgtcgaaatgcataactggaagcaacttttagagaaagatcagcttcggatagaacgaagatgcgggcgtgttttccatggttggaaagaaggcaggatttattttcctccgacatataagtactcattcaactcggatcgttattctggtgtgcggcccaaagaaaagcggagaacacccgcttggtgcgatcgcattctgtggtacggtaatggcctctcgcagctgtcctacgttcgcggagagtctcgcttctctgaccacagaccagtctacagtattttcatggctgaggttgagagtgcccgccacagaagaaggaacatgggctattccagctctagaatcgaggtggaagagcttttgccgtatccatacagctccggagaaatgaagttctactggtttggctgacatagggcatatggctggagcttgttttctacttcaacttaggtagtagacgtggtcgacaattctgcttgccttttttttacatgtatgccttgtatttacacagctgcgttgatgacacaggttgccggg

SEQ ID NO: 129719 - DNA, 1065 bp, Zea Mays
gctgaacaagtcgagcccaaacactcccctcccctcctctcctcctccgcccccgccttctgctcatcctctactcctctagaagcgacgacggtgatgacggtttcgggcacaggcgcggacgcgaccttccaacctccaggcagtcgcgcgctcccgggaggcccatttccgacgacgagggcccggatccctgcgccgccacagcatccgtcggccgcggttgcggggagcctgcggttccctcctctccaggcatcccgtccttcgccgtgttctctggcgtcggtcgcggccgtggatccccactgcctccgccgccacccccgaggactcccccaagcaaccgaccttcaccaagcccttcgacaatgctcctgcgagccctgatccggagcctccgagcctcgatcccttctcctcagcgccgccgctgccccgcacgctcccgttctccggtgccgggcgcggtgcccctcggtcgcagcagcctgcgcctgataaccggttcatccggcgcagcgaggcggcgaaacaggctgctcgccgaggccgagcggccctcggctcccagcgcgcagcaaccgaagttgtcgcgacaggaagccgtgaaacgtttcacggttgaactcctgggcggcgggggccgcagcggcgaagatggcagaggtcgtggtggcgggggtcgcggctcccgtggctgtggcgcggccgcgcgggcggcggcaggtggcccgggcgcggggaccgcgggtctgttgatgtggaagacgaccgggaagcgatgtactcgggggacagcttggtgataggctataacagcgtcctcggcgaggacaaggtgaagattatggagcaccatggaggcaacagataatgcgctgccacattcaggctttgttcgtttacaccaatcccgctctggattaacatggattggaattaaatccatgcctcaatccatgccccaaaataatccatgactacttaaatttttttattcggttaaacccatcatggaatataacccaaaggtttggggattttttaaactatggaagacat

SEQ ID NO: 129720 - DNA, 1231 bp, Zea Mays
aacgccaggacccacaccaccgcaccatcagactcaggaggcgacgcgcgcttggaggtaacgcgatcacggccgctcgggtgaaggcctgaagggggcacgtcacgtcacgccgctcgcgccgcgtcgttttcgcacccggggaccaggctcgggcgctcggctccgtcctcccccacatccacctgcccgtttctcgctccgaagcttctcctctcgcgtctcgtaccaggtcaggaggggagggagggagacgggagaaccagggagcggaggcgtgcgtgctgcggcctgcggcctgcaggaccagagatcggggactgagctagggtctgggactgggaggcggagatgtcgacgccggcgaggaagcgcctgatgcgggacttcaagcggttgcagcaggacccgcccgccggcatcagcggcgcgccgcacgacaacaacatcatgctctggaacgccgtcatattcgggccggatgacacgccgtgggacggaggtgaacatcaaccataatatagtttgcggcacgttcaagctgactctgcaatttacagaagattaccccaacaaacctccgactgttcggtttgtttcgaggatgtttcacccaaacatttatgcggatggaagcatctgtttggacatcctacaaaaccagtggagtcctatatacgatgttgcggcaatattgacctctattcagtccctgctgtgtgacccaaacccaaattctcctgccaactctgaagcagccagaatgttcagcgagaacaagcgtgagtacaaccgcaaagttcgtgaggttgtggagcagagctggacagctgattaaaactttagagctggacagccgattaaaactttattggcttcaccagatggtgcagataagcatccacctttcctaggttcctaggtctgttttattgacttaaccgttaaaaatccccaggtatcgttgtgttcttgtggttcagtcccctgttgtattgctgcctgccggttttcctaatatagtggtgaacggtttcatgaacttggatattggtgtgtatgcaaaagatatagcaagtcaagttgttgctaggtttgcagaaaccgcatcctcctttctcgctgcacgaacggcctctcacgaggtgctctcctgtggaggctgttcatcctgtttctgtgcttctggtaactggtaagtcatgaatgaaagctttagcagttgtacgtg

SEQ ID NO: 129721 - DNA, 1192 bp, Zea Mays
aacgccaggacccacaccaccgcaccatcagactcaggaggcgacgcgcgcttggaggtaacgcgatcacggccgctcgggtgaaggcctgaagggggcacgtcacgtcacgccgctcgcgccgcgtcgttttcgcacccggggaccaggctcgggcgctcggctccgtcctcccccacatccacctgcccgtttctcgctccgaagcttctcctctcgcgtctcgtaccaggtcaggaggggagggagggagacgggagaaccagggagcggaggcgtgcgtgctgcggcctgcggcctgcaggaccagagatcggggactgagctagggtctgggactgggaggcggagatgtcgacgccggcgaggaagcgcctgatgcgggacttcaagcggttgcagcaggacccgcccgccggcatcagcggcgcgccgcacgacaacaacatcatgctctggaacgccgtcatattcgggccggatgacacgccgtgggacggaggcacgttcaagctgactctgcaatttacagaagattaccccaacaaacctccgactgttcggtttgtttcgaggatgtttcacccaaacatttatgcggatggaagcatctgtttggacatcctacaaaaccagtggagtcctatatacgatgttgcggcaatattgacctctattcagtccctgctgtgtgacccaaacccaaattctcctgccaactctgaagcagccagaatgttcagcgagaacaagcgtgagtacaaccgcaaagttcgtgaggttgtggagcagagctggacagctgattaaaactttagagctggacagccgattaaaactttattggcttcaccagatggtgcagataagcatccacctttcctaggttcctaggtctgttttattgacttaaccgttaaaaatccccaggtatcgttgtgttcttgtggttcagtcccctgttgtattgctgcctgccggttttcctaatatagtggtgaacggtttcatgaacttggatattggtgtgtatgcaaaagatatagcaagtcaagttgttgctaggtttgcagaaaccgcatcctcctttctcgctgcacgaacggcctctcacgaggtgctctcctgtggaggctgttcatcctgtttctgtgcttctggtaactggtaagtcatgaatgaaagctttagc

SEQ ID NO: 129722 - DNA, 882 bp, Zea Mays
ggaccaggctcgggcgctcggctccgtcctcccccacatccacctgcccgtttctcgctccgaagcttctcctctcgcgtctcgtaccaggtcaggaggggagggagggagacgggagaaccagggagcggaggcgcggagatgtcgacgccggcgaggaagcgcctgatgcgggacttcaagcggttgcagcaggacccgcccgccggcatcagcggcgcgccgcacgacaacaacatcatgctctggaacgccgtcatattcgggccggatgacacgccgtgggacggaggcacgttcaagctgactctgcaatttacagaagattaccccaacaaacctccgactgttcggtttgtttcgaggatgtttcacccaaacatttatgcggatggaagcatctgtttggacatcctacaaaaccagtggagtcctatatacgatgttgcggcaatattgacctctattcagtccctgctgtgtgacccaaacccaaattctcctgccaactctgaagcagccagaatgttcagcgagaacaagcgtgagtacaaccgcaaagttcgtgaggttgtggagcagagctggacagctgattaaaactttagagctggacagccgattaaaactttattggcttcaccagatggtgcagataagcatccacctttcctaggttcctaggtctgttttattgacttaaccgttaaaaatccccaggtatcgttgtgttcttgtggttcagtcccctgttgtattgctgcctgccggttttcctaatatagtggtgaacggtttcatgaacttggatattggtgtgtatgcaaaagatatagcaagtcaagttgttgctaggtttgcagaaaccgcatcctcctttct

SEQ ID NO: 129723 - DNA, 891 bp, Zea Mays
aacgccaggacccacaccaccgcaccatcagactcaggaggcgacgcgcgcttggaggtaacgcgatcacggccgctcgggtgaaggcctgaagggggcacgtcacgtcacgccgctcgcgccgcgtcgttttcgcacccggggaccaggctcgggcgctcggctccgtcctcccccacatccacctgcccgtttctcgctccgaagcttctcctctcgcgtctcgtaccaggtcaggaggggagggagggagacgggagaaccagggagcggaggcgtgcgtgctgcggcctgcggcctgcaggaccagagatcggggactgagctagggtctgggactgggaggcggagatgtcgacgccggcgaggaagcgcctgatgcgggacttcaagcggttgcagcaggacccgcccgccggcatcagcggcgcgccgcacgacaacaacatcatgctctggaacgccgtcatattcgggccggatgacacgccgtgggacggaggtgagacccatccgatttagtttgcctcgatctgtaattgctcaatagctggcttctgcactttgggtactgccaatttcgttagttggtgattggttgactgaaatactgaattccaccttatatgccgactgttcaataattgtgcatgatagacccccatattccttgtttgatttgcatctcaaagcatagacgcaaacaaatgtaaacagactgcgaatattgacctctacgagcttaagaacaagctgcctacatagaatccgtgcttcatttgcatgctctcctgatgttgcagttgtttcatctcttatgtaccgtttaccaaaaaagtaaagagcttgatctgtaatgccttcttttgttctctattaatactaacggtt

SEQ ID NO: 129724 - DNA, 1378 bp, Zea Mays
ggctgagtgcgcgcccatcagtcccgggttcccgccacacccctcccatccccctctcaatcctgtccccaaatctctctcttctctctagcggcgaggcgaggcggtgaagacgagcgagcggcgaggatgttgtgggtagacaagtaccggccgaaaaccctagacaaggtcaccgtccacgaccaggttgcgcggaacctcagaaagttcgtgtcggagcaggattgcccgcacctgctgttctatgggccgtcggggtccgggaagaaaaccctaatcctcgcgctcatcaagcagatgtttggcgccggcgcggagaaggttaagctggagaataagacatggaaaattgatactggaacaaggacacttgagatagaattggcgatgttgtcaagtgctcaccatgtagagatgaaccccagtgatgctggctttcaggacaggtatgttgtccaggagatcattaaagagatggccaagaacaggccaattgatgccaaaggaaggagagcatttaaagtccttgtgttaaatgaagttgacaagctctcaagagaagcccagcattccctccgtaggactatggagaagtatagctcatcatgcagactgatcctatgctgtaacagctcctcaaaagtgacagaggctgtaagatcccgttgcttaaatgtgcgagtaaacgcacccagtgaagatcagattgtccaagttctagaattcattgggaagaaagaaaacctgattcttccagctggatttgctgctcgtatcgcagcacaatcaaaccgtaatctgagacgtgctatactgttttttgagacttgcaaagttcaacaatacccatttacatcaaatcaagtggcgcctcctcttgattgggagcaatacgtgtctgaaatagccacggatatactgacagaacaaagccctaaaaggctatttgatgtacgccagaaattctatgaattactcgtcaattgtatcccacccgaaagtattttgaagaagttgctagcagagttactgaggaagttagatgctgatctgaaatatgaaatctgtcgctgggccgcacactacgagcacaagatgcgccttggatcaaaggctatttttcatctggaagctttcgtggccaagttcatgagcatttacaaggagttcctggtggctacatttggttgagcaaaacctcgagctacaattagggttgtcacgttctgtcaggggctatcgcattgtatcggtatagttttgtactaatctcgtcagcgactatccttctgtcaacccgggtgacccctctgacttcatcatagcgtctgcttgcacgttgacgttcgtgacgacattatcagacgtcattacg

SEQ ID NO: 129725 - DNA, 1178 bp, Zea Mays
ggctgagtgcgcgcccatcagtcccgggttcccgccacacccctcccatccccctctcaatcctgtccccaaatctctctcttctctctagcggcgaggcgaggcggtgaagacgagcgagcggcgaggatgttgtgggtagacaagtaccggccgaaaaccctagacaaggtcaccgtccacgaccaggttgcgcggaacctcagaaagtgtcggagcaggattgcccgcacctgctgttctatgggccgtcggggtccgggaagaaaaccctaatcctcgcgctcatcaagcagatgtttggcgccggcgcggagaaggttaagctggagaataagacatggaaaattgatactggaacaaggacacttgagatagaattggcgatgttgtcaagtgctcaccatgtagagatgaaccccagtgatgctggctttcaggacaggtatgttgtccaggagatcattaaagagatggccaagaacaggccaattgatgccaaaggaaggagagcatttaaagtccttgtgttaaatgaagttgacaagctctcaagagaagcccagcattccctccgtaggactatggagaagtatagctcatcatgcagactgatcctatgctgtaacagctcctcaaaagtgacagaggctgtaagatcccgttgcttaaatgtgcgagtaaacgcacccagtgaagatcagattgtccaagttctagaattcattgggaagaaagaaaacctgattcttccagctggatttgctgctcgtatcgcagcacaatcaaaccgtaatctgagacgtgctatactgttttttgagacttgcaaagttcaacagtaagatttgttatccagtgttcttacttactgatttgtggacctctacttttacagttatgttaacctttacctcctgctaaaattgactattgtcattttcattttttttggctcttagatacccatttacatcaaatcaagtggcgcctcctcttgattgggagcaatacgtgtctgaaatagccacggatatactgacagaacaaagccctaaaaggttttaactctgctgtatgaagtatttaagtcttataattcttgttgtatggttttattcatcatcttaaaattgaaggatgaaaatgtgtccatctgcaaacttgtactagattct

SEQ ID NO: 129726 - DNA, 375 bp, Zea Mays
ggttgcagttgcagggttcaggcgttggcggccgaaatcctccgccacggccatgccaaacattgggcctaacccaacggcagcggcgatccggcaacacccacacagcatcagctctctcgtgcgtcatgggcaagagcacacagctacacatcccgcgaaatcaacctacaggttacagcgcgcggggagtgtgaggcaaaacatagccgggagagaagttatcctccatccacccagcgcgcgggggagaagctgccagcgaaagtcgcgacgaggcttaacctaggtggctggtccatccaatctgaccccatatatccagaaggtaagtagtacgaacctagcaaatttcttcaaattctagttgaaatc

SEQ ID NO: 129727 - DNA, 905 bp, Zea Mays
atggctctctgctcagcaaccatctcccagcagagccgccgcgccatctccctggccatcaccagctgtgccctctcggcccgcagcacggaaatctccctccgcagcgctaccctgtccgcctccagcgcctcgacccttgcatacaatccccccgagttcccgtcccccacatactctgcaaccacagatgtagctggtttcgttgtgctcgcgcaggtaacgtccaccgtgtactcgaattccttctccactggggacgacggctcctcctcggcgtcctccacttcttcctcgccatcgttgccaacgaccatggttttcaccatgccattggtcgactcgcgggcgttcggcttcacctccagcgcagccatgtggatctgctccacgtcttcggcgcccacctcctcgtatgattcctcatcgtcctcgtcggtgaaggagtccgggtcgatgccgtgggactggaggcgggagtggtaggaggcggcgaggtcggagagcgacgcgagctcgtcctggacctcgcgctccctgtcttcgcggccctcggcgtagcgcttgaactggcgggcctccatctgcgcggcggccttctcccgctgcaggcgctcgatcatgagcatggcctcgctggccgccgtctccgcggaggcccgctcggcgtcgagctcctgccgcagcccccgcgcggcgtcctccgcggcctccttctccccgcgcagccgcgccgccgctgcctccagctcctccaccctacggatcagctcctccgccgccgccgcctcccttgcccccggacccgccttgggcgacagctccggcgaccgcgctggcggccgccgcttcagggatcgccgcgacggcgacgggtccgcgaccggatccatggaggcatgaag

SEQ ID NO: 129728 - DNA, 381 bp, Zea Mays
atgtcgctgcagacagtttattcttccattgaacaacccactgagtgtaatacatatgcagacattgaagcagcatataactgcctcaaggaaaaatatggtgtagcagatgaggatataatcttatatggtcaatctgttggaagtggtccgaccattgatcttgcttcccggttgccagacttgcgagctgtggttttgcatagtcctattttatctggactaagagtaatatatcctgtcaagcggacgttttggtttgacatttacaagaacatcgataaaattggcttggtaaattgtccagtacttgtcattcatggtacatcagatgatatcgttgactgctcccatggaaaacagctatgggagtgtggttaa

SEQ ID NO: 129729 - DNA, 136 bp, Zea Mays
tttttttcgcatatcccttatttttgtatttagttttctttaattttgattccctttttttcgtattaatttccttcaacatctgattttagccccacgatgatatttcgtatttagttttcttcaagcgttagtc

SEQ ID NO: 129730 - DNA, 1652 bp, Zea Mays
aaaggacaatgcggtggtgggatacttttgagcaatctgtaatggtacgagtaggacacaaaggagcaaaggtccagatctgaaggtaggtaggtactaacctcgccggagcttgatcttcttcttgtgggtgacgatggcgggaggcttcctgttggggtcggcggtctgcgtggccttggcgtcgtccggcgcgaagagcacggcgtcgatgccctgcacggagatcctgccgtcggtgtagatgtccgggtcgaagaggtaggcggagccctcgccctggccgaacttgacggagccgtcggcctcccgcgcgacgaccttgtgcggcaggcgcagggtgtcgtagcgcaccttgccgaagcggcgcacggcgttgtacatggactcctcggtctggtactcggggatcatgtggtagtagaggatgttctcgggcgacccgggctcgctgagctggtccgtggtgaggcgcgccatggcctcgtcgttgggggcgagcacggtgagcacgtagccctcggagacgaggcggcccatctcggtggcgagggaggtgaggttgacgaggatgtcggccagctcgttgtagccgccgtagaggagcagcgtctggatgaagtccttcacctggctgtgcccgtcgaagtggtgcttcccggagcccgggccgggcgccggcgcgggggcgatggagggcccgggcgccatggcgtcccagacggggagcacgggcggcgcgccggggggaaccggcggcgcgggcttcttgaggcggtgcgtcctggggtcgacctcgggcgcgcccgtgggcagcacggccgagatcgccgcgaggctgcggcgccggttgaagtcctcctgcacggagcgcgggaccaggaggcgctcgatgccgtggatgacgccgtcgggccggagcacggcgtccgggcgcgtgacggcggcgtggccgacgcgcatgccgccggcgccggccgaggcgagctcgacgtcctcgccggagagcgtggggtgcggggccgcgggccacgagccggagggcaggcgcgagggcaggacgtggtagagcagcagcgcctgcagcgacctgaggttgcgcggctccagcaggaagcgcttgaactccgggtccaggtcccgctccagcgcctcgttccgcggcgcgaagatggtgacgttgtgcttcccgacggcgtcctccagcgtctgcaggagcagcgccttctccaccagctccgcaagctcggtgtagtgcgagtcgagcagcgcgaccagcacggagttggagttgaccccgaccgccgcgccggcgccggcgccggagccggagccggagccggcggcgggcaatgtgggttcctgcggagccgtctcctcggtcaccgcccccgttccagccagcagcaggaggaacaagacgacggcgccgttcaccggcgcgcccatggctgcctgcgctgcgcgcgcggcctctgctcccggcggactgctctgccgccgccgccgccgccgctgctccgtggcgcgtgttgcgctgccctccccaggctctatagccctctcgttcccagcaaggtcgatttgttggctggggagtggggaagatagcgagagaatggaggaaggagaggatagtaggctgctatgga

SEQ ID NO: 129731 - DNA, 165 bp, Zea Mays
atgtggacggctccctctgcctctccagggcagccccagcccaccagttcagttcgttcgtctttcggtatcacagccccttctccgtctactggcagcttgcgaatcgcgaccgctgaccgaagagcccagccacttggcacgtcgcttccagcagcttgcctg

SEQ ID NO: 129732 - DNA, 2708 bp, Zea Mays
tgttcgcttctccgcccgtcgcgtccacactccccctcacgtagtgcgagactgcgagggatgatcacgcgtttccacaccatcagctcctgctgcccttttgtcttcccctctggatgctctcgtcgtcatcacttgttcttcttcgagctaccagctgcctatcatggtcatcatggtcgagctgctgcccccacttgcctctctaatcctcagtcctctgtagagctggtcctcctacccctcactttgccttgagcaatttggtttctagcatctgtggggtggcttgtgggtggtcgccttggactgctccttcctccacctgccgcgccggcagggcgacgaggtccaaaagcctggtggggctcatcatcaagaacaccgaagcggcgagagtggcatgggatctgatccgaggcggagctcgaggagctgaggggctgtacgtgctcttggatccggtagagattccgtgccctcgtgttcgtccccggccgccgcgatggggaacacgtgcgtcggccccagcatcaccatgaacggcttcttccagtccgtgtccacggcgctgtggaagacgccgcaggacagcgacgcgctgcccgccgccgccgccaatggccccggcggcgccagcccgggccggtcgcagtcggcgctgccgaagccggcgtccgacgtgcaccaccacatcgccgtgctgagcgaggcccctgagcccgtcaagatcggcgcctaccactcggagccggcgcccgccgtgcagagcgaggcccctgagcccgtcaagatcgccgcctctcactcggagccggcgcccatggccgccaagcctggcgccgccgccgccaacgccagccccagccccagccccaggccgcgtccgcaggtgaagcgcgtgtcgagcgccgggctgctggtgggctcggtgctgaggcggaagacggagaacctcaaggacaagtacagcctggggcggcggctcgggcaggggcagttcggcacgacgcacctgtgcgtggagcgcggcacggggaaggagctggcgtgcaagtccatcctgaagcgcaagctggccaccgacgacgacgtggaggacgtgcggcgggagatccagataatgcaccacctggcgggccaccccagcgtggtcgccatccgcggcgcgtacgaggacgccgtggccgtgcacctcgtcatggagctctgcggcggcggcgagctgttcgaccggatcgtgcggaggggccactacaccgagaggaaggccgccgagctcgcccgcgtcatcgtcggcgtcgtggaggcctgccactccatgggcgtcatgcaccgggacctcaagcccgagaacttcctcttcgctgaccactcggaggaggccgctctcaagaccattgacttcggactctccatcttctttcgccctggccaaatcttcaccgacgtcgtgggcagcccttactacgtggcgccggaggtactgaagaagagatacgggccagaggcggacgtctggagcgctggcgtaatcatctacatcctgctgtgcggagtgccgccattctgggcagagaacgagcagggcatattcgaggaggttctgcacgggaggctggacttcgagtcggagccgtggcccagcatctccgacggcgccaaggatctcgtgaggaggatgcttgtcagggacccgaggaagagactgaccgctcacgaagttctacggcatccgtgggttcaggtcggtggagtggctcctgacaggccgctggactcggccgttctgtctcgcatgaagcagttctcggctatgaataagctgaagaagatggctcttagggtgatcgccgagaacctgtcggaggacgagatcgccgggctgagggagatgttcaagatgatcgacgcggacaacagcgggcagatcacgttcgaggagctcaaggttgggctggagaaggtgggcgccaacctgcaggagtcggagatctacgcgctcatgcaagccgcggacgtggacaacaacggcacgatcgactacggcgagttcatcgcggccacgctgcacctgaacaaggtggagcgggaggaccacctgttcgcggcgttccagtacttcgacaaggacggcagcggctacatcaccgccgacgagctgcaggtggcgtgcgaggagttcggcctgggcgacgtccagctggaggacttgatcggggaagtggaccaggacaacgacgggcgcatagactacaacgagttcgtggcgatgatgcagaagccgacggtgggggtgctcccgaagaaggccgacctgcagaacagcttcagtatcgggttcagggaggcgctcaggatggcctagacctctctgtctctgctcccctgctgcctgcgtgtaggtgtagatgattgaattgagtgcatgtcagtgcagttgctgtagagaccaccgtagcatagagagctgatgagatgcgagttgaggcgggccaggagacgtgtacatgtgccatagtccatagccatacaggcggccctgcagcggtttggctgcttggttccaaacggttctgtttcatgtcgcgtgcactggagcacatgtgccatatctgcctgctgctgctactgctatatgccgtgcacgtgcacgtcggtgacctgaaacctggctgtccgccggccaccgagctctaacggaattc

SEQ ID NO: 129733 - DNA, 834 bp, Zea Mays
gcgatgagctccggcgggacgccgcccgtggggctaacaccggcggacggcggcatgttcagcaccgaccgcatcggcggcttcggctacggcgtcggcgtgtccgtcggcatcctcctgctcgtcaccaccatcacgctcgcctcctacttctgcacccgagcgcccgccgacgccgcgggggaggccgctccgtcgtccgggcgccacggcggcgaaggggcgcacgacgatgtcgagctcggcatcgacgaggccacgctcaaagggtacccggaggtggtgtacggcgaggccaggaagctggccaaggccaccaagaagggcacctccacgtgcacgtgctgctccatctgcctcgacaactacggcaaaggcgacgtgctccggatgctgcccgactgcggccacctgttccaccgggagtgcgtcgacccctggctccgccaccacccgacgtgccccgtgtgccggacgtcgccggtgccgagccccatgccaacgccactcgccgaggtcacgccgctggcaatgtccaggatgtcgatgtcgtcatgacaacaggcacagaccggctgcttcttctattttccccctttattgccccgtactgctataccactactaatgtaatgtggtggaattggtagattggggctcatggcatttaaaaaaaaatggaatgagcgaaaatgttcaggatactaggaattagaataatattttcttgggtgcaattgtaaatttgggttcagcatcgttttcttttctccttcatgaaaaaggatccgatcgaattaggggctgacaaatattggacgaatctttcaaacc

SEQ ID NO: 129734 - DNA, 76 bp, Zea Mays
ttcttcttcttcctcttctcttttttcttcctctctctctttttttttcctgcccgtacgttgaccttccagtttc

SEQ ID NO: 129735 - DNA, 1580 bp, Zea Mays
ataaactagcccccgctctctctcctcacaaacttcccctgtcacgagagtacgagaccacgccttccgtgggatcaatcggctagggtttcggagatgttcggccgcgcgccgaagaagagcgacaacacccggtactacgagatcctgggggtttccaaggacgcgtcacaggatgacctcaagaaggcctaccgcaaggccgccatcaagaaccaccccgacaagggcggcgaccccgagaagttcaaggagctagctcaggcttatgaggtcctcagcgaccctgaaaagagagagatctatgaccagtatggcgaggatgccctcaaggagggaatgggaggcggtggtgggatgcatgatccctttgacatattccagtcattctttggtggtggaagcccttttggaggtggcagcagtaggggcagaaggcaacgacggggagatgatgtggttcatcctctgaaggtttctctggaggatttgtacaatggcacatcaaagaagctctctctgtcccgcaatgtcctctgctccaagtgcaatggtaagggttccaagtctggagcttcgtcgaggtgtgctggttgtcaaggttctggcttcaaggtccaaatccggcagttgggacctggaatgattcagcaaatgcaacatccttgcaatgagtgcaagggttccggagagaccatcagcgataaggatagatgcccacaatgcaaaggtgataaagttgtgccggagaagaaagttcttgaagtggtagttgagaaaggtatgcagaatgggcagaagatcacattccctggcgaagctgatgaagcgcctgatactgccactggagatatcatctttgttctccagcagaaggagcatcccaagttcaagagaaagggcgatgacctcttctacgagcacacactgatcttgactgaatctctgtgtggcttccagtttgttctgactcacttggataacaggcagctgctgatcaaatcgaaccccggcgaagttgtgaagcctgattctttcaaggcaatcaacgatgaaggcatgcccatgtatcagaggcccttcatgaagggcaagctgtacatccacttctcggtggagttcccggactcgttgagcccggagcagtgcaagaccctggaggctgttctcccgctcaagccagtatcacagtacactgatatggagctggacgagtgcgaggagacaatgccatacgacgtgaacatcgaagaggagatgcggaggcggcagcagcagcaccaggaggcctacgatgaggatgatgatgtgccaggcggtgggcagagggtgcagtgcgcccagcagtaggcagcttgcggcaattttacctgcttgtattggcctgatgatacttcggttacaagagtgcagtattcgatctgttagttcaagttctgcgtttggggtgttagatccaccagaattagatttgttcggcaagctacgctcgaatacacgtcatgtttggagtatctttatgggtgctctaaagacgcgtatctcatagaagatatactctaaagttgtatcttatagaa

SEQ ID NO: 129736 - DNA, 1550 bp, Zea Mays
caccctcctgcagcttccagagcattcactctccaccacccgtcccgacgatataaactagcccccgctctctctcctcacaaacttcccctgtcacgagagtacgagaccacgccttccgtgggatcaatcggctagggtttcggagatgttcggccgcgcgccgaagaagagcgacaacacccggtactacgagatcctgggggtttccaaggacgcgtcacaggatgacctcaagaaggcctaccgcaaggccgccatcaagaaccaccccgacaagggcggcgaccccgagaagttcaaggagctagctcaggcttatgaggtcctcagcgaccctgaaaagagagagatctatgaccagtatggcgaggatgccctcaaggagggaatgggaggcggtggtgggatgcatgatccctttgacatattccagtcattctttggtggtggaagcccttttggaggtattaggggcagaaggcaacgacggggagatgatgtggttcatcctctgaaggtttctctggaggatttgtacaatggcacatcaaagaagctctctctgtcccgcaatgtcctctgctccaagtgcaatggtaagggttccaagtctggagcttcgtcgaggtgtgctggttgtcaaggttctggcttcaaggtccaaatccggcagttgggacctggaatgattcagcaaatgcaacatccttgcaatgagtgcaagggttccggagagaccatcagcgataaggatagatgcccacaatgcaaaggtgataaagttgtgccggagaagaaagttcttgaagtggtagttgagaaaggtatgcagaatgggcagaagatcacattccctggcgaagctgatgaagcgcctgatactgccactggagatatcatctttgttctccagcagaaggagcatcccaagttcaagagaaagggcgatgacctcttctacgagcacacactgatcttgactgaatctctgtgtggcttccagtttgttctgactcacttggataacaggcagctgctgatcaaatcgaaccccggcgaagttgtgaagcctgattctttcaaggcaatcaacgatgaaggcatgcccatgtatcagaggcccttcatgaagggcaagctgtacatccacttctcggtggagttcccggactcgttgagcccggagcagtgcaagaccctggaggctgttctcccgctcaagccagtatcacagtacactgatatggagctggacgagtgcgaggagacaatgccatacgacgtgaacatcgaagaggagatgcggaggcggcagcagcagcaccaggaggcctacgatgaggatgatgatgtgccaggcggtgggcagagggtgcagtgcgcccagcagtaggcagcttgcggcaattttacctgcttgtattggcctgatgatacttcggttacaagagtgcagtattcgatctgttagttcaagttctgcgtttggggtgttagatccaccagaattagatttgttcggcaagctacgctcgaatacgtttgct

SEQ ID NO: 129737 - DNA, 604 bp, Zea Mays
caccctcctgcagcttccagagcattcactctccaccacccgtcccgacgatataaactagcccccgctctctctcctcacaaacttcccctgtcacgagagtacgagaccacgccttccgtgggatcaatcggctagggtttcggagatgttcggccgcgcgccgaagaagagcgacaacacccggtactacgagatcctgggggtttccaaggacgcgtcacaggatgacctcaagaaggcctaccgcaaggccgccatcaagaaccaccccgacaagggcggcgaccccgagaaggtgagcgcgcgagctggtcatttcgtctggctccgacctgtccgcggcggggagtagtaggcgggttgtcaggtttgcggcgatgttgagacggtttggctgggtcgatttcatatggtgctggtgcttgtgggttcggagcggtggtttggatctgaggcggcgtggatttagatgagtttaatgtgttggggtagtggagggaattcgtatgggcaaggagatgttgcatggaaactgttatgaatattggttgcgtggaaagtgttaggattgttgtctgctatggagacgcatctagagctg

SEQ ID NO: 129738 - DNA, 1666 bp, Zea Mays
cggcgtgctcaaacgttctcctcgtcacgcgcagaccagcccgccacggcgccacggcgtcacatcagacatcacatggtgatggaatgatggatgcctcccccaaatcagacgcccggccgattagtccaaactccgcgtatgtcgtcttccccttcgcttcgcatgactgaccctcccactatttcatttcatctcccgaaccaagaaaccggccaccagagcgaaccccaagaaacgaccttgattagccaaagacagagcagcggcgcaagcgatccaggcgatgcagccagccgccatgaacagcttgttctcgagctcatggaagcgcggcgtcggagacggcggggatatcgagtccggcggcgtggagatgtctgcgctgctgccgggtgccgcggcgggggcgagcctcgacaggctcttcgaggacgtggagtccatcaaggacgagctccgcgacctggagcgcatccagcggtcgctccacgacgccaacgagggaggcaagtcgctgcacgccgcggcggccgtgcgcaacctccgcacgcgcatggacgcggacgtcgccgcggcgatcgagaaggccaaggtggtgaagcaccggctcgagtcgctgcaggtggctaggaaacaccacacgagcacccgcaagtggatctgcatcgccatcctcatcctcctcctcgtcatcctcgtcatcgtcctgcccatccttgttctcgagctcgtggaagcgcggcgtcggagacggcggggagcaggggacatcgagtccggcggcgtggagatgtctgcgccgccgggtgcccgagcggggccgagcctcgacaggttcggacgtggatgtcacgaggactggcccaggtacgctgacagtggagtccatcaaggaagagctccgcgacctggagcgcatccagcggtcgctccacgacgccaacgtgggcggcaagtcgctgcacgacgcggcggccgtgcgcgggctccgcgcgcggatggacgcggacgtgggcacgacgatcaagaaggccaaggtggtgaagctccggctcgagtcgctggaccgcgccaacgctgccaaccggtccgtgcccgggtgcggtcatgggtcgtccacggaccgcacccggacgtccgtcgtggccgggctgcgcaagaagctccgggactcgatggagtccttctcgtcgctacggtcccggtcgtgtacgagtaccgggacacgctggcgcggcgctacttcacggtgacggggtcgcagcacgacgagacgatggctggacgcgctggcggggtccggggagggggagcggttcctgcggcgcgccatcgcggcggagcaggggcgcggggaggtcttgggcgtgtggtcgcggagatccaggagcggcacggcgccgtggcggagctggagcgcggcctgctggagctgcagcaggtgttcaacgacatggccgtgctggtggccgcgcagggggagcagctggacgacatcgagggcaacgtcggtcccgcccgctccttcgtcgaccgcggacgcgagcagctgcaggtggcccggaagcaccagaagagcacccgcaagtggacctgcatcgtcatcctcttcgccatcgtcctgcccatcgtgctcaagaacgtcaacagtaacaagaactag

SEQ ID NO: 129739 - DNA, 2820 bp, Zea Mays
ccccaagcccccaacccgatctctctcatcagctcgctctttcctgtcccctctccgccacctcaccgccggctcgctcaaaaatcctcgcgccggacgccggccctgcctccgcctccgcctccgctgcgccatgcccgtcggcgcctgattcatgtctcagtcctacgccgccgccgcctcgaagcgccccttctcgtcccccaccacatctccgtccccgacgtcatcccctgcgacgccgcttatgaagaaggccaagcatcccgccgccgcctcctcctcttccgtggggaccgtagagaagaacggcatccagcttgataccgttgccgccgccatgggtgggggccgaacgaatggcgaggaggatgcggacatggtgctcgtcaaccaggacaagctccccgcgcccagcgtgccggcctctgctggcgttgccgccaacctctttcgaaagaaggccacgctcccgcagccgtcgacctccgcccgcaagccgctccgcatcaaaataggtcaaccaaaactgccaaaaaacttcgaagaggatacatggtcgattttgaaggatgctatcacagctatttttctcaagcagaaactttcttgtgatgttgagaaactctatcaggctgctggtgatctttgtttacacaagctaggggcaaacctatacgaccgaatcaagaaagaatgtggaatacatatagctgaaaaaatatcagcattagtgggtcaaagcccagatctggttgtattcttgtctctggtccaaagaacatggcaagatttttgtgatcagatgttgattattcgtggtattgctttacttcttgatgtaaaatatgtcaagaatgtggcaaatatctgttcagtgtgggatatggggctgcaactgttccgcaagcatctatcactatccacggagattgaacacaaaactgtaactggccttctcagattgatcgagagtgagaggcttggtgaagcaatagataggacattacttagtcatcttctgaagatgcttactgctcttggaatgtattctgagagttttgaaaaaccctttcttgaatgtacttctgaattttatgctacggaaggtgttagatatatgcaacaatctgatattccagattacctgaagcatgtggagtcgaggttgcaagaagaacacgaaaggtgtattctatatttggaagctaacacgaggaagccactgattgcaactactgaaaagcaattgctagaacgtcatacatctgccattattgagaaggggttcactatgctcatggatgccaatcgtataaatgacctctcgaggatgtacaaccttttccagagggtgaatgctgttgagctgctaaaactagcgcttagttcatatatccgggctacaggccagggcattattatggatgaagaaaaggacagagaattggttccatttcttcttgattttaaggcatccctcgacaaaatattggaagaaagttttgccaagaacgaggctttctccaataccataaaagattcatttgagcaccttatcaatctacgacagaaccgacctgcggaattgattgcaaagtttcttgatgagaaacttcgagctggcaataaagggacatcggaagaagagctggagggtatacttgataaagttctggtcctgtttcggtttatacaaggtaaagatgtatttgaggcattctacaagaaggatctagctaagaggttgctgcttgggaagagtgcatcaatagatgctgaaaaatcgatgatcacaaaactcaaaactgagtgtggaagtcagtttaccaacaagctggagggaatgttcaaggacattgaattatccaaagaaataaatgattcattcagacaatcatctcaagctaggacaaagcttccctctggcattgaaatgagtgtccatgtgcttacaacaggctattggcctacatatccgccaatggacgtgaaactcccacacgaactgaatgtgtatcaggatatatttaaagagttctatttaagcaagtacagtggaaggcgtttaatgtggcagaattctttgggacactgtgtcttgaaagcagactttcccaaaggcaaaaaggaacttgcagtatcattgttccagagcgtggttttgatgttgttcaatgacgcacaaaagttaagcttcattgacatcaaagattccactggtatcgaggataaagaattgagacgaacattgcaatctcttgcatgtggtaaagttcgggttctccaaaagataccaaaagggagagatgtagaagataaggatgaatttgtattcaatgaagattttagtgctcctctctaccgcataaaggtaaatgcaattcaaatgaaagagacggtagaagaaaacacgagcaccactgagagagtgttccaggatcggcagtatcaggttgacgcggccatagttcgaataatgaagacgcggaaggtcctcagccacacccttctaataactgagctttaccagcagctcaagttccctgttaagccagctgatatcaagaaaagaatagagagcttgatcgaccgggagtacctggagcgcgacaggagtaacccccagatctacaactatctggcttgacaacgttttggtggatcgttcccatttcattactatcagaaaaaggcactgtaaattaatttattttccggtttcttgttctttcatgcttttcttctctgggaggaagttgtagttgtagctgctgcaacgtgtttatatagaacaattttttcggcatcagtataaaa

SEQ ID NO: 129740 - DNA, 392 bp, Zea Mays
gaaaactgaaacacatccagttgctgggaccggttcgggcatatatggattcacccttcggagctgctaccgtttgttgcggtgatgaccatcagattgccgcacacaaggctgctatggtggccatcgtcaaccatccaccaccaccaggcaccagccctgctgccgtcgatcaagcaatcccgtgctttgttttttttccttctctcttccattcctttcctaggcgctgttgtacaaattttgtgagagatgagagtttaaacaggctgttgtaagagtgtgctcggtagccgcggttctagtgctccccgcgcctcactgctggtctagactattctggagtttgtatgaacaggtccatcggacaacagttgtgctcatagtttctc

SEQ ID NO: 129741 - DNA, 1561 bp, Zea Mays
cgcgcccagtgtggcagcgcgcgcgggagccgggaaaatgttgcacgggggtaggagcacgggcgggcgattaggcaggcgtggcagggcagcgtagggataagaccgtgcgaagagctcgagcagcagcacagcagccggggccccgacggacggacgcggccggcgcgctcgaccgccaagcacgccggggagcaccagccgttgcctcattccagcagctacaccgccaggcgccaaagcccacgcgcctgcctggagctccatcttccacttccaccccataaaagcgctgcattcctcctcacggctatctcccgccgcgccagcagccagcgtatgagcagcgcctgcggctgcgggcggcgccactagggggatggaggcagcagccgtgggcgccggcgcgcccggccgctcccagcagcagggctccaagcgcggccgcggcggcgccgtgaggggcagcgaggcggaggcggcgtggggccagccgccgccgccgccgccgccgctgggcccgggggcggggtcccggatctaccgcgtgcgggctagcgggggcaaggaccggcacagcaaggtgtacacggccaagggcatccgcgaccgccgcgtgcgcctgtcggtgccaaccgccatccagttctacgacctgcaggaccgcctcggcttcgaccagcccagcaaggccatcgaatggctcatcaacgccgccgccgccgccatcgacaagctcccggagctcgacccggccgccttcgccgccctccccgcgccgggcgacgcggatgccgccggcaaggacaagcagcagcaggggagcaagtccgcgggcagcagcacgtcggagacgagcaagggatccgagctctcgctctcgcgctccgacagccgcgggggcgcctccgcccgggacagggaggtcaccgtggccagcacctcggcgcaggccgcgtccttcaccgagctgctcaccggggtggcgtcggccggcgccattagcgccgccgagcacaggcagtcctggcatcaccagcccaacgtctccgcggccgccgccggctgcgtcggcattgcgcacaacgggaaaggtgcgcacgggctgtcgacgcacgccttttctggccctgccgccgccaagttcggcagcgcgcctccgttcggcctggttccggcgcagcccttcaacttcaccagccccatcgagatgcctcacttctcgctcggccaggacactctggcggcgtcctcggctgccgccggggactacagcctcggtttctccatgtcctcaggtttcttgggtgccagtagggggacccttcagtccaattcgcagtcgaacttctcgggccatcatcaccaccagctccagaggctggatggcccgctcttgtttggtcacgttcacggtgcggcggtggcgcatcccgcatccgagaaccagctcacatcatccgcggcgttacagctgtgggacggtctccggcactccggcatgaaggagaagagcaaaaactgattgctcattcttcaacggtaagatgctaaccgctgt

SEQ ID NO: 129742 - DNA, 112 bp, Zea Mays
acaaaagaaagcgaaatctcaacttcatgcagatcatttcacccaaaggaaattagttgtcaacgaaatcaaaatggtcaacaaaggaagaatggaaacacagttggaggaa

SEQ ID NO: 129743 - DNA, 318 bp, Zea Mays
atggaaattgaatatcaaatccagctcacatacactgccaaaatatcggtccagtatctcgacgaaatgatggatgatctcaaggacttcaagctcattgtcatcagcatcaatgcgcatgcagaaatacaggctagcatacctccggtatacaaccttgtaacccctccactcgacaaagttgcagagtttgggccctcgtgtaagaacgagtccactgagctcgcgaatgaccttggtcctctccttctgggtgtacggagaataccacttggtgagcctcaccttgccctggcggctgatcaggcacgaaattaa

SEQ ID NO: 129744 - DNA, 2250 bp, Zea Mays
agagctgcctcataaaagctccctgcgtttgctcctgtttgcagcttgcacggaggcggggtagtagaggacggcctcgcaaggtagctctgctcgagcgaggcagcagcactactcccgttcaggagaggaggcgttctccaccgggtcataggaatcctgacgagatggacggcaatgctaggtcgacggcggcgagtcagaagaagtccatcgtcccggacgacgacctcgtggagctgctctggcacaacggaagcgtcgtggcgcagccccaggggcaccacaggccggcgccgccctccgaccgcgactgcccgggcaccagcggccttactgccgaggagaccgccgcgtggttcccggacaccctcgacgactcgctggagaaggacctgtacacgcagctctggtacagcacgatcgccgacgccgccccgcaacacgagggcatgttcccgggccctacctcgcagccttcgccgccgccgcccgttgcgagcagcggcgtcgagtcgagctgggccggcgacatctgctcgaccttctgcggcagcaaccaggtgcccaggacgccggcagggatcagggggaaggacgcggcattgcagccggaggtgccgagcggtgccggcgcgcacgacggcacatcgtcatccggtgggtccggaagcaactatgggggatccgggctgcccagtgacagcgtccatgtccacaagaggaaggggatgtgtagagacgagtcagatagtcggagtgagagaagaagggaccggatcaaagaaaagatgcgtgcgttgcaagagctgatcccacactgcaacaagactgacaaagcatctatactagacgagacgattgagtacctgaagtccctccaaatgcaagttcagatcatgtggatgacttctgggatggtgccaatggtgtttcctggtgctcaccaatacatgccaccaatggctctaggcatgaattcaggttgcatccctgcagcacaaggcctaagtcagatgcgaagattaccatacatgaaccaccccatgccaaatcatatccctctgaactcgtctccagctatgaatccaatgaatccactgaacactgtgaaccagttccaaaacggtcacctcagggaggcaagtaaccacttccttcacctagatgatggtcgagcagcggtacctcgggtaccaagacctggaccccatgtttatggacaccaaatagcacaagccgaagaacacaacagaatactggaagtggcagctagtactgttataccaacttctaaggcagggcaaccacctacttttgatggagtttagagtggtcataaatcctgtaaggtgttgcactgataatctgacgatgcatagcgttggtaccttgagttgtatatctgtgcagtagtgtcagcagcatactctttgacatctaagcttggttctagagttattaataggagcctagtataggtaacaagattgcaagacaactacctgtctaccaccatattctctgtggaagaactggagctgcatactgctgtgcagtacagtgttcaagagagaatggaacagatgagtatttgaagcacaacctgaacaggaaatggtcttctttctggcaatcgctgaaaatactgacgtgatgaggagcagattgcatccctatggctgtattgtaatatatctacatcaacatggcaatacgtgtctggacttggatgctacagttacatgtaaatgcagagttgcaggtttggtcggcaggagcatacatcttcacacgacgtggacagtggactacgggccgagacagtggcccagacacgacacggctcttatatcaggctaggccagacactatttaatgtgtcatgcctcaggccggtccacgagacacggctgaccatctataccacatactctactcctccacggcaacagttcagcatcctcctggcaatggcaacggttcagcatcctccatggcaactgtgcggagccctagactagacctgctgcaagatggcagaccctcatcttcagagcggattgggtttggatcccctgtactcctccttgctcccctgttgctttcagttcgtctcacggttattgttcagacttcagatacatatgtcgttgtgcctggttggctgtatctggacatcagtttccgtgttgctactattttcccccctgtatttctttataacggacattcaccttataaatatac

SEQ ID NO: 129745 - DNA, 597 bp, Zea Mays
ttttcttgcattgccgttgttgtttgttatcacagcagccagtagcagctcaattagcaccaccgaccccggcggcaatcctggccggcatggcttccacgtcgaacttcctggccgtggcgctggtcatggccgccgtgctcctcggcggcgccggcacgtgccacgcggcccgccgcctcgacgaactgccgccgctgcctcaagtcccagcaggtattccgagtctgccggcgccccaagtgcccgagctgccagtgccgccggtgcccgagctgccgatgcctcaagtgccgccggtgcctcaactgccgggcgtgccgctgccgcccgccacggtgccgtagcccgtatgtgccccttgcgttgatgctgtaccgttccccgtgccgtcctctcttgtaccaccaccgccgtcgcgtcttcaccgaccaccgacgagcctagagacgtgcaaatgctgcctggtacacaggtgctgccgccgacgccctgtcgtgtacctgtgtttatgtacgagttttttgttgttgtaccattgtattttctcctgcgatgaaattaattaaatatgctcattactacagcttacacaaa

SEQ ID NO: 129746 - DNA, 1572 bp, Zea Mays
tattcgagtgacaggaatatcaataaacttagagcatcatataattatcctcaaattacaatataaacccagtctcagaacatactagaattaatcaaaaaggacggtttacatcgcctacgtctacagcaaagcacgtctacaaagggagacaatcatcccaacgcgtcacagccatggtgcaggagaagctcgccatcctcggtcacaagatgcgcctacttagatctctgcctcattttccggcgcttcctcttgagcctccgcatcctcttcttcttccactgcaatcaaatgaaacaagaatcagttcacccactttcatagcaaatgcttagattctacagacagtatcatgtgaaactacagtagcagacattaaacggacaacagtcagattacgcaactgtcagggatcagaattatggagtgttttacacatcaatgattgatcagaaacacggaccaatgattcttccatcacatcccagcatcaaatacggaagagcgcaacaagtaataatcatcaagcgaaccaagtctacgcctctcgaccaaagaaacaaaaaacatgcaagtactattcagctagaaattgcaaagtaaatcagggcatgatctgaatatggcttgtacagcttaatgaggatgtcaccagcaaataaaatatgtggatgtatacttagaaacaggtgtaacatgtagtgaactggcattcagaatgagtaggaggtatttctcatcaattagatcagactaatctaggttttcctcattatgccagtactgcagaaacgaccaccgacaaataaactaaaactagtatcaaaacaacaggagaagcaggaaaaaaccagcagtttgtttgtgttctctcagacaaatgcctcgattgtccccatggtttaatggaatggattaaatcggactcgtcatctgtgtttggtcgtcatagagaacagcttagtgtcaccaagactttcggaaacgaatgactgaatctggcttgtacagcttaatgatgatgtcacaagcaaataaaacacgtggatctatacttagaatcagatgtaacatgcagtgaactgacattcagaatgagtaggaggtatttctcatcaattagatcagactaatctaggttttcctcattatgccagtactgcagaaatgaccgccgacaaataaactaaaacttgtatcaaaacagcgggggaagcagaaaaaaacaagcagtttgttagtgttctctcagacaaatgcctcgattgtccccatggtttaatggaatggattaaatcggactcgtcatctgtgtgtggtcatcacagagaacagcttagtgtcaccaagactatcgcgggcacgaatgccacagcccacggcgaaaacctagaaaatgcctagctccgcaaagctacctaggacacggtttcatcgcatcaccatggaaagaagaacgcagcggaggcgagggaagacgaaccttggcccgcatcgcgtcggcgcaggtggagcgcgcgctcgagctacctgcccccctgattgcggcggctgagtactagtgagttg

SEQ ID NO: 129747 - DNA, 91 bp, Zea Mays
gagctgagcagccctcaaggctacatccctccatcatgctcgactctttttagggtttcattcttgcttaatatagtatttgttggcattt

SEQ ID NO: 129748 - DNA, 92 bp, Zea Mays
cttttatgttatctgatgaagcaacatgtatactgtcctgtagggatatgcctatttctcaagcatgagaaacacacggaagaccaaaagaa

SEQ ID NO: 129749 - DNA, 1250 bp, Zea Mays
gccttgtctaccgttcaagcccaaacgaaaaaaaaaacaaaaaaaaactcaaaccatagcttcgtaaaccctcgccgccgccgccgccgccgccgccgatgacatcggaggagcacccctcgtctgcgtcctcggacggcagcaccaccatcggctccgacgaacatcttgacccctcgccatcaccttcgacgtccttcgactctcctcctgaatccgacgactccgccgcctcctcgctgctctcagacggctcttcagagtccgagcccatcattttcaagaaaccccgcccacccgtgcgctcgtggccggcctccgacgagatcgcgatcctcgagaccgtcgcgtcgcaccggcagaagcacgggcgacttcccctggcagacgacctcgccgccgcggtgcggggccgcctcagcgtgggggaccgcctcagcgccgcgcagatcaccaggcggctgtgcgcgctccgcaaccggtacgacaacaccgttatccgcctcaaacgcggcacgatcccggcgaaggacagcgacgtcaccatctacaggctctccaagctcatctgggagggcacgcgcagggggaggatagagaagaagacccgtgtgcccgacgcgcgcaatgacccaagagggttcgacgatctggccgagctgtacccttgcctctccgcggaggtggaggcgattggtgcgaggtgcggctacggggcgctgaagagggcattcgggcgcatcggtgacgacacggcggcgcggctggaggcgaagctgaagaggcagcggatggcggagaccagggcgagcggaaagcttgaccggctgaggtcgagagtcgccaatgcgcttcagggatttaacaagtgaaatgaagtggcggactttgttgaaggagctgaacgtggacgtctggaggattattagacaatagacacgccaagtgaaagtggctttaagattttgtcaaggagaggaagctacataacatggaggacttgctttgatgttctgcttaggttctatttgggactgatctaactttaaaaaattaatttggtggagctggcatagcaggttattaggtttattaggtgatccagaaaatcctagacctgcagaacctttagaaaatatcttgataagtcattttatttatattttagattaaaaatatatttaaatttatattataaactacaaccccaagctaaagttggaacatggagcaatcataaacaccccttt

SEQ ID NO: 129750 - DNA, 1036 bp, Zea Mays
gccttgtctaccgttcaagcccaaacgaaaaaaaaaacaaaaaaaaactcaaaccatagcttcgtaaaccctcgccgccgccgccgccgccgccgccgatgacatcggaggagcacccctcgtctgcgtcctcggacggcagcaccaccatcggctccgacgaacatcttgacccctcgccatcaccttcgacgtccttcgactctcctcctgaatccgacgactccgccgcctcctcgctgctctcagacggctcttcagagtccgagcccatcattttcaagaaaccccgcccacccgtgcgctcgtggccggcctccgacgagatcgcgatcctcgagaccgtcgcgtcgcaccggcagaagcacgggcgacttcccctggcagacgacctcgccgccgcggtgcggggccgcctcagcgtgggggaccgcctcagcgccgcgcagatcaccaggcggctgtgcgcgctccgcaaccggtacgacaacaccgttatccgcctcaaacgcggcacgatcccggcgaaggacagcgacgtcaccatctacaggctctccaagctcatctgggagggcacgcgcagggggaggatagagaagaagacccgtgtgcccgacgcgcgcaatgacccaagagggttcgacgatctggccgagctgtacccttgcctctccgcggaggtggaggcgattggtgcgaggtgcggctacggggcgctgaagagggcattcgggcgcatcggtgacgacacggcggcgcggctggaggcgaagctgaagaggcagcggatggcggagaccagggcgagcggaaagcttgaccggctgaggtcgagagtcgccaatgcgcttcagggatttaacaagtgaaatggtgatttcttcatcttctttctgttgctacatgggttggcgtagaaagacacagtaagattggttccttcgcatggtttcatggttgaaatgttatcagattctctgtggcaagtttgagggcactatcaactgcaaagaatctgaaatgtcatgctgtc

SEQ ID NO: 129751 - DNA, 1780 bp, Zea Mays
tttcaaatccgtcctagtactcccgcaaagcccgcacagcaccagccacccgtccttttccctttctttccccccgcctgcgtccgacgcccgagtcccgaccggccggccccgtcgaggcagcagcacacagccagcgggcagccatgagggagatcctccacatccagggtgggcagtgcgggaaccagatcggggccaagttctgggaggtgatctgcgacgagcacgggatcgacgccacgggccgctacgcgggggactcagacctccagctcgagcgcgtcaacgtctactacaacgaggccagcggcggccgcttcgtcccgcgcgccgtcctcatggacctcgagcccgggaccatggactccgtgcgctccggccccttcggccagatcttccgccccgacaacttcgtcttcggccagtccggcgccggcaacaactgggccaagggacactacaccgaaggcgccgagctcatcgactccgtcctcgacgtcgtccgcaaggaggccgagaactgcgactgcctccagggttttcaagtttgccattccttgggaggaggcactggatctggcatgggcacccttcttatttccaagatcagggaggagtacccagacagaatgatgttgacgttctctgtattcccatcaccaaaggtctcagatactgttgtggagccttacaatgctacactttctgttcaccaactcgttgagaatgctgatgaatgtatggtgcttgacaacgaggctctgtatgacatatgcttccgcacactaaagctctccaccccgagctttggtgacctgaaccatcttatctctgctaccatgagtggcgtgacatgctgtctgaggttcccgggtcagctcaactctgatctgcgcaagcttgccgtgaacctcatcccattccctcgtctgcacttcttcatggtcggctttgctccgctgacctctcgtgggtcgcagcagtaccgtgccctcacggtccctgagctgacccagcagatgtgggatgccaagaacatgatgtgcgcggccgacccccgccacggccgctacctgacggcctcggccatgttccgcgggaagatgagcaccaaggaggtggacgagcagatgctcaacgtccagaacaagaactcgtcctacttcgtggagtggatccccaacaacgtcaagtcgagcgtgtgcgacatcccgcccaggggcctgaagatggcggggaccttcgtggggaactccacctccatccaggagatgttccgcagggtgagcgagcagttcaccgccatgttcaggcgcaaggccttcctgcactggtacaccggcgaggggatggatgagatggagttcactgaggccgagagcaacatgaacgatctggtcgccgagtaccagcagtaccaggacgccaccgccgacgaggagtacgaggacgaagaggaagaggagaacgtggcagaatagccatgacctccggtgccctttttcagggccaccgcatccgacaggttgtgtctctgtgaatgagtttgtttgtttcttttctctgcttctcgtggcttgcgtcatggattggtaattggttaagcttccgctggggttgcgcctgtgcttcgactgcgggcactgtaatgtaactactgtaatgggtcaaagtaggcttcacactggtggtgctggtctcctgtaattcctgacgagtatttgtagggagtgattttatcttcttcttttgtgtgaaagcctgtgtcagtctgcat

SEQ ID NO: 129752 - DNA, 120 bp, Zea Mays
ttcccgaaggtagcgagttcaagtctgagtccccctggtgcaccggacatgtccggtggcacaccggacagtccggtgcgccacaccaggggtgccttcggttgcccctttgctcctttg

SEQ ID NO: 129753 - DNA, 423 bp, Zea Mays
atctggatctctggtagtcgtcagccatcacagcaaggactcattatatataaacaggagggcccagaattaactacagcgcgtctagcaaagcgagtgtcgatcgagcacgggtcagagaggaggatggggaagagcgcgtcggtgcagcgagggcacgtcccggtgctcgtcggcgaggcagggaaggaggaggaggagctgaggagggttctagttcacaggaaggttcttcagcacccctacttcgctgggctgctggagctcgcggcggcggagtttgggcatgaccagaagggcgtgctccggatcccctgcgacgtcagacgcttccatggagttgttcagctcatcagaagaagcagaacacggaggaggaagaaggtgacggttccatgcctcgttttccttaagctgttgtaa

SEQ ID NO: 129754 - DNA, 1441 bp, Zea Mays
caccccagagaaactcccctttccctatcgcacgagacgaaaccgccgccacgcccatggctgactccggctccatcgtcgtcacggaggcgcggaagcagcacccgctgagccagatcgcggcgagcgggacgcaccggctgctgctcaagcagtgggtcaaggaggaggacctgctggcgcgccgcgtcgcgctgcgggaggcccgcctcgacggcgcgcgcaaggagatcgccttcctctactgcgccttcttcgcgttccacgccgcctccgtcctgctcctcttcctctcctcctccaccgccggccccgcctcagcgtgcaggcggtcctggatcccctgcctcgtctcgctgctctcctcgctcgccatgctctgggcgctgcggtacaagtccgacacggaggccgtcctggagcgcctgctggcgcgggagcgcgaggacgcgctgctcctcgccagggccaagagcctccgcgtcgaggccaagggcgccgacaggcccaggaggtggcaggccagggacctcgccgtcttcgcgctcttcgccgtcgcctgcggggtgctcgtgctcaccaggttcctgctctgcaattagccaacatcgcattgcattgcaggtggaggtgttcattgccttgccttcttggcatctccttgataatcgtcatgacgaagagcactgttcgttttgggcagaactgtttgttctgccaattttggtgttgggtcttgtcgtttgtatacaacaataaatctgattcttggtagacctagggattccccagtttattttgcggatggattcagtggaacaattaaacaagctcaatgtaatctctaaaaacactttacaaaatatgtgatatccatacacacaccaccactcaccagctagtcaggacagtgacacaagacatctggttttgcttgccgtgattgcaaatcatatcacaacatacacacaccatcaccccctcccctcgtaagtcgtaacaatgaacaatttttagacacaaacatatattcactctcagcttacacccctcgacacggcctggacgaaaataaagaagaaagaataaatccaacgtcaccaaaacataggcagtagtaggtagaaacgaatggatcccaatcagacggcttcgggccctggtttcttggcgtgaatcggctcagtcggcggcgatgggactccgacgacaccgggcggcggcagcggcgtgccgtagacctgcgcgccgacgccggttcgcatctcctcccggcccctgtgcttgccgaggaagaagcagccgaagccgagaaggatggagaggaaaatgaagtgcaaagagaccaccagcacgaaccccattgtcctcctctcttctcgcaggggaggatgctttgaagcttcgctttgcttcgcttcgctttgggagggaaatgagg

SEQ ID NO: 129755 - DNA, 1510 bp, Zea Mays
cgaccgttgcactcgcaccccagagaaactcccctttccctatcgcacgagacgaaaccgccgccacgcccatggctgactccggctccatcgtcgtcacggaggcgcggaagcagcacccgctgagccagatcgcggcgagcgggacgcaccggctgctgctcaagcagtgggtcaaggaggaggacctgctggcgcgccgcgtcgcgctgcgggaggcccgcctcgacggcgcgcgcaaggagatcgccttcctctactgcgccttcttcgcgttccacgccgcctccgtcctgctcctcttcctctcctcctccaccgccggccccgcctcagcgtgcaggcggtcctggatcccctgcctcgtctcgctgctctcctcgctcgccatgctctgggcgctgcggtacaagtccgacacggaggccgtcctggagcgcctgctggcgcgggagcgcgaggacgcgctgctcctcgccaggtgcgtctccgagctcaagcgcaagggcctccacttcgacctgctcaaggaggtggacgcgctgcgcagggccaagagcctccgcgtcgaggccaagggcgccgacaggcccaggaggtggcaggccagggacctcgccgtcttcgcgctcttcgccgtcgcctgcggggtgctcgtgctcaccaggttcctgctctgcaattagccaacatcgcattgcattgcaggtggaggtgttcattgccttgccttcttggcatctccttgataatcgtcatgacgaagagcactgttcgttttgggcagaactgtttgttctgccaattttggtgttgggtcttgtcgtttgtatacaacaataaatctgattcttggtagacctagggattccccagtttattttgcggatggattcagtggaacaattaaacaagctcaatgtaatctctaaaaacactttacaaaatatgtgatatccatacacacaccaccactcaccagctagtcaggacagtgacacaagacatctggttttgcttgccgtgattgcaaatcatatcacaacatacacacaccatcaccccctcccctcgtaagtcgtaacaatgaacaatttttagacacaaacatatattcactctcagcttacacccctcgacacggcctggacgaaaataaagaagaaagaataaatccaacgtcaccaaaacataggcagtagtaggtagaaacgaatggatcccaatcagacggcttcgggccctggtttcttggcgtgaatcggctcagtcggcggcgatgggactccgacgacaccgggcggcggcagcggcgtgccgtagacctgcgcgccgacgccggttcgcatctcctcccggcccctgtgcttgccgaggaagaagcagccgaagccgagaaggatggagaggaaaatgaagtgcaaagagaccaccagcacgaaccccattgtcctcctctcttctcgcaggggaggatgctttgaagcttcgctttgcttcgcttcgcttt

SEQ ID NO: 129756 - DNA, 1997 bp, Zea Mays
cctaggcaaacgctcaatggattgctgctcttttgccagatcagcactcgttgatctttatgccagatgggccctacgaccctataacaaagtctagaaaaagaatagaaaaaggccgggccggccgtgccacggaagtgacggaactccaagcccaaaaccccgcatcgcctagaaacccacgtcgacggcgacgacttcttcgagccattcctcgctatccctgcctcctcccgtcaggcgcaggatccaccgctccatggaccccgcaccggagccgattgctggaggcggtggcctccagcgccgccccgcggccgccgcaaggagcggagtgggcgcacaggagccgcctccgcgcgggcagcttgccatccacgctgacgtcgaaccgccgccgcggccgtggcccgggatgcagaagctggccatcgtcgccatcgtcgtgctcggatgcctccagtttctcccggccacgcacttccgggaccccaacgacccccagcgcaactggatccccttcgacggctcgcggaatccaacgggttctttaaatgatgttggaagtgtagatgtcttctcttggataagctgtttggatcttcgcactctcgctgtgctgacaaattccaccctgtccagctcaagtgatccacataatatatctttccattacttaatacctgaaggaggcaacgataaattgtcctacctcaagctaaaagtcttgctacctgattcagatctcactgttactagtcagaagcaaatcaaggacaagctaaacgttgccactccagaaggaaattttctttggttattccacactgaattgtcaccctttcttatcgcaaaatctcagttgtcgaaaaagagatttgtttatatcgctgcagattccatcataaagggcaaagtcgaagatcttggtcgcatggaactaggcggttacgccattggcgctgttgaagattgcagcaagcgtctcagcgattatatcagtatggatgttcttagtgccatacaaagagcgggagctgcattcagttgggtgcctaaagaaccttataacgaggatgcatgcctacttgattttgacgtgctattgatggagcctcgcaagctggagaaaaccctgattacttccatcatgtggtgggctgatgccattcgtttagccaatcaaagggacctgattagactggccgtaactctgtccttcaatggcaagtacacgaggctaccttcaaactggaagcgcgcagatgatgacaacgctgatatcctcaacttcgatggacccaagaacgtctgttctgaagatgggcgccagcatgagcaaccaggctacggcgcaacctggcagcaataccttcatcagaaatctgaagccatactgagcacctaaataacggcacttcgccggacacaaattttccactgtcaccgagtggaagctgactgttggtattgacctgtaaaccctccatagaatgcattttgtactccagtactctattccagcacagaggaagcatgctctcgcttccgtatgtataattcaggatacaagagattttttttttggcggctgacgccggaaagttttcctggttccagttcagtttactcttttttttccatcgtagaacctcactaaaagcctaaaaggtggatcaattaccacgcccatatgagcaaatattgtattaaactgtatgataattgtgcagaaccatgccatcttaccgaccgcccactgcatccttggctccttgctatgcctggatccagcagtacccattcctggttggaattgacgagtgcgctagaattctattttgcttcaataagtcatgtggctcgatgcatcatatggcttggtgcaagaaaatcatttgttgttcttaaatgattttggatatcattggacactacaggagggtcaaccctgagcggaatttcaatctcctcaggttccagcaagacttgtaaca

SEQ ID NO: 129757 - DNA, 1155 bp, Zea Mays
gaaaagcagcacctggccgacgacgaagagaactgctggtactgcgtcggtggcgctgaggcggagtgcggcgtcgatgacgagttcagggcgacggatctgcgccctctatcactgttgtcgccgcacacgcaggcgttccaccttgcctcgctctccctcttcgcctgcttcttcgcggcctttgccgccccgcccatcctccctgcgctgcgacctgcgctcgtgctcacgccctcggacgcccccgccgccgcagtgggctccctctccgccacgctggtcggtaggcttaccatggggcccgcatgcgacctcctcggcccgcgccgcgcgtcggggttcgccagcctcctggccacgctcgccgtcgcggtcaccgcgtcgtcgcccgcggggtttgtcgtgctgcgcttcgtggcaggcctctccctcgccaacttcgtcgccaaccagcactggatgtcgggcatcttcgcgccctccgtcgtggggctcgccaacgccgtcacggccggctgggccaatctcgtcctccgccccggcgtgcccatcaccgtcgcctggcgcgccacctacctcttcccctgcgcgctcctcatcaccacgggcctcgccatcctcgcattcccctacgaccacccgcgcggcgccgccggcggcggcggagccaagaccggcaatagcttgtggaaggtggtgcgcggaggggtcggcaactaccgcgcatgggtgctcgcgctcacctacggctactgctacgacgtcgagctcatcatagagaacgtggccgccgacttcttctggaaacgtttccacctccccatggaggctgcgggcgctgcggcggcttgcttcggcgcgatgaacgaggtgcgcgtcccgcgggcgggtcggcgtcggacgcggtgccgagactgttcggcatgtgcgggaggctgtggcagcaggtgcccgcgtgccacgccccgtcctcccgacatcgacgtcgcgtccgcctcgctcgcgatgcccgctcccccaaccctgctccgacagacaccgcgtccatcctccacatcgctgagacgaccgtcgtctcccccctgtcccgctcgcgcgttacccgggccctcccgcccaagatcgtcgccaaggtccgccccctccctttaa

SEQ ID NO: 129758 - DNA, 1966 bp, Zea Mays
gtagattcgtcaagatggtagtaagtagtgtagttcaaacacagtggcttggaccaaatgaacgacgcacgcgcggctccttttaagaccatgtcgatactctctctctctctctctctctctctctctctctctctctctctctctctctctctctctgcgtgtgtatatatagaagacatcagaggagcatgatcagcaactactggctccttatcaactccttgaatggccatctagaaggctactagctagctgcatcaagagcatacgcacatatatacatcggacatagatcgaactcctgatctatcctgcagctggcaagtagaaagatcgaccatggtggccaaggtgaagagagacggagaagtgctcgtcgccgccgccaccggagacagcgaagagcaagacgacttggtgctcccggggttccggttccacccgaccgacgaggagctcgtcacgttctacctccgccggaaggtggcgaggaagcctctcagcatggagatcatcaaggagatggacatctacaagcacgacccgtgggacctccctaaggcgagcacggtaggtggagagaaggagtggtacttcttctgcctcagaggaaggaagtaccggaacagcatcaggcccaacagggtcaccggctccggcttctggaaggccactggcatcgaccgcccgatctaccctgccgcggccggcgagtccgtcgggctcaagaagtccctcgtgtactaccgcggcagcgccggcaagggcgccaagaccgactggatgatgcacgagttccgcctcccgccggccgcctcgtccccgagcacgcaagaagctgtagaggtgtggaccatctgcaggattttcaagaggaacatcgcctacaagaagaggcagccggcgggcagcaacgctccgccgcccccgctggcggagtccagctccaacacggggagcttcgagtccggcggcggcggcgacgacggcgagtacatgaactgcctgccagtgccagtgccagccaccgctgcggtcgtgccccggcagcagcatcggatcggcagcatgctgaacggcggaggtgtcactgccagtggcagcagcttcttcagggaggtgggcgtgcacggccagcagttccaggggcactggctgaaccgcttcgctgcgccagaaatcgagcggaagccgcagctcctcggctcgtcggccatgaccattgcgttccatcagaacgatcagaccgccgccacgaatgagtgctacaaggacgggcactgggacgagatcgcaaggttcatggaggtcaatgatccgacagtactttacgactgtagatacgcttgatcgataggaagttcagagaagggcgcatgagagacgactggcatgcagggcctgctccagtgaggccgctagtcagttagattttgctggcaatgcgccccccaaaaccaccagccttttgtgtttattttcctgatcggatgtatacaggatgtgctgtgaacctgtcaccaaaataaacatatgtttcagccatgaatcaggacttttttgacacctgttttttttctgccattttagttttgatttctataagttctgtcagacgtaggaaagtttgacatatgacagttcaaaattccttgtatacatcctttgtcacaactcgccaaagcaaagcataacgacagtttctgacttggctacggttttgggcagccaattgaaaggctacacctcaaccgttttgctcatacaagaagcacacctgtttttttttttttgcatactcctagtcacttccactcagagatgagtgagctgaagctacagacaacctagacagccgtgttgtcactcctagattgatctcatgcccacaaagtcacccaaaagctgtgatgcatcagcaatctaccattcatgcttgaggacaaataaaacacctgtgatt

SEQ ID NO: 129759 - DNA, 1251 bp, Zea Mays
ctctctctctctctctctctctctctctctctctctctctctctctctctctctgcgtgtgtatatatagaagacatcagaggagcatgatcagcaactactggctccttatcaactccttgaatggccatctagaaggctactagctagctgcatcaagagcatacgcacatatatacatcggacatagatcgaactcctgatctatcctgcagctggcaagtagaaagatcgaccatggtggccaaggtgaagagagacggagaagtgctcgtcgccgccgccaccggagacagcgaagagcaagacgacttggtgctcccggggttccggttccacccgaccgacgaggagctcgtcacgttctacctccgccggaaggtggcgaggaagcctctcagcatggagatcatcaaggagatggacatctacaagcacgacccgtgggacctccctaaggcgagcacggtaggtggagagaaggagtggtacttcttctgcctcagaggaaggaagtaccggaacagcatcaggcccaacagggtcaccggctccggcttctggaaggccactggcatcgaccgcccgatctaccctgccgcggccggcgagtccgtcgggctcaagaagtccctcgtgtactaccgcggcagcgccggcaagggcgccaagaccgactggatgatgcacgagttccgcctcccgccggccgcctcgtccccgagcacgcaagaagctgtagaggtgtggaccatctgcaggattttcaagaggaacatcgcctacaagaagaggcagccggcgggcagcaacgctccgccgcccccgctggcggagtccagctccaacacggggagcttcgagtccggcggcggcggcgacgacggcgagtacatgaactgcctgccagtgccagtgccagccaccgctgcggtcgtgccccggcagcagcatcggatcggcagcatgctgaacggcggaggtgtcactgccagtggcagcagcttcttcagggaggtgggcgtgcacggccagcagttccaggggcactggctgaaccgcttcgctgcgccagaaatcgagcggaagccgcagctcctcggctcgtcggccatgaccattgcgttccatcagaacgatcagaccgccgccacgaatgagtgctacaaggacgggcactgggacgagatcgcaaggttcatggaggtcaatgatccgacagtactttacgactgtagatacgcttgatcg

SEQ ID NO: 129760 - DNA, 265 bp, Zea Mays
tacttacctggacgggatcaacgggcgatcaataaggcccgtggtctaggtcagtggcctgcattgcacttggcaggtgcgctggcctaccatcttcccaagtgggagagtggacgtcataatttgtggcagagggggtacgcgtccgcgcggcccctacaaaatggattaaatttaatttaggtcccttgttaatgcaggggtttcggctttagaaggtcataatagacgtatgcgcggttcccgtccaatataagaaattaaa

SEQ ID NO: 129761 - DNA, 473 bp, Zea Mays
ttgtttgttttaaaacggagtcggaaacaagcatgtgaacattcaccaaatcactgtgccatgagcacagcgttctgtttcattgtatacaaaataaggtgtgactgaaaacagctcagtgctacagaagggattttcccatcaaagaacatctggtgccacctttagcaaggcaatgaacaaaacacacagatggtgccaaggtacaaaaacatcgtacctaagttatgatacatcgtttgcttattcatcagctagttgagcaaaatatggaaaatggaagaacccagtttatcaacaagctagtcaacaacaacaacaacaacaacaaagcctttttgtcccaagcacgttggggtaggctagagatgaaaccccgtatgaaaacctcagagctcaacccccaaagaacagaaaagggaaacaaaggcaaaggagaaccgaaaacaacgaaacggggaaacacataaacg

SEQ ID NO: 129762 - DNA, 1353 bp, Zea Mays
atgagggagtgcatctccgtccacatcgggcaggccggcatccaagtcggcaacgcgtgctgggaactttactgcctcgagcacggcatccagcctgatggccaagtgcctggagataagaccgcgggacatcacgatgatgccttcagcaccttcttcagccagactggtgctgggaagcacgttccccgtgcaatcttcgttgatctagaacccactgtgatcgatgaggtgcgcactggcacgtaccgccagctcttccaccctgagcagctcatcagtggcaaggaggatgccgctaacaatttcgcccgtggccactacacaattggcaaggagattgttgatctgtgccttgaccgtatccgcaagcttgctgacaactgcaccggcctccagggcttcctggtcttcaatgccgttggtggtggcactggctctggccttggttctctcctccttgagcgcctgtctgtggagtacggcaagaaatccaagctgggcttcactgtgtacccatctccccaggtgtcaacctctgttgtggagccttacaacagcgtgctctccactcactcactcctggagcacactgatgtctccatcctgctcgacaacgaggccatctatgacatctgcaggcgctccctcgacattgagaggcccaactactccaacttgaatcgccttgtgtctcaggtgatctcatcgctgactgcttctctgaggttcgatggtgccctcaatgtggatgtgaacgagttccagaccaacctggttccttacccgaggatccacttcatgctctcctcctacgcaccggtgatctcttctgcgaaggccttccacgagcagctgtctgtggcggagatcaccagcagcgcgttcgagccggcttccatgatggtcaagtgcgacccacggcacggcaagtacatggcttgctgcctgatgtaccgcggcgacgtggtgcccaaggacgtgaacgccgcggtggccaccatcaagacgaagcgcaccatccagttcgtggactggtgcccgacggggttcaagtgcggcatcaactaccaggcgccgacagtggtgccgggtgccgacctcgccaaggtgcagcgcgcggtgtgcatgatctccaactccaccagcgtcgtcgaggtgttctcccgcatcaacagcaagttcgacctcatgtacgccaagcgcgcgttcgtgcactggtacgtcggcgagggcatggaggagggggagttctccgaggcacgcgaggacctggccgccctggagaaggactacgaggaggtcgccgcagagggcggcagtgatgacggtgacgaggaggaggaatactga

SEQ ID NO: 129763 - DNA, 1325 bp, Zea Mays
atggcggacgaccacgacgctgccgccgaggaccagcgccctacggctgaggctgcagcacgccgtgccgaagacgctcgccgcgccgaggaaggccgcctccgtgctgccgctctggacgcgtatgagcatgcccatgaggccctctgggcgcaggccactgtcgtcgtcaacatgaaggcgctcatccctgtccttctcgatcaggcgacaaatacctacaccaagtggtgtggcatgttcctcactgtccttggcaaatatgccctgactcgtcacgtccttgaagatgaagcgttcccatcgcgcccggcatgggttcaagccgattgttgtgtcctgacatggatctacagcaccgtttccggcgacctgcagcaatctctgatgatgcggcagggccccgctcgcggggcgtggtgctacctcgaggacgagttcctcggccagagggagtctcgggcgcttctgctcgaaacaaaattccgcaacttccgccaagagtccctgagcatcaccgactgctgccgccagctcgaatcgatggcggcttcccttgccgagttcggcgatcccatcggcgatcggcagatggtgctcacgctccttcgcggcctcggtggtaagttccgccacaaggtgtccatcctcaagatgcacaggtcgttccccacgttcgcagaggcacgagcgcacctgttgttggaggagctggaaatcgacgcacgacctccgtccccgccatccgccctcgtcgctgcaacgccgcgacctgcggctcccggggctccagcacctccacgtccaggggcacatcctccagcacgcccctcggtgccaaacgaccaacgtaacggtcgtcgtcgcggccgcggtggacgcaatggccatcaccagggccaaccaatgcctcctggtgccggacagggaggtgcccccccggcatgcatccgtccttcgcgcatccttgggctggcactatacggctgtggccatacgatcagtccggacgcccaccaccgccgccagcattcaacgcagtaccacagtacaacgcctatggcggtttctacggcgctccatcccctccgtacggtatgcactacgggggaactggagcccctggtttccaggcgcccgcaccggcgtaccaagcggcgccctggaaccccactcacggaggagcatggcatcaggacgcccttgcacactctttcaacaccatgaccctcaacccgccgaacgctacttctgagtggtacgccgactctggtgcaggatcgcacatgacctcggacgctggtaaactttccaccatttcctcg

SEQ ID NO: 129764 - DNA, 2889 bp, Zea Mays
cccacgtccttcccaccccccgctaatctcgccgcgccgcggaatccatggcgccgccctcgccctccacgccccatgtcggcatgcccctcccttacgaccgcctagcgatggtggagtcttcaacggccgcggtggccgacggcgcggagggagtcggggaggacgtgggcgcgtcgtcctccatgggctccgcggctgccgagtctcctgctgcctccccatcatccatgggatccgcggcggtggcttcttcctcctccatggtttccacgtctacagggctacaccttgccccgccccctcttgccatgcccgccaatctcaggttccgccagccatcccagaccacgcgtcgcgccccagcctgaatccacccgccagccacgcccacagatctcgcgtccgcgccctcctcatcgccccacatgctgcgcactctcagattctacgatgtcaatggaaggcccgcccccgccgccgtcgatggaaagtgcatgccttcgatggggagaggactgcgcgccgcgcctatccatacccggatttcgcacctctttgtcccgcgcacgcgtctgtcgatggaagagatccagacagtgctcgcccccgcggtgtggaggtttttggccgccacctgcatctccacatcgcggtcccaatcaagatcattattattcgggtcgccttccttgttctctcccaaatcgcagggcttagttcctgcaaatcgccctcggcgtggcctcaagataagacacaccagcgcccttgctggaatcgtggacgctcgaggaggactcgagccgaccgtcgcgcttgtctcgcctctcgtcaatctccctccctctctggtctctttctctctctttaattgttggggatcagcctgattcagagcaacgagtcgttgggcgccattttgctcgctccagaccgacaatcttggacagctccaaaggtgcgttcttgtgattttccccaaacaatactgcatcattgaaccctctatttctgcacaatgtgaaaaagtctatgtttcgttgcaattgtttggaggactcgttgccatttggcagcattatgcctgactttttcgagtcaaccttgttgcgttcattgctattttttggtttttgtgggaaaaataaggtatttcacgttgttagcttgagagatcattcactccctcatgccgtagttggtcgttggggcctgcctcatgatcattctatggggtagcatcgtggaatgattgagaaaatcaggatcgtggaacgattgagaaaatcaggaggtaggcgatatgaggtcttcctttcctgtgtgcccgcgagaaagggtgttgtgtcgtgacttgtgagggcctcctcctgggcatctacggggttcctcagcctcatggacaactcctttgggtgctctgcttccggtgagcggcttgtctcagctgctcgcgacggcgacctgcaggaggcacatgcactgctcaagtacaacccttgccttgcccgatactccacattcagtgttaggaactcatcgctgcattatgccacgacacaacacaaggacaccatgaggtaacgttgtttgtcttctaaagaagcatcatcataagagttggtgactatagtatttgcattcaaatttgtttgctctttggatattcaaattgtctctttgctgcttgaatcccacgttgagatcaaccttaggaattacaaggggtaggtaaagttaatttctaaggctaagtgtattgagcttgtgcgtagtagctgacgaagttataccttagtgtatgctttgctaattctatatagactgatttgatgcaagcatgccaatatggccactgggaggttgttcagaaactgatactcttcaatgcaaatgtaagttttgtcccacttcattcgacaagagcatttcttgtagtttatcgtagataatgtggaaaaatggtatacaggtgcacatgacatattatctccaaatggtggggtgctctccattttgctgcgctgcttggtcatgcctgattcctccgtcttctgcttgcagattatgttccaagcatactgaattctgtagcatgatgaatcataagtcatctgaagaagattcagttgctgattttgatcatgagaatcataagtcatgatgaagattcaaccgctgattttagaaagtgttcggagatcaaccatggctaatggcttcattcgtggttctaagattctttttatatttttttgcatttttctatcattgataacatgatcagatcatggagcggatgtgatactgttacctctgtttggttgcatgtagcctatatgcaagagtgatttacacaaagaacagcacagctcatacccacgataagtccgtcaaaactcaattgttttttcgacctatgcaagtaatttatttgttcagatatttaatgatttgagtttttgttcccttttgcatataggcaattcttctgaaaaaatctgtaacgcatgtcgctaatgtttcatcgaagaggaggttgccaaagaagatttatatatggtacttgcagatgataacttcagtactatagttgtagtagttggtgaagggaggtctatttacaacaacatgaaggcttttattaggtctattttttagataatctatggtcaaactttttttgaatcctaggcctgttacagtggtgagagttatctagaaaggcttgtctcagttaatcccttacttcgaccctactgatggggagcctctggcgtcgtatgtgcactatgggacttcattctctttgattatgcaaataaaaaaatgttaatacttctgcactgacacaatctgaaatacgagatgtcatccttggtgctg

SEQ ID NO: 129765 - DNA, 2703 bp, Zea Mays
cccacgtccttcccaccccccgctaatctcgccgcgccgcggaatccatggcgccgccctcgccctccacgccccatgtcggcatgcccctcccttacgaccgcctagcgatggtggagtcttcaacggccgcggtggccgacggcgcggagggagtcggggaggacgtgggcgcgtcgtcctccatgggctccgcggctgccgagtctcctgctgcctccccatcatccatgggatccgcggcggtggcttcttcctcctccatggtttccacgtctacagggctacaccttgccccgccccctcttgccatgcccgccaatctcaggttccgccagccatcccagaccacgcgtcgcgccccagcctgaatccacccgccagccacgcccacagatctcgcgtccgcgccctcctcatcgccccacatgctgcgcactctcagattctacgatgtcaatggaaggcccgcccccgccgccgtcgatggaaagtgcatgccttcgatggggagaggactgcgcgccgcgcctatccatacccggatttcgcacctctttgtcccgcgcacgcgtctgtcgatggaagagatccagacagtgctcgcccccgcggtgtggaggtttttggccgccacctgcatctccacatcgcggtcccaatcaagatcattattattcgggtcgccttccttgttctctcccaaatcgcagggcttagttcctgcaaatcgccctcggcgtggcctcaagataagacacaccagcgcccttgctggaatcgtggacgctcgaggaggactcgagccgaccgtcgcgcttgtctcgcctctcgtcaatctccctccctctctggtctctttctctctctttaattgttggggatcagcctgattcagagcaacgagtcgttgggcgccattttgctcgctccagaccgacaatcttggacagctccaaaggtgcgttcttgtgattttccccaaacaatactgcatcattgaaccctctatttctgcacaatgtgaaaaagtctatgtttcgttgcaattgtttggaggactcgttgccatttggcagcattatgcctgactttttcgagtcaaccttgttgcgttcattgctattttttggtttttgtgggaaaaataaggtatttcacgttgttagcttgagagatcattcactccctcatgccgtagttggtcgttggggcctgcctcatgatcattctatggggtagcatcgtggaatgattgagaaaatcaggatcgtggaacgattgagaaaatcaggaggtaggcgatatgaggtcttcctttcctgtgtgcccgcgagaaagggtgttgtgtcgtgacttgtgagggcctcctcctgggcatctacggggttcctcagcctcatggacaactcctttgggtgctctgcttccggtgagcggcttgtctcagctgctcgcgacggcgacctgcaggaggcacatgcactgctcaagtacaacccttgccttgcccgatactccacattcagtgttaggaactcatcgctgcattatgccacgacacaacacaaggacaccatgaggtaacgttgtttgtcttctaaagaagcatcatcataagagttggtgactatagtatttgcattcaaatttgtttgctctttggatattcaaattgtctctttgctgcttgaatcccacgttgagatcaaccttaggaattacaaggggtagactgatttgatgcaagcatgccaatatggccactgggaggttgttcagaaactgatactcttcaatgcaaatgtaagttttgtcccacttcattcgacaagagcatttcttgtagtttatcgtagataatgtggaaaaatggtatacaggtgcacatgacatattatctccaaatggtggggtgctctccattttgctgcgctgcttggtcatgcctgattcctccgtcttctgcttgcagattatgttccaagcatactgaattctgtagcatgatgaatcataagtcatctgaagaagattcagttgctgattttgatcatgagaatcataagtcatgatgaagattcaaccgctgattttagaaagtgttcggagatcaaccatggctaatggcttcattcgtggttctaagattctttttatatttttttgcatttttctatcattgataacatgatcagatcatggagcggatgtgatactgttacctctgtttggttgcatgtagcctatatgcaagagtgatttacacaaagaacagcacagctcatacccacgataagcaattcttctgaaaaaatctgtaacgcatgtcgctaatgtttcatcgaagaggaggttgccaaagaagatttatatatggtacttgcagatgataacttcagtactatagttgtagtagttggtgaagggaggtctatttacaacaacatgaaggcttttattaggtctattttttagataatctatggtcaaactttttttgaatcctaggcctgttacagtggtgagagttatctagaaaggcttgtctcagttaatcccttacttcgaccctactgatggggagcctctggcgtcgtatgtgcactatgggacttcattctctttgattatgcaaataaaaaaatgttaatacttctgcactgacacaatctgaaatacgagatgtcatccttggtgctg

SEQ ID NO: 129766 - DNA, 288 bp, Zea Mays
atgtagcacagtgcgcttcagaaagtcaggctggggttggaagtctgcgtcaaagatggcaacaaactcgtaatccttcacgtagctgcagctcatggccgacttgaggtttccagccttgtaaccatccctcaacacacggtgcctgtacacaatccgggcaccttgctgctgccatttggccacctcttctctgatcagagcctgtgtcagtaggtcatcggagtcatccagcacctggaccaagaagctggatttcggccagtcaaggttgcacacggccgcaat

SEQ ID NO: 129767 - DNA, 1027 bp, Zea Mays
ttttccccgattctctaatcgcccgcccccacctagtattctggaattgcggacacaaggagatgctgtccgtgcaggaagcccttgagcttgcgtcgtccagctgcggcacgacgatggacgttaccacgtgcgggttcacgccgtgggggcccgagtcgtgccctggcctggagcaggtgatggcgtcgacgccggccgcggcagcgaggcacccggaccccgaggaggaggagaggcgccggcggcagcgccgcaagctgtcgaaccggctgtcggcgcgccggtcgcgagcgcggaagcagcagcggctggaggagctccgcgcggaggcggcgcggctccgcggccagaagcgggagctggaggccaggctgcaggccctggcgcggcacggcctcgccgtgcgctgccagaacgcgcggctccgcgccgaggccgccgcgctcgcgcgcaggctcctcgcgatcgcgtcgtacgcccagcagccgcagcataaggccggagtcgcgcccgcgccggcggcggcgctgctggggctggcgtcgctgacgacgtaggcggctggcgagagggacgttcttctgcccggtggaacgaagtctcgcgcccactcgcagttgcagtctcgcgctctcgcatgctatggtgaactggaaacatgcatgggctgagggcagttgggcacacacaccgaggcttgctagtacggtgcatgcagcggtcagccggtagcactatactattagtccctgtttgggaacaaagtttttgaaaactacagtttttgaaatattatactatactttagttatgacaataccgtagtttataataccgcagttttgaaaactgaggtccagagctaagtttagaatgccttaaaacaactatagtatttgcaatacttcagttttgaaaacagagattttacccagcttgccaaacaccattatgtatataatactgcagtatttgagaatactgcagtattcttccaaaactgcagaaaaactttgttcacaaa

SEQ ID NO: 129768 - DNA, 85 bp, Zea Mays
tgtggatcgatctaataatcaagctctggctatagtttctcggattcttgacagcgagagacgcttatccgatcgaaagcgcacg

SEQ ID NO: 129769 - DNA, 1833 bp, Zea Mays
actcgaaaagaaaactagccgggcaagttacgcccaccaccataccgtcccacgcggcctcccaaactaaccgtatcccccggcgaccgggaactgcaaccgatggaccgcctcgtcgtcttctcccggcgccgccgccgctggatcctcctcgctgcggccggtgcggcggcggccgtcggcgcgtacaagatctaccaccaccctgccgtcgcggaacgtcgccgccgcctcgtgcgcctagccgccgccatcgcggccttcgctgatgccgccgcatcatccgccgacgccgtggccctggtgacatccgatctcgccgactttgtccattccgacgcggacgaggtcccccgcagcgtcaagcagctggccaagctcgccgcctcccctgaggtatccgccaccgtctccaccctatccgaggcagtaacctccgggatccttcgcgggtcgggatcctctagctccgggcccgcatccggcggtaccgtggccctctccgatcgtctcgtagacaggctcttctctgactcaggcgagcgcctcgcgtccgcggttgccggcagcttcgcccgccatctcgtcctcgccttttactccgctccttcaccacaaggggaggcgtcctcctccccgacgatgtgggtcaacgtggttgcgactggaaagtgccggaaggcgataagcaactgggttgaggtcttcgtggggactgctgtgagggagttcattgacaagaccatccacatcaacacctacgagcagctcttcgaagggctcaccaatccgagacatgacgctaaggtcaaggaattgcttgtttcagtgtgcaatgctgcggttgagactttggtgaagaccactcaccatgccctgtacagtactaatggcaacttgggtgcaaatggtagtgtcagtggcaatgccaatggagctggggaagggtgggtggagacggtgtcgagcacgttggcagttcctagcaacaggaagtttgtgcttgatgttacagggagggtcacatttgagacagtgcggtcatttctggagtttgttctttggaagctgcaggatggggcaaggaagggcggtggctccgtggttgacagtggcctgcgcgtcgtgaggtatatgagcgataagtcgatggttatcgccacgatctgcattacgttgtgcttgcatgtgttgaatgggactaggctcttggtaacagcttgagagtgtacttgtttggttttcctattttttgcacattgtttgtgtaaaactgtaggactcatactgaaactgtaaatccaaaaggaatggaaataatagaaataagatcaattgtgctgtacaattctgttttatgcctatatacttgaggtctgaacgactttagtgagagagttgttgatctgtagcactacctgtttgcaaccatatttgtgggattaagtagcatttacatgcctgctgtcattgaagctattttttttaccagtatagcattactaatattgtgggggtcaagttgatccactaaaatgactaaattctgtgcttttgtatctcttgtcatcaatgatgtaaatcggagcttgtccgtgtgattattgaattatgtaagaactcaactttggtttctattatttgagttatttactcactataggatggtatccaatcatcttgtcttgatcttgatttttgaaatattaacaatcctagtcataccaacttgatattcttctctgggttttctttttataagggaagcaggagtagtgcttcatcctttacttgttacttgtcttgatattgattttgcaacattcagaaatc

SEQ ID NO: 129770 - DNA, 570 bp, Zea Mays
aggagtttccactccaggcgcttggtggtgggggtccggatgagccgggggagcaggctccggtggctgtggcgtgcgccggcgcgggcgctcggccgggcgcgggacctgtacgtgcgggggctcacggggtgcgcgcgctacgtcccctccgacgccgcgttcgggtaccccgtgctcgtgccggcgccgccgctgtccaggagccacagcgtcgactggggccgcggagccgccgacgaggacctgcgcgagctggtccgcgccgcgtcgcagcgccgcgtggtggagcagcgtcgcgccgagctgcgggccgtggccaggagccagagcatggccgcctcgctctccatggggcggatcgacgaggacgcgccgtgcgagctcggcgcggccgccggcgacggccccggagcgctgtgcccgaggagccagagctgcgtcggcgacgccgcggggaggagggccctcgcccgccgcgggcacggcaagctggtgccctcggtggtctgacggagcggctgcccggtcgccgtcgtcggtgacacggtgtgtgcgattgtgttgtgc

SEQ ID NO: 129771 - DNA, 1372 bp, Zea Mays
acgtgtttaatgtttagaagataaatgcatcttttttcaaaggattcgatgctctgtcgtgtttagtagttcttcacagctcaggatttggccgtgcggcgctctgtatgaccctctcatagccaatgcaaagacaaaccccgcccatcagtctacgcgaatcgctgtggcctcgctcgttgcaaaccttccagcctgtcttgcctccacgcgaggctacatgacacttcctttccttcttcatcctcccgctatatatagccgccctcttcgggtcctcctcctccatcggccatcgccatctccatttccagcatagaagacgcgatacagctcaaggacagcgctccgcacccgcacgcaagccagaccggaccgaatcgaagcagcagcagcgtacagaagatcacaccctactgccgcgctgcactgcacaatgggcatctgcgtgtcgtgcgacgcggcggacgagggcgccgcgacggcggcgcgggtggtgctccccagcggagagctccgggagtacgcgccaccggccaccgccgcggaggcgctgcaagcggcgggcgagggctcgtcgtggctcctctgcgacgccgacgggatggcgttcgagggccccgtcgcagtcgcggcggtcgcgccggggtccgagctccaggcggggcagatctacttcgtgctccccgccgagatgcagcgccgccgcctcgcccgcgccgaggtcgccgcgctcgcggtccgggccagctcggcgctcgccagggccgcggcgctcgcccagccatcgtcgccctgccgccgccgccggcgcggcgcggcggcgcagctcgtgttcccggtccccgaggaggagttcgcggcggcggacccggtcgcgtcgaagcccgcggctgcggtggtggcgcatcggaaacggagggtggcgtaccggggcgggagcgggagggcgtccaggttctcccccgacctgaccgctatcccggagagcgagtagtagatggagcctgccatgtgtctccggtggtgacgggtcgctcgctggcgctcggtcggacggtgtggtcgaggccgagctcgcgcgcgccggagatcgatggagcaggaagcgttgtagacgcagagctcgggagtgagaaatgtgagtagtgtttttggcgccgttggtttaggaggcaataggatgagtgttgttgcggtattacgaacgtttaggttttagatgcaagtgtaaatactatacacgggatctccgtacggtgtgcccagtgagtcacagtttggaactcagcttctaatcagtgctcgtgttcaggctaaaaaaaatgaaatctctcgctgtttcggaaaaaaaaaacttatttctgatgaa

SEQ ID NO: 129772 - DNA, 1069 bp, Zea Mays
catatagagagaaaaaataaagagtttggagatgctcttagacatgattagaaacggctaagcaataacgcaaagattcggctgacaatggggaaggggttcccgtcgtacttggcgatgaagacggggccggagggcggcgacggcgcggcggcggcggcgcagcaggcgctcatcgacgcggacctgcggaacctcggcgtcgccgcgcgaaagctcgccaaccacgccttcgtcctcggcggcgggttggggttcggcacttccttcctcaagtggctggccttcctcgccgcagtgtatctcttgatattggaccgcacgaactggaagaccaacatgctgacagctctcttggttccttacattttcttcactctgcctaatgtgctgttttctctgatcagaggagaggtggggaaatggattgcgattattgctcttattctgcgcctattttttccgcgccacttcccagattggttagagcttcccggttccatcatcctgctcacagcagtcgcccccagtctgttcgcacacaccttcagggatgacctcgtcggtgtcttcatatgccttgcgatcggatgctacctgctccaagagcacatcagggcgtcagatggactcaggaacgccttcaggaagggcaatggcgtgtccaactccattggcatcctcctgctcttcatctaccctgtctggaccggggtgctgcagatcctgtaggcgctgttgcctccgtgttcccgtctgctgtccaggcgtccagctccgttgccgttcgtctcttgtgcaaatgtttcttctatggtgatcgtggttctgtgctatcgggatgggatgtagatcgagatgttggccatattatcaggcgtgtaaacccttgccgcttctgttaagttgtcgcaagtttgaggatgggtgtttatagcaactactgtatatcatttgatgttatttctgaatatgatgtcaagcggtgacaaatattgaaacatgaaccgcgcacgcttgctgttgtcctctacaccaggcttccagttccaggcttccgttggctgag

SEQ ID NO: 129773 - DNA, 3564 bp, Zea Mays
caagcccaacagcgttcaaaaaaaaccaaaaacgccatcttgtcttcgtcttcccccacttggaagttggaggaatcctttactcctccccacctaaaacaaaacaccgggataggtcggacaccattattgcgagtgcagcgagcttccccttccctgactcccacgggccacggtcctgctgctcgcctgctcctcccaagaaatgcctgtctggtgcggttcctgagggagaggatcgttccatgatgcaggggaggaggaagaacacacgggagatggctcgggagcatccgcaaccgccgccggtggcagcggcggcggcgtcggcggccagctccaaaggccaagcatggttctgcaccacaggattgcccagcgatgtagtgatcgaggtgggagacatgacctttcatctccacaagttcccgttaatgtcgaggagcaagaagcttcacgacctcattacgaacaaggagtcgcgcgaggccagccggagaggcagaggagcagagcaagaagaggatgtgggggagatcagagaggaggaagcggaccttgtgctggaggaggacgaggaggcgggcgtgcaccgcatccacctcctggagttccccggcggcgcggaggcgttcgagctggccgccaagttctgctacggcgtgaagctcgacctcacgccggccacggccgcgccgctgcgctgcgccgccgagcgcctcggcatgtctgacgaccactcggacgacaacctcgtctcccgcgccgaccggttcatatcgcagaccgtgctgaggaaccccagggatgccatccgcgccctcaagtcctgcgagggcctgctccccctcgccgacgacctcggcctcgtgtcgcgctgcgtggacgcagtcgccgccaaggccgccgcgtcaacgcccacggcactcttcggctggcccatcgccgacgacgacagggccggcgaacgccagcgccgcaagaacgccgccgccgccgccggggccacctggtccgacgacctcgctggcctgtccttggccacgttcacccgtgtcattgccgccatgaaggagcgcggcgtcggccctgaggtcattgagggggctctcattgcgtacgctaagcggtccatccccgggctgtcgcgcaccggcaggcatgtcggcggcggcgggggcactgccgctgcgccgccttcgtccgatgtggaggagcagaaggcgcttctcgagaccgtcattgccaacctcccagaggaaaccatcaagagcaccgcccacaccggcacggccgtgggcgccaccacggcgcgcgtcctcttcggtctcctgcgcacggcgagcatcctccacgcgtcggaggcgtcacgggacatgcttgagcggcgcatcgccgcgcggctgcccgacgcggccgtcgatgacctgctcatcccgagctactcgtacctcgtggagacgctctacgacgtggacggcgtcgagcgcatcgtgcggtatttcctcgaaggtcgtgacgtcgctgacgagggcaacgaagaggagggcagcgaggcggagacgccaggcagagaggctagccgacgagccatgctgtccgtggggagattggtggatgcctacttgggggagatcgcgacagatgccaacctgaagccggacaaattctgcgacctcgcctgggcgttgccggacggcgcccgcgtgtacgatgatggcctttaccgagctgtcgacatctacctcaaggctcatccgggtctgagtgaagaagagaaggagaaggtgagcggcgtggtggacgggcggaagctcacgctggaggcctgcacgcacgcggcgcagaacgaacggctgccgctgcggacggtcgtgcaggtgctcttcttcgagcagctccagctgcgccgggccatcgctcagacgatcatggcgaacgaaggcggcgcagccgggtcaggggaggaaggcggtgagagcgacggcggcggtacatggcgcgtggcggcacggggcaaccagatgctgcggctcgacatggacagcatgcggaaccgcgtgcaggagctcgagcgcgagtgcacgagcatgaggaaagccatcgacaagatggaccggcgaggcggggcaccggtggataggggagcgccgtctgtgccgccggcggatgggaggtggggcgcgatagtgacgaagcggttcgggtgcaagttcccggcgcaggtctgccagtcgcagcagcggacggtggtggcacggactcgccggccacgcattgagcagagcccctgagttcttagccattgcacatcctagcttcgagttcattgttctgttctcttgattctttccttggatttgtgaaaaattccctgagtttcccctgcggcctgcgcagttattgtgtccttttccatgttcgatcattcaattgcatatttgcagtttgcagttgcagcgcacaaatcgtacttggaagtcggtgatgttgctggccaatgcttctacaagttggctcaaccaattctttgatccttctctcgccactaacaagtgttacgaatttacaaacattttatggagaatgtaacctttgtgcgtgctagctgtgaaggcttcctcaccagtagtctccgcaggagcaggcgccgtccttgaaatggtggaagcgcttgttgtccctgacgacgatctcgcggccggtgaccttggcaatgagcttgacggcgttgtggcagtcgccgcagatgcggaggttcttcatgacgcggagcggcgtcccgggcggcgtgctcaccagcccgaaggcgatggccaggcgctcgctgtggtacatgagcgcgcgggccttggcgtcctcgtcgatgtcgtggagcacgtagcgcgtgtccggcacgtaccctgccgcgcggatctgcgcgtggagctcccgcaccttagtgtacgcctctcgccgcttggcctggaccgccgcgtcgtcctccctcgccggacgccgccttgtacgctcctcgaggacccgccgcgcgtcgccgcgggcgccgagcttgaggtacagcgtggcgatcctgtgcaggacgggcgcgggaatcgcggaccccgacgtggaagtgagcaggcggtgggcgcgcctgagcgagggcagcgaccgcgtgtcggcgcaggcctggaggagtgcggcctgttcctccggctcgagttgttcggcgctgcctcgttggagcatttcgtcgagcaagctaacggcggcctcagggttgtgttctcggtacagccttccgagctcatcgctgtccaatcggcaatcgatgggctccggtgagctggtagtcgtgacagaggcggagggtgcggggtatgtgaagcggagcgccgggcgggtacggtcgccgtggtgaagggatgccgcgtcgaccggtgcgtcgaaaccgcttcgcctccgaccgcggatacctggacgtgtgggcgtggtggtggggagagagggggaggtccgggaggcggccggtgctgcaagtcttggagaaatcagcatgtttgccggtggcgtgaggtccagcgg

SEQ ID NO: 129774 - DNA, 256 bp, Zea Mays
ttttttttatttttactgttcttgtaaaatttctatgtttaaacctttgtttggttgttttattatttcattttattatctctatctcagcactactagcaataacgccaagatggttagatgtcacagatcacggcatcgagcttgacatcataggtagtcacgacatctagcttgacgtcgagctacctgcgctatgttctgttgtctcctctattctcttcttctctttactgacggtagctcaaataaaaaa

SEQ ID NO: 129775 - DNA, 519 bp, Zea Mays
tccagcaaaagtggagcatctacgagaagaacttaggcgacatcaggattacatgaggcaacaagctgcgcaacatgaatactatgctgcacggattcaacaacaacaaacactcatacaacaactagcacaggcccaagggatacacgtcccgatgcccccaccaccaccaccacctcccgtacattatccttggtcttcacctccacctacacctacatctccacctaccaaacatcagctatcttgccgacgcaggaatgagaagacgggttagactttgtcgaagccctcttcgctagtggaggtatcgaccatcactcgtcactgtaccccgatggtgatcgacgatcgtgagcttccatgttatgtgttgtgatacttgagacctttattatgactatgtatgagatattgtctcttattatgactggatgaaatgtgtcttatgactatggatgagacatttatgatgtaattgatgagactatggatttaaatattgttatgtgattgtat

SEQ ID NO: 129776 - DNA, 1220 bp, Zea Mays
ataccttctcagcaaggatccgatcaccaacatcaaatgttgggaacattgacctggatgggatggacctcggctcagctagggatgatttatagagcagtggcacggtcacagcggcaaagacggtcttcgcatcatctgagcatgagctcacccaccttgagagccaaccggtcttccttcccacccctgcaccaacaggaagactagcaccactcttcttcaccattccagctgcaccagaggcaatgacccctcttccaatcccagctgaacctgaggcgatgctagcactatcaaccaatgcttgtatgccgaccttggaaggagcagcaacagcaggtgacggcactggacggggcgatggagcggctgcgcgtggtgcaggacgaggcgatggtgcagctgtacgcggtgtaggtgcagccgttgcacctgctgggcgtcctgagctgcgcgacgtcgttgcagcagcgactatgtcgctacaggggagccacttgctcgcctgcaggaacgggaggagcgacgcagggttgagcccggttgatattgacggcgacgcaacaagggaggatgcaccagcaatgccgccagtcgatcccatcccagacgcgaacaccgacagcagccccacggccagcgacgctggggggtcatccaccggcggcggcgccttcgcggaacacgatcgcggcagcaacagtgagtagccatctcctcttgctgcaacggcaggggacagagccttgggcccgggcttcgggtggttctgatcctcggcgtcatggtgggggtcgacgtggcgggaggaggcgaagaggcagaaagggcgggatagcgcgtcctggaggaagcggcaccctggaccgggcgcggcgccagcgcccgcagccgcggcggcggtgcagcgcaggccgaaggacgcggccaggttctgcgccaggtagcccgaataggatacggtgatgcggatggccatcgcggcggcgctccgcgcacgcgcgaaggcggaggggggtacccctgggtccttggaccttactgaagatggcggcccattccgatcgggtagccgtcggcgggaaggagcgcggggtatcggagatctagggttccgcgggtgcgcggccggaggaggctacagggatcctcggagtagggatataagatcgagcagcgggggtggtggtgaccggcgaggtgcgacctcgccggtg

SEQ ID NO: 129777 - DNA, 177 bp, Zea Mays
atgcagggaaaggagaaattggcgtgcaccacgtggtattgccacaatgtattatcaggatgcaacagctgtgtgctgcaccatgtcatgctgatatattgtatctgttatcctagatggtggccagtatcggagcacagatctcccgaggatgttcttaactggaagtggacccct

SEQ ID NO: 129778 - DNA, 1675 bp, Zea Mays
gtcagcctgtgcttacggcgtataccacgagcgcaccaaccaccaccaccatcctcatccttcgcgaggagatcccttcgtcggggaagagaacccgccaggagacctacccttcctcaatcctccgaccctccatggcctcctcctccctggccctccctccaatctctctcctcctcgcgctgctgctcctctccgccccctcgccgtccgcctgcgcctcgctttccttcctcaccgcctcctccaacggctccgcctccacctccgccgacccggagctggaggacctggccccggagcccaccttcctcgaggaggtcatcgacgccgtctcggagaagtacgactgggatccggacgccgaggtcagggtctggccgctcgacgccggcgccgtccgcgtcggctccgtgcagcggtacgagttccgggcgcgggcgggcgggtcggcggcgctggcgcggttctccgacgaggccgtggagtggagactcccctccgcgccggccgtcgaggaggtggatgggccggacggggtcgacgtcgtccccgccgaaggcgcgttcgggttcgacaccggcgtcagggacgtggagctggttgggccggtggagctcaagcttgctggcaaccaggacggtagcctcgtcgagctccagttaccttcggggaatgccacatacacaaggcttaagaggatatttgttgcggatggcattgcattaaaggtcattggtgcacagaaagtttctgtaacccaccctcacagtataggtcttctatcaaatggaagtttgttggctagtaacaacgacctaagccaaatatggcctttgagctactcaacctgtgccccattacttcaagtgggtattgtaggatcagtcgtaattgttgtgcatcaaacaagtgtatctggaggccatgtgaagactttcttaaggtcacatgacactatagagttattgtcagacaagtataaagtccatatatcaaatcggttgatctcagaatttttgttctcctcaattagcccaagactgataaagcttgaaaagatcttgaagacttggtttagcaaaagaaaccaggagaatagttcagtgcacttcattgaagctaaagtgacatcgatacctctggtgaaattccgtttggagtttgaaagggatgtcactgaggatgatcccatctgggaagatgttccagagtggaaaacgagacccatggtccagcgagttccagttgacattatagctagagtggaagatgacgataggctgaaggctatttcggtgaagaaggttaggaggcaatttccagtagtggacaccactacttggggcagcctgacttcaaatatttccttcacaaagtttctgtcattcattttgccaccagaaccgctgtcgctggatgtaaagtggtaatagattctgctgtcatctacttctcgtagggctgataggaaattacacatatacatcgatttcatgtatacttaggctggaagtgtgcctgaacgtgaaatgggttgtaacataatgttcaaattttgtattgcatctagcaatgcaggggtacaatcttacattgttcatactgccttcttgcaatcatgcaatgactatctttagcaccttgcatcttctgagtacatatgccttcttgt

SEQ ID NO: 129779 - DNA, 774 bp, Zea Mays
accaccaccaccatcctcatccttcgcgaggagatcccttcgtcggggaagagaacccgccaggagacctacccttcctcaatcctccgaccctccatggcctcctcctccctggccctccctccaatctctctcctcctcgcgctgctgctcctctccgccccctcgccgtccgcctgcgcctcgctttccttcctcaccgcctcctccaacggctccgcctccacctccgccgacccggagctggaggacctggccccggagcccaccttcctcgaggaggtcatcgacgccgtctcggagaagtacgactgggatccggacgccgaggtcagggtctggccgctcgacgccggcgccgtccgcgtcggctccgtgcagcggtacgagttccgggcgcgggcgggcgggtcggcggcgctggcgcggttctccgacgaggccgtggagtggagactcccctccgcgccggccgtcgaggaggtggatgggccggacggggtcgacgtcgtccccgccgaaggcgcgttcgggttcgacaccggcgtcagggacgtggagctggttgggccggtggagctcaagcttgctggcaaccaggacggtagcctcgtcgagctccagttaccttcggtgagtggattgactttgacctgtcgctgttcccgattttgcatccgatcccgatcggttgcttgcatgttagttttcgagtaaaggttggtgtaaaagctgtgttagctcaaagctttgatggttatggttcaacagctg

SEQ ID NO: 129780 - DNA, 198 bp, Zea Mays
agaagaaaatcgaggtcatgagtggagtttcgaaaactccgaaaataccacagttttgggtaaaccatggtatttaaaactgagttttgactatacaaaccaaacaccttttgagctccaatactatagtatcaccaaatatcatagtattgtttcaaaactgcaaaaatactacgattccaaacagggcctaagttg

SEQ ID NO: 129781 - DNA, 1923 bp, Zea Mays
atggccgtctctctcgcccccgctctcctctttgctatctgcacctacgcgacatggaaggagatcgccttcgctgcgccaaatcgagaaatccgcgtccgctatggaagggatcggcatcagaggacgctcgccgttgtctccggcgcggtgcttgccggtggagctctggcgtacgcccgctcgagccagagccgccggcggaggaggcgcccggaggcgagtcgcagcagcggagccggtgcattggccgccaatggggatggtttcagccggaacggtgccggcggtggattggctgcagcggaccagaggaggagtggcctcaaatctctgcatttcctcgctgctatcctactcaagaagatagggcccagtggcacgcgctaccttctatgcttggtattaacattgatagtgctcgtgttcaccgctgccttcatcatctcctcgccagcgccgctcgcgatgacccccctccaacgattccggggtcttcgcgacccaagcgtgacgctctacgccgacgatggaggggagctacacaccacctcctccgtccgggcgttgttccacctctttcttcccccctgtaggaatcacgggactgaaagaaaggacaaaggttctgatgaggttgtactcaaggccatgggaagggctatcaataaaattgtcatggttgtagaattgatcaaggtactcctgaagactctggtccttgctaatattactggtgacttgattgttgattgtgtgagaatgtcggcaccaaatggatgggggcaaaatctgttggtaggaatgcattcgatgaacaacgctcttgctcggcgaggcagccctgaacagcttgatttctacaggacgaggctgggatctcaagggcttatgtcgtgcttcatagatggagagccaggacatcatggcgtgcatatggctggaccaaatcacctagctgacaaaaggtcgaacaagtactccatcattttcaataacagagagaaagaatctcttgtggtttttattgatagcgaggatgagatcaccttttcattacatctcaatgaaggttcagcgaataaatttgctcatgttgatgccataaatacgccccttgcacttcagccatgttgttttctgaaggagagacttctgatgcagcaagagatgtctgacacaacaaggcaacatcaaacagtgagggaaaacagaggttgtttttttaatgccactgatgagaaggagttgctgaatgcaattttcaagcctgctgttgagtatcctcacgcggacaatttagctggcaaggagacaaggcagcgattgagtaccaggatgagttacaagatcctggaagaaaacccgtggcagctctacactacaataagggtgataaagatgtctcgcccaatggaagacatgatcaaggttcacgatgttccccatcctctgctcaaaagtcttggcgtgaagaatctcccagctgtaattggccgaaccgtgaatggtgaggagctccttctgaaggatggcatttcggtgaaagatctcagatctggtgtcaaggaattgaagacactgctagatagtattgagaagaagaataagaagttattatcgaatctagctaataagaaaccttccggtcaatgggaagaaatcaagaagattcctctgctcacagcttccaattttgaggaaatcaagaagactccagtatgcatcattggtgttttcgggtcaaacaaagccaaggggcagcttgaagcagtcctgtctgagatatctaagaagactctgataagggggcagaactataattccagaaatgttgtctcctatgctttgctggataaggacaaacaatctgcattcctgtcatcgtttgacaagtctggatacagaaaaatcaatggataa

SEQ ID NO: 129782 - DNA, 1586 bp, Zea Mays
agatcccctctggctctcagtcacccacccccaccccaccccaccggcaccctcaccctcaggcctccgcctctttctcagcttctctccggttccttccttccggtcgccgattcttctacgcgaaagattcctggctgcctctcgtctctcgtctcgtttctcgcgtgcatggggctggacgtcggggagatcgggatgggcctggatctggggctggacctcaggctgttcgccgcgcggagcgccggagggatggccaagggcgctgcgccggcggggatccagtcctgcatcaggagcctcgaggtggagcgcaggaagatcgaggtgttcaggcgcgagctcccgctctgccttcgcctcctcgccgacgtgatcgacgagttgaaggaggaggctgccaagagaggagagtacgacgacggggcggcgacggtggacgacggcgacaaacggaaatggatgagcacagctcagttgtgggtggacagcgacgccaaatcggacgagtctgacaaagagcaacagagtgaaatcacgtcgccgccggagcccaagttgttgggtggtggcgcacccacgccgataagggcggccgtttcggcggtggcggtgccacaacccctaccgccgccgttgttcagaagagaagacagctccgccagctctggcctgtcgttggtatcgttgtcgccggcaaccaaggcggcggtgccgatttctcctccggtggtggctgccagcggtaccggtaccgccagcgccagattttgtggcaccaccatgccaccatgtggctccgaggtcaacaacatgcactcgcaggctcagcagcaacagcaagcaagcaggaaggcaaggcggtgctggtcaccggagcttcaccggcggttcgttgccgctttgcacgaactgggtggccctcaagtggctactccgaaacagatcagggaggtgatgcaagtggacgggcttacaaacgatgaagtgaaaagccatctccagaagtaccggttgcacaacagaagatcctcccccggcgcggcggcggctccggtgagccagtcgatcatgctggtggatggcgtctgggctgctcaggagcaaagcagcggctcgcagtccgggtctcggcagggcccgctccagttctccagggcaggtatggccgtcggtggcggcgacgacagcagcagcagcgacgacgacgaagacgacgacaagtcggaggatggctacagcctgaaatgcgtgtgaggctgaggcaggctgcgtttgcggaagatcggatgagagtgtagagagatagcgttgtcgcggcttgagcatgcatcggtggattcttgagtctgtccgagagagtggttgtagtgcaggcaggcatgtatacagggagattaggcgcgcgcggcccgtgtgcgcccaagagatgaactgatcatgcggcgtttggaaagctgataggcgttttgtttgagtctttgctgacttctgttaacttccgggcagatcacaaaattttcgccctgagaataacttattaataataatattactgcggcggctgctgttattttatatac

SEQ ID NO: 129783 - DNA, 1636 bp, Zea Mays
cgctcgctcgccgccgcccgtctatctatctatctatatatgccagggcgggcgcagatcccctctggctctcagtcacccacccccaccccaccccaccggcaccctcaccctcaggcctccgcctctttctcagcttctctccggttccttccttccggtcgccgattcttctacgcgaaagattcctggctgcctctcgtctctcgtctcgtttctcgcgtgcatggggctggacgtcggggagatcgggatgggcctggatctggggctggacctcaggctgttcgccgcgcggagcgccggagggatggccaagggcgctgcgccggcggggatccagtcctgcatcaggagcctcgaggtggagcgcaggaagatcgaggtgttcaggcgcgagctcccgctctgccttcgcctcctcgccgacgtgatcgacgagttgaaggaggaggctgccaagagaggagagtacgacgacggggcggcgacggtggacgacggcgacaaacggaaatggatgagcacagctcagttgtgggtggacagcgacgccaaatcggacgagtctgacaaagagcaacagagtgaaatcacgtcgccgccggagcccaagttgttgggtggtggcgcacccacgccgataagggcggccgtttcggcggtggcggtgccacaacccctaccgccgccgttgttcagaagagaagacagctccgccagctctggcctgtcgttggtatcgttgtcgccggcaaccaaggcggcggtgccgatttctcctccggtggtggctgccagcggtaccggtaccgccagcgccagattttgtggcaccaccatgccaccatgtggctccgaggtcaacaacatgcactcgcaggctcagcagcaacagcaagcaagcaggaaggcaaggcggtgctggtcaccggagcttcaccggcggttcgttgccgctttgcacgaactgggtggccctcaagtggctactccgaaacagatcagggaggtgatgcaagtggacgggcttacaaacgatgaagtgaaaagccatctccagtaccggttgcacaacagaagatcctcccccggcgcggcggcggctccggtgagccagtcgatcatgctggtggatggcgtctgggctgctcaggagcaaagcagcggctcgcagtccgggtctcggcagggcccgctccagttctccagggcaggtatggccgtcggtggcggcgacgacagcagcagcagcgacgacgacgaagacgacgacaagtcggaggatggctacagcctgaaatgcgtgtgaggctgaggcaggctgcgtttgcggaagatcggatgagagtgtagagagatagcgttgtcgcggcttgagcatgcatcggtggattcttgagtctgtccgagagagtggttgtagtgcaggcaggcatgtatacagggagattaggcgcgcgcggcccgtgtgcgcccaagagatgaactgatcatgcggcgtttggaaagctgataggcgttttgtttgagtctttgctgacttctgttaacttccgggcagatcacaaaattttcgccctgagaataacttattaataataatattactgcggcggctgctgttattttatat

SEQ ID NO: 129784 - DNA, 1268 bp, Zea Mays
ccaggcaaaaccccggcacccgtgcgccagccagccacagactccaaaccgaccgagcagcgatggtgtcggacttggagctggtggagcggctgcaggaggtgctgcggtcgtcggacctcaacaccacgaccaccgctgccttgcgccgccgcctcgaggaggacttcggcgcagacctctcccacaagaaggctttcatccgggagcaggttgacctcttcctcgccgaggtcgccgccaaggccgagccagaggagcccaaggaggaggaggagctcgaggacgcgccggtgcctaaagcggaggaggcggaggagggcgagggggtggaggaggagggcgagggggaggaggggggagaggaggaagaggaggaggaagaggaggaggtggatagcagcagcgcccggaagaagcagcggggtaatgatggcaagaaaaggggtggtggctttacaaaactatgcagtctttccccggcacttcaagagtttgtcggcgcctctgagttagccaggacagaggttgtcaagaagctttgggcatatattcgagaaaataatctgcaagaccaaaacaataggaggaagattttgcctgatgagagattgaagaagatcttcaatgtcaattccattgatatgttccaaatgaataaagctttgaccaagcatatctggccattgaattctgagggtcctgtctctcctgacagatcaacacccaaagagaagccacaaaagaaagacaggaatgaaggaaagaagcaaaagggtggctcttcaggagctggatctggtcttcttgtgccccttcaactttcggatgatttaatgaaatttatcggcactggtgagagcatgttatcacgatcggatgttgtgaagagaatgtgggactacataaaagagaacaacctgcaggatccttctgaccggaggaaaataatctgcgatgagaaactgaaggacctattaggagttgaaacgttcaccggctttactgtttcaaagctgcttgccccccattttaccaagacgaagtagcaacccgccatccagatcttctaaacccccaaaaggctgggtgatcatgttttgcagaatgtgtaatcatggaacagttaggagctatgtgagtggtgtgaaatttttttacatgtgggagtcggtggcactttccgaatgttaccagtaaagtaggttcctcgatgtctaatgaatctatcaactgtttactaaccgtcacgccctccgaaaactgtt

SEQ ID NO: 129785 - DNA, 97 bp, Zea Mays
gatctgtgtgtctgattccggcttcatagaagcccagaatatcaatatttttatgactgcgcgaccaaagagttcagaagttgttcgctggctttaa

SEQ ID NO: 129786 - DNA, 152 bp, Zea Mays
gatccaacggagagcgaggtggtgcggcgttgtgcacagcgcatgcagtagcagatatgaaaggaagatttgtgccaacattttacaattatccaggagaaaaagaaagaaaggagagatacaactcccctaagcctgttcatttggcttta

SEQ ID NO: 129787 - DNA, 900 bp, Zea Mays
aggctctcatatctagcattctagcaccagcagctaccaggagtagtggtttctcttgcgtccgcctcagggcttgcgtccccccgatctgtgtcgcggaggcggcgagcggcttggccggccgggagagagtgagatcgagctgcgagggcgacactcggacggaggtcggtcgagaagaggccaacgatcgacgagaggagaaggagatcacgcagccgcctgcaagaaattcagcagcaggagaggatcgatcgaggaagatgtgcatggacggcgccgtgccggtgaagagggtctggctcggcatcgccgcgcgcctcggcctccgccgaaagaccggcctgaggaagctgaggaaggaggtgcgcacgtgcgagtaccgcgacgtgcacgtcatgtgggagatgctgcgggcgacggacgggccggcggtgccgctggcggagaaggaggccgcggcggcggcggccgtcgcggccgccgcaggcgccaggaagaggaggaacgcgtggaggcggttcgtctactactgctgcgcgttctgagcgacgcgcgtcgatcgatcgatcagcctggctgatgaacccaacggccggcgtcctagctttgtgctggtgatcgtcctaggctagctagctcctcaaagatccaaggtcgcgagctttgtgaacccgtgaccaaaatctcgaacgtgatcgggccatcgggggcgtcatcaggggaacgtgagctcgttcgagactcgagactatcatcgtctcgtcccccggcgaagatcgagagtatgagtacataggaagagtttggagtgggtgcggagagaaagggatgatcgagatgtacaaaaaataacttcgaaccaaagaagacttttgctttgattcgtgccagtgctta

SEQ ID NO: 129788 - DNA, 606 bp, Zea Mays
ggagaagtaccgaaccgggctaaacccgcaggagaaggtgaagctagagaaggagcccatggggcagttcgtggatgacgacatcagggacctgccaagatctccatggaggagatcgacgccgccaagcccaccaaggacaacgtcgacgtccgcctcaagtggctcggcctcttccaccgctacaagcaccagtgtacacccactgattctacaccccctgcaatggttgttgttgctgttggtaggagcgaccccgcgagcgtgacacagacaaagcagccttcggtgccagttcagaccacttatctggtctcaaggttcttcatggccttgactctcaaagatcagagtattcttgtcaatggggatatcaatgaaggcttgcttcgcctttgtcacaagcttcatcgtttaaggaaagaatatgcatacacatttgaaagcacaagcttatcttatcagtgttctgaggttagcaggatcttgcaaggttataaggttgttcatgacataaagaggtttgttggtcataacttatactatatgaagattatgggagtcagccctaaattcacattttctgcaatctacagattcatgtaa

SEQ ID NO: 129789 - DNA, 649 bp, Zea Mays
ggagaagtaccgaaccgggctaaacccgcaggagaaggtgaagctagagaaggagcccatggggcagttcgtggatgacgacatcagggacctgccaagatctccatggaggagatcgacgccgccaagcccaccaaggacaacgtcgacgtccgcctcaagtggctcggcctcttccaccgctacaagcaccagtgtacacccactgattctacaccccctgcaatggttgttgttgctgttggtaggagcgaccccgcgagcgtgacacagacaaagcagccttcggtgccaggttcgatttggtttctgcaaagtttatcactcctacattttcacaattagtttctacaaattatatcactccatttcactcctatgaaattactgtgacttaatttcaatcgaggtcattcttcttgctccttcgctttgcttagcagtaaagacaataacttcctttaccttgctcaatagtttgccttttaatttgaacaaaaatctaatcacttgacattgcatgggaggtaagctcctgtttttcacaaactttatcggtggacagttcatagtcctaacagacccattagtccgatagaacagttagcattaggtaattattttggcattggcaattttgatctactcc

SEQ ID NO: 129790 - DNA, 94 bp, Zea Mays
ggttgcacatatgttccaagcgctaggactgaaaggatgccacttgctattttgctgaattataacctatgcttaatatagatgattcttcatt

SEQ ID NO: 129791 - DNA, 1542 bp, Zea Mays
cgcgccccgaaaccgtcgcccccggcctcccctcgcctcactcgattctggctggccacaaactccgccccctgcccctaccccgattatgccgccgtcgtccgatcccacccgcaaacgctgctccccgcctcgaggctcgtcggaacggacgcctggatgtcgcggctgcaacccaccgccgcgcagggaggctccgccaccagcaactcagaggatgcgcggaggccggagggcatgggagatccgccacctcctcctcggcccacgacaaaaatggcgtgggagatccgccacctcacctcctcccattcccgcgcccgcgcccgcgcctgatatggaaggtccgccgaagggactcggacgtcgaggccatggctgagccgcaccacttctccccctgcctcgcgcgcggcggccgagatggtgatggctgggttgttcgggatggtggtcctacctgccctccctgctatcctcgccccaaatcgacgagaatcatgcagcccaaatctaaggtggaggcgcctgcactgtcgatggaggtgtcgagtctgcgatggtgtctgtagatgggaaggcatggtgtgcagcggcagcggccaggtggtgtcgctgagcctgccctcctacaggctcactggcacgctctccacggccatcgggggacctctcgttcctgcgtatgctgaacctgagctccaatcggttccgcggggaggtcccagcgaccatcgttcgccttgcgcatctgcaggcgctagacctgagctacaacgccttcactgaattccagagctgcgattcccgaggccatggagcagcagaaaatatcaattgccaaaagcagccattacaatagtactcattttagggacttcatttcttgcagctgccaatccaattgcaggatgctatgactctcttaagtgatcatgaacttacacattgaaatactggtgggcctcgagaggccaggaggtggagaggagttcaacaagtactacatcatgtctgctctcctatccgtggattggtgagttagtttggatgtttgcactgggtattgttatccatcaaccccaaaccaattgcagttccctttagtcatgtcatgtttaatttccctataaatttcgtactgcatttcatatatatatgtatcaaatatggacccctgaaactgaagtaggcattccttttcaattcgtgttgcttcttcatttcctttatcagtaagggcatgtccagatccattagcactaaaatttagcagctaaaattagtacgagtgggtctaaacggacctgctaattatttgttgaagggcgtgaagggctgatattagtttcattagcagatttggagttgctaatatgtgataataattcgtatgcatcttaaactcactatctaattacctattagcaggtgagtgcaaacagcttcctgctaaaagttagcacggaatcggttgatacttattgatgtacgtgttagttcataattattgtaccatgtttggttggaatattttttaaa

SEQ ID NO: 129792 - DNA, 1501 bp, Zea Mays
gccatgacatggctctctgctgtgtcacaaatgtcaacccttcacgctgttccgtgccggtgctcgtcggatccttgtacctcacgctcgacacttcatcactccagaaattcacgtcacatcctggggtgtgtacgtgtacgtgtacaccccatgatatatacccaccagtttcgcacacgtagtagatatagacacagatagatagctagaacacgagcagaggatggctaggcctaggccgtcggtcgtcgtcctcgcggtggccgtcgccgtggcgtccctcgcgcagcccggcgcggccgacctgaagcaggactactacgcgagcacctgccccaacgtggaggccatcgtgcgcggcgtggtgcagcagcgactgcaggccaccatccgggccgtcggctccaccgtccgcctcttcttccacgactgcttcgtcgagggttgcgacggctcggtgctgatcgaatccacgcccggcaaccaggccgagaaggacgcctccgacaacaagtccctcgcgtccgaaggcttcgacaccgtgcggagcgccaaggccgccgtcgaggccgcctgcccggacacggtctcctgcgccgacgtgctcgccatcgccgctcgggacgccatctccatgagtggcgggcctttcttcccagtggagctgggcaggctggacggcctgatctccaccgccagcagcgtgccaggccagcttcccgaggccaaccagaccatggaccaactgctggcagtcttcaaggcacacgggctcaacatgtccgacctcgtcgcgctctcagcggcgcacagcgtggggctggcgcactgcagcaagttcgcgagccggctgtacagctaccagctgccggggcagccgacggacccgacgctgaaccccaagtacgcgcggttcctggagagcaggtgccccgacggcgggcccgacaacctggtgctcatggaccaggccacgccggcgcagttcgacaaccagtactaccgcaacctccaggacggcggcgggctgctgggctccgaccagctgctctacaccgacaaccggacgcgccccatggtggactcgctggccaacagcaccgccgccttctaccgcgccttagccgacgccgtcgtccggctcggccgcgtcggggtcaagtccggcaggcggggcaacgtccgcaagcagtgcgacgtgttcaactgacagggaaatcgtgttcaacctccggaagattcatttgatttgggtgttttgcttgtaatgcatctgttctctttgattcgttgcatagcacgcggttgattcttaaacttgtgtgtggtaattattcagcaattagttgttctacaaagtggtgaataatggttctgcctgctttgtcatagagtaaaaccccaaatagcagccaaaattagatcatacatagatacagttgatttcactgtaatttgaatactcacactcgtacgtatccacattcaataaaaaata

SEQ ID NO: 129793 - DNA, 2035 bp, Zea Mays
ggggcaccggcgcaccgcacatcggtgcctaggtcactcgggcccactccacagaactacggaagaagaagaagcagtcggcagcaaactgaatggcgcttcgcgctgtggagctccggagattccttctccggcgcatcggcggcggcgaggcggccctgcctcctctcgcgtggcgcggccggccagcgagcacatccgccccggcggacgacgagctcgcggggaagagcgcctacgaggtcctcggggttggggagaccagttccagcgccgagatcaaggcttccttccatcgcctagccaaagagacccacccagacgtcgccgcggctgctggttcccgacggttccttcagatcctcgccgcctacgagatcctatcagattcacagagaagggctcactatgatagctacctgcgatcgcagaggcgggttgtggggaaacatcccaggccatctcagttcgtgtacccaagtggttcaggctcaggcattgtggtacctcgagagagcaatgttgttgaatggctgaaatggtacaggcttaccattgacgacatagttaccaagaagagggttgccactggctctggttattttgaaaggctcgaaagcgagctgtacacggctatccatgctgcatactatggccctgatgtcgactccatggatgtccttcctgattgctttgaagccgaggagagatctgcatatgaaacctctgagctattacaccttgtttcaggccgtgatctttttggtattgttactgtaactgatagtgtcaaagagctgtcagatgtttgtcgtgaaaaactggtaccctctggttgtagatcttcggaatttactcatgttgtttcaagaaatgcgaataagaattcaatatctatgaatcctgttgatatgaacaagcaagaaatgcgatatgaaaatgatgttccttcatcagattccttcaaggacattgagttgcaaatatgtgggaaattagttgctactgcgactaggagccccaactgcgattgcattgacaaatcggatttggaagaagatcacattcatgtgtatcttgttccaaatgcaaatatatctgatttaacacatgggaaacttctcctcggcacaattactgggttagccaccactggtgaggaaggatcttgctgtgtctacgatggtcacaacataaagacacacattattatgaagcacaggacattgatggttaaacacatgcactggtatcaggttggagatacagtttcaccctgtgagtgtcgatgtagtagggctcgattgccacctagcaggtattggctttttgagcctcgttgttacatgcatgacactggtggatggtatatcgaaacttatgggagagacaagaaagggaggacgattccgtctcaaagacagtgggatggttccaatgaacattctgaaaagagattgcatcctgcaatgtatcttgctgctctggcttacagatctttggatcttgaagatgctggaagaagacgatggaatgtgactagcttgctgcaatggtccttatctcatcttcgtcagctgttcaaaaaaagttgctaatggagagaaaggggattgacacgagaacaccatgaaaatagttgtttggggtctcgctttaacaattagactgaacctgtggtgtcacaccctttgctggttctgttcagctgctttttagtatgctactgtatagttagaaactaatgtgctttcttgatatgatagctgataaggacatctttctgaggctgttgactaccctgcccgtttgatatacaacatgatagtaaaggtttgcagagcgtgcgataaatgatctgacactgatggtaagatagccagaatcctacatgacaatgtcttctacatcgttttatgcatatttcttagctacaagtgacatgtaacttaaaaggatggtgccatggtggtatccaccattttgcacatctgctgtatttttataagaatttaaatccaaagccgactgattg

SEQ ID NO: 129794 - DNA, 1765 bp, Zea Mays
ggggcaccggcgcaccgcacatcggtgcctaggtcactcgggcccactccacagaactacggaagaagaagaagcagtcggcagcaaactgaatggcgcttcgcgctgtggagctccggagattccttctccggcgcatcggcggcggcgaggcggccctgcctcctctcgcgtggcgcggccggccagcgagcacatccgccccggcggacgacgagctcgcggggaagagcgcctacgaggtcctcggggttggggagaccagttccagcgccgagatcaaggcttccttccatcgcctagccaaagagacccacccagacgtcgccgcggctgctggttcccgacggttccttcagatcctcgccgcctacgagatcctatcagattcacagagaagggctcactatgatagctacctgcgatcgcagaggcgggttgtggggaaacatcccaggccatctcagttcgtgtacccaagtggttcaggctcaggcattgtggtacctcgagagagcaatgttgttgaatggctgaaatggtacaggcttaccattgacgacatagttaccaagaagagggttgccactggctctggttattttgaaaggctcgaaagcgagctgtacacggctatccatgctgcatactatggccctgatgtcgactccatggatgtccttcctgattgctttgaagccgaggagagatctgcatatgaaacctctgagctattacaccttgtttcaggccgtgatctttttggtattgttactgtaactgatagtgtcaaagagctgtcagatgtttgtcgtgaaaaactggtaccctctggttgtagatcttcggaatttactcatgttgtttcaagaaatgcgaataagaattcaatatctatgaatcctgttgatatgaacaagcaagaaatgcgatatgaaaatgatgttccttcatcagattccttcaaggacattgagttgcaaatatgtgggaaattagttgctactgcgactaggagccccaactgcgattgcattgacaaatcggatttggaagaagatcacattcatgtgtatcttgttccaaatgcaaatatatctgatttaacacatgggaaacttctcctcggcacaattactgggttagccaccactggtgaggaaggatcttgctgtgtctacgatggtcacaacataaagacacacattattatgaagcacaggacattgatggtattggctttttgagcctcgttgttacatgcatgacactggtggatggtatatcgaaacttatgggagagacaagaaagggaggacgattccgtctcaaagacagtgggatggttccaatgaacattctgaaaagagattgcatcctgcaatgtatcttgctgctctggcttacagatctttggatcttgaagatgctggaagaagacgatggaatgtgactagcttgctgcaatggtccttatctcatcttcgtcagctgttcaaaaaaagttgctaatggagagaaaggggattgacacgagaacaccatgaaaatagttgtttggggtctcgctttaacaattagactgaacctgtggtgtcacaccctttgctggttctgttcagctgctttttagtatgctactgtatagttagaaactaatgtgctttcttgatatgatagctgataaggacatctttctgaggctgttgactaccctgcccgtttgatatacaacatgatagtaaaggtttgcagagcgtgcgat

SEQ ID NO: 129795 - DNA, 2008 bp, Zea Mays
caaaaccccacttcatccggcactccacgccctaaaaccctaatcgacaattcccgttgtcattcgtcagcgcgccccctcaaccccgtctcagcctagcgcgccgccacaatgcaggccgccgccgccgtcgtcgtccgccacccgcgcctattcccgccgtccccgggccgctccgcgcagcaccggcgcgcacccagcaccgtgcgcatggcgctgcgcgaggacgggccctcggtggccatcgtgggcgccacgggcgcggtgggccaggagttcctccgcgtcatcacggaccgggacttcccctaccgcggcctccgcctcctcgccagcgagcggtccgcggggaagcgcctcgcctttgaggaccgcgagtacaccgtccaggacctcgcggcccctggggcgttcgacggcgtcgacatcgcgctattcagcgccggcgggagcgtcagccggaagtatgggcccgcggccgtcgccagcggcgccgtagttgtcgacaacagctccgcgttccggatggagcccgaggtgccgctcgtcatccccgaggtcaaccccgaggccatggcgaacgtccgcctcgggcagggggcgattgtggcaaatccgaattgctcgaccatcatctgcctcatggctgccacgccgctccatcgccacgctaaggtgttaaggatggttgtcagcacataccaagcagcaagtggtgcgggtgctgcggcaatggaagaactcaagctgcagactcaggaggtcttggaagggaaggcgccaacatgcaacattttcaaacagcagtatgcttttaatatattctcacacaatgcaccagttcttgagaatgggtataacgaggaggaaatgaaaatggtgaaggagaccaggaaaatttggaatgacaaggaggtgaaagtaactgcgacttgcatacgggttcctgtgatgcgcgcacatgctgaaagtgtcaatctacagtttgaaaagccacttgatgaggatactgcaagagaaattttgagagcagctcctggtgttaccattattgatgaccgagcttccaatcgctttcctacacctctggaggtatcagacaaagatgacgtagcagtgggtaggattcgtcaggacttgtccctggatggtaaccgagggttggacatatttgtgtgtggtgatcagatacgtaaaggcgccgcactcaatgccgttcagattgctgaaatgctgctgaagtgaatgtgacctaaccctcttgtccctccctccctgtccctaattgctctgatcaaatgctggactgtactctgattagtttgtcctcaattttggtcgcctgttctgtattctgccgtgctagtgcaataattgtgttatgggcttgagttatctgctgtacgcataagtgggctcctaaactgggaaataatgggccgtccttattcagcattccggtttatatcttgttcagattcgtctaacagcccagcagtgccgggttctgtggatcacagggcccaaagtgtcctacgggatttacactttcatgtgcaagaatagggtctgattgtaacctgacccagaaggtactgggaagttctcttgagcaggaagcatctgttgcaggtctgaaagaaactgtgcaacgataagacattagagttgagaggaaagagggcgggttagcccgtaaatttctgtgatcgcatgatgtgttgtttgtcagtatatgtaatcctttgtttcaatggatttagttgttttggtggtcttatttaccgttttgcactgtaggcttcactttgcagggtggagtttgaatatagagattatgatggataagtgtaagctgttagaagtagtctaagatagatacatttgacacttggtagttcaccttttcttcgttttttactgcaaaaatatctgtcagaggagtgcggccaagagggtgaatgcctgtttgtaaattgtaatcacctgtcacgaggttaatcggccc

SEQ ID NO: 129796 - DNA, 2109 bp, Zea Mays
tcgcagcatgtgttggtcttcgccagtccaggaaggagccgcgatggagcgatggcgatctccagacgcaatcagacagtgatctcggagcttaaaaaaaacgcatccacgcaccacatggagatcctataaacagcactaggcatgaaccatcctctccgaccggacgtgcgtcatcagttgcgtatgcacaagtgaataggtataataaactaatctcggactgtgtatatgtagcaaactagtaacgaaggaagaatggcgccacacactgccaccgccactgtcatacagatacagcacactagctaacaccaacttgcacatcacagccgtcatggataaggcctatgtcgccgccctctccgtcgccttcctcttcttggtccactacctcgtgggccgcgccgccgccggcggcggcaaggggaggaagcggctgccaccgagccctctggccatcccgttcctcggccacctccacctcgtcaagacgccgttccactcggcgctgggccgcctcgcggagcgccacggcccggtgttctccctgcgcatggggtgccgccgcgcggtggtcgtgtcctcgccggagtgcgccagggcgtgcttcacggagcacgacatgagcttcgccaaccgcccgcgcttcgagtccatgcgcctcgtgtccttcgacggcgccatgctctcggtgtccagctacgggccctactggcgcaccctccgccgcgtcgccgccgtgcagctcctctccgcgcaccgcgtcgcctgcatgtcccccgtcatctgcgccgaggtgcgcgccatggtgcgccggatggctcgcctagccgcgggcggcgccgcgcgcgtccagctcaggcggcgcctgttcgagctctccctcggcgtgctcatggagaccatcgcgcggaccaagacctcccgctccgaggcttgcgccgccgacactgacgtgtcgcccgaggcgagcgagttgacgcggatctccgaagagatcatgccgtacctcggcacggccaacctgtgggactacctgccgttcctgcggtggttcgacgtgttcggcgtgaggaacaagctcatggccgccgtgaggtggagggacgcgttcctgcggcggctcatcgacgcagagcgccggaggatggacggtgacggcgacggcgagaagaagagcatgatcgccgtgctgctctctttgcagaagtcggagccggagctgtacacggataccatgatcatggcgctgtgcggggacttgtttggcgccgggacggagaccacatcggtcacgacagaatgggccatgtcgcttcttctgagccacccggaggctctgaagaaggcacaggcagagatcgacgcggtggtgggcaactcccgccgcctgatcaccgccgacgacgtgccccgcctcggctacctgcactgcgtcatcaacgagaccctgcgcatgtacccggccgctccgctgctgctgccgcacgagtcggcggcggactgcaaggtcggcggctacgacgtgccccgcgggacgctgctgatcgtgaacgcgtacgccatccacagggaccccgcggtgtgggaggacccgggcagcttcttgccggagcggttcgaggacggcaaggccgaggggcggctgctgatgccgttcgggatggggcggcgcaagtgccccggcgagacgctcgcgctgcggaccgtcgggctggtgcttgccacgctgctccagtgcttcgactgggacacggttgatggagctgaggttgacatgacggagagcggcgggctgaccatgccccgggccgtcccgttggaggccatgtgcaagcctcgtgcagctatgtgcgatgttcttcgggagctctaatattctggcacatcctaggttctcgctctataggtgaaagtttcatatgtagtttcgtagaagtatgcatgtctgatggtctgcgctgaactaagtacattatcatctagtacaaaatatcgtacatatacccgcatatatgtaaacaactagtactcaattagtactagtcgttgtttcccagcgtgctttagcaaatttaatcttcggcgaacgagaaatttgctatt

SEQ ID NO: 129797 - DNA, 1543 bp, Zea Mays
gaagatataaaaatggcccctttgcatcagacctgagccgatcttcgatccgtctctctcccgtctcctgcagcggctcccaaattaaaacccttgaaaagtggaggcgtgttcaagtgcgtatgaatccgaacacagagagacagacagagctcccgcagaaggctacaaaggcgcgaaacttcgttgacccaaaacagagaaccccaaccgccgcggcagtagtgatcatggtgaaggaagaggaggaggtcatggcagaggcagcaggaggtggacgcggcggctacatggacctgctcggtctcggagaagaggactacctgctgtgcctgtccccttcctcctcctacttcactcccagtgtcgtctccgtcaccggcgccacgatcaccaccaccaccaccactcccgccgcgccgtcgcctacctgctgcgcctactacctggacctggctcccgctcaccaccacacgctgggcttcgctgaccgagagcagcagtaccatggcgacgacggcgccctcggcttccagcactccggcgacgatcgcgcggttccggcggctgttccgcacaagtccagcacaaccaccgagtgctcctcctccgtctcctccatgtcgtcctcgccgcccgcgaccgcagtctcggccgtctccagctcaaagccgcaggctcccaagaagaagggatcaaggagcagcagcgaccagagaaaggctgcgtccgccgctgctcctgctacggctgctggtgctacgaacaagaggcccagggtgaggagggagaggctcggcgagaggatcatagctctgcagcagctggtttctccgttcggaaagtctgatacggcttccgttctgcacgaggcgctgggatacatacgcttcctacacgaccaggttcaggtcctgagctcgccctacatgcagcggcgccagccggcctcagcagcgcacgtccaggcgcaggagagcgcggcggggacggtggtggagccggcgctgccgagcgacctgaggagccggggcctgtgcctggtgcccgtctcctacacggataacttcgccggccacggccacggccacggcaacggcgccgacctctggtccgtggtggcggggacagggatggggacggcgaaggcggccgtggacaacgagggggctgccggcggaacgctgctgcctggtggtggtggtggtgctggtcaccctcgctttacggattatgcgagggtttagggctttcagtaggctggctaatcagtccccgccgtactccgccaccttttgttgaagtaaacttttggggctgctttaattttggtgggaaacaagggcgcagggatccatatttcctctccagtcagtctacacagaccgaccgcagcagatgcctcatgcctgccacagcagccaggagctcaggatgatgccatgccatgcaatgcaagtgtgtatattctggacgtggatgtgggtttcggatttcttttacccacaggccacagcctagtactacgctactacgattcttt

SEQ ID NO: 129798 - DNA, 900 bp, Zea Mays
caaattaaaacccttgaaaagtggaggcgtgttcaagtgcgtatgaatccgaacacagagagacagacagagctcccgcagaaggctacaaaggcgcgaaacttcgttgacccaaaacagagaaccccaaccgccgcggcagtagtgatcatggtgaaggaagaggaggaggtcatggcagaggcagcaggaggtggacgcggcggctacatggacctgctcggtctcggagaagaggactacctgctgtgcctgtccccttcctcctcctacttcactcccagtgtcgtctccgtcaccggcgccacgatcaccaccaccaccaccactcccgccgcgccgtcgcctacctgctgcgcctactacctggacctggctcccgctcaccaccacacgctgggcttcgctgaccgagagcagcagtaccatggcgacgacggcgccctcggcttccagcactccggcgacgatcgcgcggttccggcggctgttccgcacaagtccagcacaaccaccgagtgctcctcctccgtctcctccatgtcgtcctcgccgcccgcgaccgcagtctcggccgtctccagctcaaagccgcaggctcccaagaagaagggatcaaggagcagcagcgaccagagaaaggctgcgtccgccgctgctcctgctacggctgctggtgctacgaacaagaggcccagggtgaggagggagaggctcggcgagaggatcatagctctgcagcagctggtttctccgttcggaaaggtaaaaaggcggacgccctttttaactcgttcgcctaatcgcctgtacctgcgtttcggcgtttccttgcctaggctagctagacaaccaaattaaccgcgagctttcctcctgccgtcaaactgaaacaacccc

SEQ ID NO: 129799 - DNA, 2206 bp, Zea Mays
gcaaacgcaacacgtctaagcttaacaagcatgatggatctggcggcctacatcgccattctctccttagtcttcctcttcctcctacgccgcgtccatggtctcgccagacgcgacggcaagagcaggagcatgcggcggccgccgccgagccctccaggcgccgtccccttcctcggccacctccacctgatcaagaagccgttccacgccacgctgtccggcctcgcgcagcgccacgggccggtcttcacgctgcgcctgggctcccgcgacgccgcggtggtgacgtccccggcgtgcgcgcgggagtgcttcacggagcacgacgtgacgttcgccaaccgctcgctgctgccctcgcagaggctcgtgaccttcgacggcgccgcgctcggcacggccagctacgggccgcgctggcgcgacctccgccgcgtcgccgtggtgcagctcctctcggcgcaccgcgtcggctgcatgtcgggcgtcatctgcggcgaggtgcgcgccatggtgcggcgcctgcaccgcgcggctgccgcggccgcgggcgccggcgcgcgggtcgagctgaagcgcaggctgttcgagctctcgctcagcgtcctcatggaggccatcgcggagaccaaggcggcgcgccgggacccggagccggagccagacgcggacggcaccaccgacatgtcgccggaagcgcaggagttcaagcgggtcatcgacgaggtcttcccgtacgtcagctcggtgctgtgggactacctgccggtgctgcggtggttcgacgtggccggcgtgaggagcaggatcctggccgcggtgagcaggagggacgcgtttctgcggcggctgatcgacgcggagcggcggaggatggccgacggcgtctgcggcgagaagaagagcttgatcgccgtgctgctcgccctgcagaagctggagccggaggtttacaccgacaccgtgatcacggctttctgttcgaacctatttggagctggaacagagacgacctcgaccacagtcgaatgggccatgtcgctgctgctcaacaatccagggacactcgagaaggcacgagcagagatcgacgccgctgtggggcactcccgcttgctcaacgcgggcgacctgccgcgtctcggctacctcaggtgcatcatcgccgagacgctgcgcctgtaccccgccgcgccgctgctgctcccgcacgagtcgtcggcagactgcaaggtcggcggctacgacgtcccgcgcggcacggcgctgctggtgaacgtgtacgcgatccacagggacccggctgtgtgggaggagccgggcaggttcgtgccggagcggttcgagggcgggaaagccgaggggctgttcgtggcgccgtttgggatggggcggcgcaagtgccccggagagaggctcgcgctgcagacggtcggggtggcgctggggtccctcatccagtgcttccactggaacagagtcgatggcgtggaggttgacatgagcgagggcagcggactgacgatgcccaaggctgttccgctggaggctttgtgtacaactcgtgaggctatgtatgacgttcttcagaagatctgataggacattcacggagtgcgcactcgtgagcatgttcaggtcaacaaatgtaagacgttttatagactggcagacagagaataagaggaggaaaaaaaaaagggctaaggaatggtctaattcaaacgtgacatgacaagcagctatctctgttcggcccaggcgaaatggactatggtgtttcgtcatagaaacgtacatccacaacatgtggcaaacacaaaaggcaacgataggacaggacagtcatgatgtacacgcggtagggcgcctttgtgtcagtcaggtaagatttttcagcttttgggtcttctgcgtcacaataggaagcttatgggcaataaggttcgggtccgcgtacgctgcagagtccgaaggatatcctttctgcattatagaaaagagataaaagatggtgcccacttaatctcattcaaagaaagtgcttggttccagcgatttgcataccgcagacaaagtagcaaatgttgcttccctccagcagcactcacgaagtaccactggcttggctccgtcgccgtttccaaacaggcaatgtaaccgagtgtctctcaacctcatcagtacaccatcaactctaagc

SEQ ID NO: 129800 - DNA, 2183 bp, Zea Mays
acaaccaccaactcgcgatccatcgatttgcagaacaccacccaacagccagaccatcactcgatcggtagacatggataaggcctacatcgccgccctctccgccgccgccctcttcttgctccactacctcctgggccgccgggccggcggcgagggcaaggccaaggccaagggctcgcggcggcggctcccgccgagccctccggcgatcccgttcctgggccacctccacctcgtcaaggccccgttccacggggcgctggcccgcctcgcggcgcgccacggcccggtgttctccatgcgcctggggacccggcgcgccgtggtcgtgtcgtcgccggactgcgccagggagtgcttcacggagcacgacgtgaacttcgcgaaccggccgctgttcccgtcgatgcggctggcgtccttcgacggcgccatgctctccgtgtccagctacggcccgtactggcgcaacctgcgccgcgtcgccgccgtgcagctcctctccgcgcaccgcgtcgggtgcatggcccccgccatcgaagcgcaggtgcgcgccatggtgcggaggatggaccgcgccgccgcggccggcggcggcggcgtcgcgcgcgtccagctcaagcggcggctgttcgagctctccctcagcgtgctcatggagaccatcgcgcacaccaagacgtcccgcgccgaggccgacgccgactcggacatgtcgaccgaggcccacgagttcaagcagatcgtcgacgagctcgtgccgtacatcggcacggccaaccgctgggactacctgccggtgctgcgctggttcgacgtgttcggcgtgaggaacaagatcctcgacgccgtgggcagaagggacgcgttcctggggcggctcatcgacggggagcggcggaggctggacgctggcgacgagagcgaaagtaagagcatgattgcggtgctgctcactctgcagaagtccgagccagaggtctacactgacactgtgatcactgctctttgcgcgaacctattcggcgccggaacggagaccacgtccaccacgacggaatgggccatgtcactgctgctgaaccaccgggaggcgctcaagaaggcgcaggccgagatcgacgcggcggtgggcacctcccgcctggtgaccgcggacgacgtgccccacctcacctacctgcagtgcatcgtcgacgagacgctgcgcctgcacccggccgcgccgctgctgctgccgcacgagtccgccgcggactgcacggtcggcggctacgacgtgccgcgcggcacgatgctgctggtcaacgtgcacgcggtccacagggaccccgcggtgtgggaggacccggacaggttcgtgccggagcggttcgagggcgccggcggcaaggccgaggggcgcctgctgatgccgttcgggatggggcggcgcaagtgccccggggagacgctcgcgctgcggaccgtcgggctggtgctcgccacgctgctccagtgcttcgactgggacacggttgatggagctcaggttgacatgaaggctagcggcgggctgaccatgccccgggccgtcccgttggaggccatgtgcaggccgcgtacagctatgcgtggtgttcttaagaggctctgaaaacctcatggatcgaattgctggcatcgtctgaagggtgtatgacgtagcttccgagttccgagcatatatattcacttgccttgtactagttgattttcgccgagtgtatggaatggattttctttttttttcttgcaatggatgtgaattttgtttttctcgacgttacaagaagtgaatcaacctagcttctctttgagccatgctggcttcggtttcactatatatgtacctttttagaggaagattcactatatagtgggcgatctttttggtttagtttagggtgtgtttggtttatagagattaatttttattcccccttctttagtctattttagtccctaaattatcaaatacggaaactaaaactctattttagtttccgtattttgcaatttaggaactaaaatagaataaaatggtgggactaaaaattatttccttggaaaccaaacaccccttagttttttttcataggcttctttatgtcagtactactatatgatatgaatatgatgatgcagatgcacccaatgtt

SEQ ID NO: 129801 - DNA, 1665 bp, Zea Mays
atgtcgcatcccatcaccccgcgccgcgccacccgctcgtccgcggccgatcccgcctccccgtccggacccaggcccaaaccgacgcccaggcgccaacccgtctccaccgccgccgcgaacgcgaagcaggaggaaggagaggagcacgagcggagccccgtcgacgcgctcctcgaggcgctgcccggccgccgcgagcaggcgacggacctgctccggctcctggcgcccgcgccggcgctcccgctcctcctccacgggggcgccgccacgggcaagacgcgcgcgctcctcctcgctctccgccacgtgcgcccccgcccgctgcgcgtcgcctacgccgccctgcgctcgctaccgtcccctcgcgccctgttctcctccgtcctcgcccaactcagcccgccttcgtcgtcctcctcctcctcccgcctgcgcgtccccgacaagccctcggacttcgtcgccgcgctccgcgacgcgcttgctggcctctccgcgcggggcgaggccgtgtatctggtgttcgataatttggaggttgttaggagctgggacaagggtggccagcttctggcgctcctcctccgcctctacgatctcctccgattgccgcaggtcgtgctcgtctacgtgagcagtgctacacctgacgcgtactactccatgactggctctgtcgagccgaatcacatttacttccctgattatacagtggacgaggtacgagacatcctgatgcgaggccatccaaatccgaagctgtactcatcgttccttagtgtggcgctgaagccattgttccgggtaacaaggagggtagatgaactggtggctgcactggagccacttttcaggaggtactgcgagccattgggggatttgaaggccgttccggatgagagcatcaaaagaaggttgtttgaacatatacagccacatttggctgttgccatgaacgagactttcattgttcccacgagggtttctgtggatgaatgcaaagaccacagttctcgtgggaaggccagtagtaaaagacagtttggcagtagggatggcttgccgactgaattggagttccacatgtctgtgtctgcgaaatacttactattgtcagctttcctggcttcaaggaacccggctactcttgatgcagctttgttcgattcaactggagggtcagataacaataggcgtaagagaaagagctctcaagcatcgatgaatatgaaggacaccatggccgaagagatgcttatgaaaggccccggcacatttcctcttgagaggctcttggctatatttcagtgtatcacatcagtgtcagaagatgatctcggtgatgttgaatgttctgatagtatgatgaatggaagtggaatgactggtttgatgtcagatgttcttttgcaactgtcaacactttgcaattctaatttcctctccaaaagccggagctgcccgatggaaggctcagctagatatcgatctaacattgatgaagatttagcactcaagactataatgggatccaatttgtctatttcacaagatggtagagcatcaagggataaagcaaatgctatatgctctatcttctttagtgtgttgacttctgatagtcctgtttctcagtcagacaacgagtacggtgtctga

SEQ ID NO: 129802 - DNA, 1575 bp, Zea Mays
atgtcgcatcccatcaccccgcgccgcgccacccgctcgtccgcggccgatcccgcctccccgtccggacccaggcccaaaccgacgcccaggcgccaacccgtctccaccgccgccgcgaacgcgaagcaggaggaaggagaggagcacgagcggagccccgtcgacgcgctcctcgaggcgctgcccggccgccgcgagcaggcgacggacctgctccggctcctggcgcccgcgccggcgctcccgctcctcctccacgggggcgccgccacgggcaagacgcgcgcgctcctcctcgctctccgccacgtgcgcccccgcccgctgcgcgtcgcctacgccgccctgcgctcgctaccgtcccctcgcgccctgttctcctccgtcctcgcccaactcagcccgccttcgtcgtcctcctcctcctcccgcctgcgcgtccccgacaagccctcggacttcgtcgccgcgctccgcgacgcgcttgctggcctctccgcgcggggcgaggccgtgtatctggtgttcgataatttggaggttgttaggagctgggacaagggtggccagcttctggcgctcctcctccgcctctacgatctcctccgattgccgcaggtcgtgctcgtctacgtgagcagtgctacacctgacgcgtactactccatgactggctctgtcgagccgaatcacatttacttccctgattatacagtggacgaggtacgagacatcctgatgcgaggccatccaaatccgaagctgtactcatcgttccttagtgtggcgctgaagccattgttccgggtaacaaggagggtagatgaactggtggctgcactggagccacttttcaggaggtactgcgagccattgggggatttgaaggccgttccggatgagagcatcaaaagaaggttgtttgaacatatacagccacatttggctgttgccatgaacgagactttcattgttcccacgagggtttctgtggatgaatgcaaagaccacagttctcgtgggaaggccagtagtaaaagacagtttggcagtagggatggcttgccgactgaattggagttccacatgtctgtgtctgcgaaatacttactattgtcagctttcctggcttcaaggaacccggctactcttgatgcagctttgttcgattcaactggagggtcagataacaataggcgtaagagaaagagctctcaagcatcgatgaatatgaaggacaccatggccgaagagatgcttatgaaaggccccggcacatttcctcttgagaggctcttggctatatttcagtgtatcacatcagtgtcagaagatgatctcggtgatgttgaatgttctgatagtatgatgaatggaagtggaatgactggtttgatgtcagatgttcttttgcaactgtcaacactttgcaattctaatttcctctccaaaagccggagctgcccgatggaaggctcagctagatatcgatctaacattgatgaagatttagcactcaaggttgccaggagtgttagtttccccctctcgaagtatatttacagaagatag

SEQ ID NO: 129803 - DNA, 1602 bp, Zea Mays
actctgatatttatctcaccctcactttggtctcatctaaacaccgtaaaattgtgatgcccccttctatccattcttatgatcaaaccaaacataccactatagccgtcgccaatacccgataagactcggcaaatcagctggacacatagcacatctatcccgcttccgtctcccgctccagtcgccatggcggaagccctcgtgggcctccgcgtcgctgccctcgccgtcccgcagcctaggagccaccgcagacggcttcttcccgctgcgcgcctcgctgcgttccggcgcgaccggctgagcaccgcccgcgcggccgtcgcagggccaccggaggtggacgaggacgattccatgagtatcgacaacttgcatcgtttcttcgacctcaacgtcggaaagtgggacgggtcattctaccaattcgacgcgcacgggagggttcttcaggagattagcacgcggctgtccgtgagcacgtacggggaggacaacctcatcagcctccttcaatcgttgtacattaagcaagcatcctctgcaatatcaatcgtggacgaagaggattctgaacctgaatgggtggaatacaagatcaaagagacgaacatattcactgtggacaaatatcagcagatagggttctttcctgaagaaaaggcatttgctctgaggtatcagactgctggaatgctggagactgttcttcgggttggcacgcttggagaagatgatactggtgaagaatctcccaaaaacctgaagataccttctcgcaagccatctatcgtatgtgaaaattgtctttactcccttgaaggcaatggtcgaatgagggctttccacataatggatccaaagggagtgcttgacacacttcttatttttcatgagaagaggcagggatctgaattggcacaatcatttaaacactattcagtttgtaccaagagtgccagcagtgataggataagtacagtacttggaagatgggagggtcattctgtgactaagaggagtggggtgtatggagcaacacttgctgaagcagatacagctgttgttctcaaaatgggctctaatggccaattgattcaggatactttatcaactaaaatcggaaccggtacaacaacaacggtcaactggacaggatcagcaaatgaaaacttgcttcagtttgatggaggatatgaaataacattgctacctggtgggatgtacatgggatatccatcagacattagcaaatctatttcccaattagattcttttcatttagagttttgttggatggaatcacctggaaagaggcagcggcttgtccgaacttacgatgcagctggtttggctgtttcatcgacctatttttttgaaaccaaagtttgagtcatagcttctacaaaatgtattgcaacggttttgtaagtcatacagtaatctcactatttgtgtccttcggtgcatgatatttgagtatatattgtcagatctttctatatccaaaacccagaaattcatgaaccaaacgtgtattcttgttttgctcattatgttgcattcctctcgatgatgataatagaggaacaacggaaa

SEQ ID NO: 129804 - DNA, 972 bp, Zea Mays
gccacaactcgaagtacgagtaactccggagtccggatggctgcagcgatggacgtcgacgaagccggcggcgaggagaggcgaccgtcagagaaggagctcttccgcgccgctgagtccggcgacgccgccgcgttcgcctccctcgcccccgccgacctctccctgcgcaacgaggacggccgctccctcctccacgtcgccgccgctgccgggcatccccaggtggtgctcgcgcttgcccagtgcggtggtgacgccgcggctagcgtgctgaatgcgcaggacgaggaggggtgggcgccgatccactccgccgcgagctccggcaactctcaaatcgtcgacatcctgcttgagcgaggtgctgatgttaacctggttactgatggtggtcgaactgctcttcattatgctgcgagtaaagggaggcttaacatagctgaaaaactaatagcccatggtgctaatgtcaacaagaaagacaagtttggctgcacacctttgcatagagctgcaagcactggaaacgcggagctgtgtgaattcctcattgaggaaggtgctgaagttgatgctgttgacaagacaggacaaacacctcttacgcatgctgttatatgtgagaacaaaggggctgctcttctgctaattagacatggtgctgatgttgatgtcgaggacaaggaaggctacactgcccttggccgagcatcgaacagcttcagacctgtactcatcgatgcagccagggcaatgctcgaaggatgatctggtgctctgctcaaagacgatggaaagtgtgatacgagaaactgtgctgagtcgaggtgttaaagcttgttctggtgtgtaaacaaaggggctctctacagaatcagatttgaccctgctagaattttgcccttgttgggtttatttaaccattgtgactaacatctcataagctaagctttggttctcccttctctc

SEQ ID NO: 129805 - DNA, 2458 bp, Zea Mays
gccacaactcgaagtacgagtaactccggagtccggatggctgcagcgatggacgtcgacgaagccggcggcgaggagaggcgaccgtcagagaaggagctcttccgcgccgctgagtccggcgacgccgccgcgttcgcctccctcgcccccgccgacctctccctgcgcaacgaggacggccgctccctcctccacgtcgccgccgctgccgggcatccccaggtggtgctcgcgcttgcccagtgcggtggtgacgccgcggctagcgtgctgaatgcgcaggacgaggaggggtgggcgccgatccactccgccgcgagctccggcaactctcaaatcgtcgacatcctgcttgagcgaggtacgagaccagctcaatacgtgtgggtggactgtactatttctgctacgttttttttaagattagttggcgcaaaattggtagtacatgacggggttgatgtcttggtgttttctgataacatagtttctagtttctacgataagtttctgacattgcagtaattgctgcagatttgagcatcatgtctcacgtgataaagcgaagcacagtgttacttgctatatgttacttattttgtcctttgggtaatctggctgatttattgtagttgtgatttgtaatatgatgcggtaacatagtggttaatgatgggcatgtgattccttaggctgtaacatttcaaattgatgtttgctaatggtagcttattgctcatggttaaaatcatcatggatattgctcctggttggcaatgtcctccgattggttcgtatttgcagaacttccctgttttgtctgtttataccgcacaagcaaaataacagctggcacctatgtctataacagggcatggtatatctcgatatattgttttttattcttattttcagaatgatatggttttctagaggattgctgagtttttcggtttttcccccctgaataagctttctgatgaattcctattcatcacttgtcctcttcgactggaatgtacctggacaagtccattccagcgtaccagaggccaacactttcctttcataaaaacaaacttatcattttgaaagcaaaagaattgtgaagtattttagcttctaatacgctgtaatagtatctgctatttattaattataagcattatgatattctctttgctgctattcaagtgggtttgtggtcgacattccttattggacttcttaaggaaaaaacagttaattttgtctctataattcttttactttcacccaactagtgcaatcataaatttgtaataccaggtgctgatgttaacctggttactgatggtggtcgaactgctcttcattatgctgcgagtaaagggaggcttaacatagctgaaaaactaatagcccatggtgctaatgtcaacaagaaagacaaggtttgtatactttcaacaatctaaaacaatatgcaaatggacttcattggtggtaaaactcaaatccagaaaagaggtttaatgccccagctcattgacagtcagatatctatgagtttttgatgacattgaaacttggctagtgtttagtgtgagatgtatatgaatctgtaaacatggaagctttttctgccctgaagcaatgcaatgacaaggctgagatctgttgaattcttaaaatcatgaagctaatgtttgtcaatatctattttttcttgtgaaacatttagtctagcatagttcttttgtcctctatatcagtttggacaagaaaaaataaccaggtaaattttatgtggtcagatacagttgatatttgtgagactcagagatgtggtagatgccccctccccctagaaataagtttattgctgttatgcatatcgcatatgcctctgcattgtacaccatcgcacaaattgcagtaggcaaccaaactgattcgctaaactcatggatcttaaactgcttcttttcagtttggctgcacacctttgcatagagctgcaagcactggaaacgcggagctgtgtgaattcctcattgaggaaggtgctgaagttgatgctgttgacaagacaggacaaacacctcttacgcatgctgttatatgtgagaacaaaggggctgctcttctgctaattagacatggtgctgatgttgatgtcgaggacaaggaaggctacactgcccttggccgagcatcgaacagcttcagacctgtactcatcgatgcagccagggcaatgctcgaaggatgatctggtgctctgctcaaagacgatggaaagtgtgatacgagaaactgtgctgagtcgaggtgttaaagcttgttctggtgtgtaaacaaaggggctctctacagaatcagatttgaccctgctagaattttgcccttgttgggtttatttaaccattgtgactaacatctcataagctaagctttggttctcccttctctc

SEQ ID NO: 129806 - DNA, 2444 bp, Zea Mays
atgcctccgctcgcattcctccgccgctacctccccgcgaggaaccgagtgtctgttatcgatcctgagttgcgtctgtctgtttgtttccctgagcaaaggcttctcgcgcgagcgtgcgatggtggagtccgggggagcccgggcgtggcgcgggacgaggaggccggaggcagcggcggactgagcggccggtcggcgggggcgccgtccggggagtgctacgcgtgcacgcagcccggggtgccggcgttccactccacggcctgcgaccaggtgcactcgccggactgggacgccgacgcggggtcctcgctggtgccggtccaggcgcagcagcaggcccagccggcggcggcggcggcgcagcacgcggcgcggtggctgttcgggcccgtgctggacccgcgcagcaagcgcgtgcagcgctggaaccgctggatcctgctcggccgcgccgccgcgctggcgctggacccgctcttcttctacgcgctctccatcggccgcgccggccggccctgcctctacttggacgccggcctcgccgccgcggtcaccgcgctccggacctgcgccgacgtcgcgcacctcgcgcacgtgctcctgcagttccgcctcgcctacgtctcccgcgagtccctcgtcgtcgggtgcggcaagctcgtctgggacgcccgcgccatcgccgcgcactacgcccgctccgtcaagggcctctgcttcgacctcttcgtcatcctccccatcccgcaggtcatcttctggttggttataccaaagttaattagggaagaacgtgttaggcttatcatgacgatactgctactcatgttcatatttcaatttctccccaaggtctaccatagtatacacatcatgaggaaaatgcagaaggtgacgggttacatctttggatcgatatggtggggatttggtttaaatctatttgcctatttcattgcttctcatattgcaggtgggtgctggtatgttcttgcaatccagcgcattgcttcctgcctccaggaagaatgcaagaaaaacaatagttgtgatctaatatcactagcttgttcgaaggagatatgctttcaccctccttggtcttcgaatgttaatgggttcgcatgtgatacgaacatgacctcctttagtcaacgaaatgtgtctacttgtttaagtggtaaagggtcgtttgcttatggaatctatttgggggctcttcctgttatatcgagcaattcgcttgctgtcaaaattctctatcctatattttggggactcatgacactcagtacttttggtaacgatcttgccccaacaagcaatggtattgaggtgatattcagcataatcaatgtcctcagtggcctgatgctcttcacattgctgatcggaaacatacaggtatttctgcacgcggtcctggcaaggaagcggaagatgcagctgcggttccgagacatggaatggtggatgagacggaggcagctgccgtctcggctgaggcagagggtgcgcaaatatgagcgcgaacgctgggccgccgtcacgggagacgaggagatggagatgatcaaggatctgcctgaaggactgaggcgggacatcaagcgctacctctgcctcgagctggttaagcaggttccgctgttccatggcatggacgatctgatcctggataacatctgcgaccggctgcggccactggtgttctccagcggggagaaggtgatccgagagggcgaccccgtgcagcgcatggtgttcatcctgcagggcaagctccggagcacgcagccgctgaccaagggcgtggtggcaacgtgcatgctaggggcgggcaacttcctaggcgacgagctgctgtcgtggtgcctgcgccgccccttcgtggaccggctccccgcgtcgtcggccacgttcgagtgcgtggaggcggcgcaggcgttctgcctcgacgcgccggacctgcggttcatcaccgagcacttccgctacaagttcgccaacgagaagctcaggcgcacggcgcggtactactcgtccaactggcggacgtgggccgccgtcaacatccagctcgcgtggcgcaggtatagggcccgggcatcgacggacctggcggcgatggccgcgccgccgttggcgggcggacccgacgacggggaccggcggctcagacactacgcggccatgttcatgtcgctccggccgcatgaccacctagagtgatcaggaggggggacgggaccatcctagctgtgccggccgggtcatggtgtctgtacagtgtacactagtggtatgttgttgtcatcttctgcgtgagtgaactggtggttcgggatttgtcatttaaagaaggtcaataatggagaaatagtttcttagcccgattcaattgtcttcctttcaccaagaataaaaattacttctgc

SEQ ID NO: 129807 - DNA, 360 bp, Zea Mays
atggccagtaccatcacgcggcatggccctccacccgaaatcggttgcaaccgccgcggaggcaaccaacccaaggaaagccggcgattcgactttgagtggttatcacgcgagaccaggaaacgcaatcaggccatggcatggcaaccacctaccgctacaggcaggggcgcacgagggaaacgacggcgagcacggatcggagcagcgagcgaggagccgaggagggagaagtggggtctctgcgttaccggctgcctgatggagagcgacgtcgacttcagccggttctcgcggtttctccgacagatgccagatttcgtctgtttccagtgtttacggtataaacggagagagtaa

SEQ ID NO: 129808 - DNA, 741 bp, Zea Mays
ctcaatgaacctagataaaaaaagtgaatacatgctagccttcacaattattatccgaatgaaatttagaaatgcaaataagcaaaaaagcgcaggttccaaacgaaaagctggtgcatcttttaatttttaagtgtgtatagttactaaccaggacgaatctcatcttgtgttgctgaatttactgatacatttgttggatagcaaaagatgtcctttcccatgcggatttacgttttgtgcgtattagtatgtggtgaacttgtatctctgaacaaagggtacgtctctgtacatattggaatgttctgctacagtgggatgacacctgaacaagttaaccatttaacaaatgaataccacatttgcatgacccgcaatgggaggataagcatggctggtgtaacgacaggaaatgttggttacctagcaaatgcaattcatgaggttaccaaaccaaattgagttagggtcctaccttctttggtcgatggaagctgatggaatgagactgtgaagcggcgtttccccccctctgttcctgacaaaaataagttcaacctgctgctaccatatacatggacacaaactcagattagacactcaagttttgagagttgtgatcctgtttcatttaatcaaaaacaattttgtttttttccatcttgtcgtggcaaatgttacaccagctgcaaaataattacaataattgattttgatccagcgtcacagttacttcgc

SEQ ID NO: 129809 - DNA, 5231 bp, Zea Mays
atgaacagaatgacacggcaacagcatgcctgcataatgaatgcccggaagaagtatgaacaattacaaaggccacgaaagcagtatgtacagttacaaaggccaagagaggaaatcagtgatttgatacttttcactgctatatgtatggacatgtttaacatgaattcatatggctttgctttgattggctgatatgtttctactgctttgtcctcgcgcaggtcagtggccaagccttttccacggacggatcaccccagaactgccagatatatggctttgctttgatcagatatatgctagctgccagatatatggctatgttccaatgagtcaaggtggtcgatctccgatcaggagagcagcgacgcaggttacgccgtaataattgcacagcaaggtatctgggaatatcagaagagtcctcttacagatttggcaggcatagaagaacttcctcaggcatccttgatgcttgcttgcagtggcattgaagcgatatcggcgttccatacagtggccatgacgaccacaggattaaataccatgaatgtcctgcttgaggatcccttgagaaatgacatttgaattgcttgccagttgccaccagtttatttggaacattactggctgttgcagtctacattccaaaagaacataacatttcaattttgatgattcacattcagaacatgaaatcttgtaaagttactttaccaataaaaaagtgcataagaaaaggtaagtataattattaaaaaaatgcattttatcagcaagtgacaattatatccagctcatagctcatctacaagacaaactagctaaagagtaaatcatctgatcaagaatacaagccctgcatttcatccctcatataatgaatgaagaaaaatgctaatcaaatacagagagaaaacatctcatggcttcatctttaaggaggggagtattgaaccatagcagtccagggaactcactcaaaatatttcaggggggaaacaggggtggagccagaatattatgtcactgggtccggtcaaatacactttgcggttcacttggaagcactgtttgtccaaacggtcatttagcctatttacatactatgtaaacactacacactagtgcatcatttctatttaatcatttactaatcctatttaattagctatttagcctatttaatgtactgttcagaccaaagaataactaaacggtacatgaccgatgatttactttttagcatttaagaaaacactgcttggaagggtgatttgctaatcttaaagaacttcaaatagaatttgaaattttcattgggtcagctgaaccaaacgaatacaaagctctgttccacttcctggggaggaacacacatgggacacatctccatagacgcttgtattcacaaaggttcatgatttctaaaacacaatcacgtgcaagagaatggtctaacatttttactaataaataattaaatatcatatcagtacattaatcataattggaatttgttactatttggatgagagagttggacagagcaaaaggggtgggaaaatagtttatataccttggtctcattatgcagaagcaaaccagtctctgcttgctattcctagtaagacggtggtctgagttccttaagtcgccgaacaacttgcttcattgtgggcctagaagaaagagaatcaaccgtacacttgatgcccaggtgtagaatctcaacaaggtcgtcatgtggggccacatcccacagcccttctataaagaattcacgagctcgacccttttgtaaaagcatgcaagcccaggcaactatgttgaatccattcccgtaaggagagaaagaaggatccagtgcctttttgtctgaaatgagttcaagaagtacaactccataactatacacatccgccttatcagaaacgcggcatgtcatcgcatactctggagctacatatccaaaagtacctgccacaccagtggttgcatgtgtttctgaatttccaagcagccttgctaatccaaaatcagaaaggtaggcagtgtaatcattatcaagcaagatgttacttggtttgacatccctgtgtaagatgcgtgggacacaattgtcatgaagatatgcaagtgcacgcgcaacatctagagcaattttgtgaagcattctccaatcaattggtctcttactcctttcttgtatgaatctttctaaattgccaccaggcagaaaattatatattagaaacatctctgaatcgctgagatggtatcctatgagtgttacaagattggaatggcgacacctcccaagtgtttttacctctgcttggaattgctgaatgccttggaaccttccaatagcaagtctctttattgccaccaattttcctggtgctacctcagctttgtacgttgctccgaagccaccacttccgatgcaattacttgcattgaagcttccactggcacgtaaaacagcctcatatgtcaagggagcaccgatatcaacaaaaatagttacttcccttcttagagaacgccttgatggtcttgatgcacattttcgtgtgtaaatataaaggatgaccagagccaagagaactgcaacaattgctgatgctgaagttatggaggcaatctctattttgctgaatccgccaccgttaccattgtcatcaggggctgtattatcagctggtggattattgtctgcctcacttagtgctcgagcattcactaaaggactggagagcgttgacagtccacaaggttgaagggatggatttccacgaatactgttgcatgtcagtgagtgaatttttgaaggcagtggcccagacaaatcattgaatgaaacattgaatatggacagcgatggtgaagaggcaaaatttggaatgtttccagagagcctattattgttgagtagaagcacagttatgtctcctagtgtcacaaggttatttgggatctcaccagcaagagaattagatgagagatctaaaaccctcagtgatctcaactgacccaaacaggatggtattctgccactaatgttgttcccagctaatgagagaaacttcaagctcttgaaatctttgaaactggcaggtatttgaccctccaaaaaatttctgctcatgtccatcttgacaagggctcctaacaaaccaacgttatcaggcatcattcctgatatttgattgccagctaaatccaaagctctgatagcactgcattttctgctaaactctgctgttatctgaccagatatcttgttgtctcggaagcttacaaccaaccccttcaagttgctacactgttccaacagaattgaatccaacgatccactgaaattattgtgatcaacgacaaacacatacgacgtcttgtttccaaacctgtcagcactaaatggcatggatgtaaggtgaccttcaaggttgttctttgcaaaattatgatacacaacagaacactccccggagttgcaaaaaactgatggcagttcttgtagagttttggacatgaggaatgaagaataactggatgacatttcatccagcattagctgagaagtacagactttattcacacatgctggaattgatcctgaaagttcatttccgctgacatcgaatacagtcatacaatgcggacatagatccttatccagtaaaccagataatctatttgagctgaggttgagaaacttgaggttactgcactgtcctagatcccttgggattgctccagaaagaaaatttccccccagattaaccatttctaaattagaacaccttccccagttgctcgggagagttccttccaggcccgcccttggcacccatagcacccggagtcttggcaaagctgtcacactctctggaattcctcctttaaacagattgaactcatgtgactttactgaattggactggctagacaatacgagcactgacaaatctgagcaatttccgagctccggtggcaccaggccacttaatctgtttcttgatacgtccaacacctgtagtttcctcagctttccaatccctgctggaattgaaccgtgtaatgaattggagaacaaccgcagcgagcggagcagcctgcaattccccagaccagaggggatgccaccgacaagaaggtttccagacaagtcaagccacttcagattaggcaggctgccaagtgctctcggcaccgatccagtgaaccggttgcctgaaagatccaacctctccaagtctttgcaggtggaaagggaagacgggatctcaccgtgaagcaggttggaagcgagcgagagcaccctcagccgcggcgggaaggaggcaggaagggcgccccggagagagttcccagcgaggttgaccacctcgagatcctccaaccgccagatctcaccggggatcttgccccggaggccgtggagcggaaaagagaccactttcaactcggtgaggagcccaaccgccgcaggaagctcgccggcaagctcctggctgggtccgaaacgccgtgaaggggagagcacctccagagcgacgacccgggagcttgagtcgcatgttacccccagccaggagcagtggttgcggccgctagagtccggggaccactgctggagcaggtctacggcagggaaggcgttcttgatctggagcagcgccgatctgtcctggtcctggacacggcgcaacccggaggaagaagagacggcgaccgcagcggcaaacagcaagagcagcagaaacgcgtaggtggaggccgtgctccggcaagcggccaccatgtccgcctagagctagccgacggcggcgacccggatatggacctgaactgtagaaggcttcgcttccggtaggtgcaggcgacggggatgggagagggagacttacatgggggagaaggactggaaaataattagctagattccgatgggaggaggcaaaattttctctccgactctgatctatcgctgggttctttcctctcctctcctactgtgtgtgagttgctacttttctcttggttggtgctggtcttcgttcagctcttcttctcggccaccgtcccctactcgtccaggactccaggtctagcaacaactctttttttccccttgatttttaaaggtacttggcgtgaccaatttgccctttaaaagattgattttgtttgatggaggtagttgcgggctgcctgcg

SEQ ID NO: 129810 - DNA, 1974 bp, Zea Mays
gttactatttggatgagagagttggacagagcaaaaggggtgggaaaatagtttatataccttggtctcattatgcagaagcaaaccagtctctgcttgctattcctagtaagacggtggtctgagttccttaagtcgccgaacaacttgcttcattgtgggcctagaagaaagagaatcaaccgtacacttgatgcccaggtgtagaatctcaacaaggtcgtcatgtggggccacatcccacagcccttctataaagaattcacgagctcgacccttttgtaaaagcatgcaagcccaggcaactatgttgaatccattcccgtaaggagagaaagaaggatccagtgcctttttgtctgaaatgagttcaagaagtacaactccataactatacacatccgccttatcagaaacgcggcatgtcatcgcatactctggagctacatatccaaaagtacctgccacaccagtggttgcatgtgtttctgaatttccaagcagccttgctaatccaaaatcagaaaggtaggcagtgtaatcattatcaagcaagatgttacttggtttgacatccctgtgtaagatgcgtgggacacaattgtcatgaagatatgcaagtgcacgcgcaacatctagagcaattttgtgaagcattctccaatcaattggtctcttactcctttcttgtatgaatctttctaaattgccaccaggcagaaaattatatattagaaacatctctgaatcgctgagatggtatcctatgagtgttacaagattggaatggcgacacctcccaagtgtttttacctctgcttggaattgctgaatgccttggaaccttccaatagcaagtctctttattgccaccaattttcctggtgctacctcagctttgtacgttgctccgaagccaccacttccgatgcaattacttgcattgaagcttccactggcacgtaaaacagcctcatatgtcaagggagcaccgatatcaacaaaaatagttacttcccttcttagagaacgccttgatggtcttgatgcacattttcgtgtgtaaatataaaggatgaccagagccaagagaactgcaacaattgctgatgctgaagttatggaggcaatctctattttgctgaatccgccaccgttaccattgtcatcaggggctgtattatcagctggtggattattgtctgcctcacttagtgctcgagcattcactaaaggactggagagcgttgacagtccacaaggttgaagggatggatttccacgaatactgttgcatgtcagtgagtgaatttttgaaggcagtggcccagacaaatcattgaatgaaacattgaatatggacagcgatggtgaagaggcaaaatttggaatgtttccagagagcctattattgttgagtagaagcacagttatgtctcctagtgtcacaaggttatttgggatctcaccagcaagagaattagatgagagatctaaaaccctcagtgatctcaactgacccaaacaggatggtattctgccactaatgttgttcccagctaatgagagaaacttcaagctcttgaaatctttgaaactggcaggtatttgaccctccaaaaaatttctgctcatgtccatcttgacaagggctcctaacaaaccaacgttatcaggcatcattcctgatatttgattgccagctaaatccaaagctctgatagcactgcattttctgctaaactctgctgttatctgaccagatatcttgttgtctcggaagcttacaaccaaccccttcaagttgctacactgttccaacagaattgaatccaacgatccactgaaattattgtgatcaacgacaaacacatacgacgtcttgtttccaaacctgtcagcactaaatggcatggatgtaaggtgaccttcaaggttgttctttgcaaaattatgatacacaacagaacactc

SEQ ID NO: 129811 - DNA, 667 bp, Zea Mays
atgaacagaatgacacggcaacagcatgcctgcataatgaatgcccggaagaagtatgaacaattacaaaggccacgaaagcagtatgtacagttacaaaggccaagagaggaaatcagtgatttgatacttttcactgctatatgtatggacatgtttaacatgaattcatatggctttgctttgattggctgatatgtttctactgctttgtcctcgcgcaggtcagtggccaagccttttccacggacggatcaccccagaactgccagatatatggctttgctttgatcagatatatgctagctgccagatatatggctatgttccaatgagtcaaggtggtcgatctccgatcaggagagcagcgacgcaggttacgccgtaataattgcacagcaaggtatctgggaatatcagaagagtcctcttacagatttggcaggcatagaagaacttcctcaggcatccttgatgcttgcttgcagtggcattgaagcgatatcggcgttccatacagtggccatgacgaccacaggattaaataccatgaatgtcctgcttgaggatcccttgagaaatgacatttgaattgcttgccagttgccaccagtttatttggaacattactggctgttgcagtctacattccaaaagaacataacat

SEQ ID NO: 129812 - DNA, 1718 bp, Zea Mays
cgccattcttctattccactcgcttcccccagccgcacgaaaccctaacgccgccgccgcttcacaggtaaaccgccgccatggtctcgggttccggcgtatgcgcgaagcgcatcgtggtggacgcgcgccaccacatgctgggccgcttgtcgtcgattatcgccaaggaactgctcaatgggcagaaggtggtcgtcgtccgctgcgaggagatctgtatgtccggtgggctcgtacgccagaagatgaagtacctccgctttctccgcaagcggatgaacaccaagccatcccatgggcccatccacttccgcgccccgtccaagatcctgtggcgcaccatccgcgggatgattccgcacaagaccaagaggggggaggcggctctggcgaggctcaagacgtacgagggcgtcccgccgccgtacgacaagaccaagcgcctggtcatccctgacgctcttaaggtcctgaggctgcaacctggacacaagtactgcctccttggtgagctttctaaggaggtcggatggaactaccatgacaccatcagggtgagtgtttcccactcatattttcttgatcataagtggcatcgttttgcacggacactttaatcacttgttgctagtttgggtgagttagtaattaatatactgattctaattggaaatgaactgttttcagtttttgcacataatgttatgattattctggtgattcaggcatcttagttttgtctgtggtggacatcttctattgttgtgaaattattcatattgttgaattcctattgctacattagcttttttatatgttgtgagagattattctctgcatgattctggatgatgaagataaaatcattccgatacccattgattttacaatatgatttttaagaaccagctacttctgacaatcatgccacgtctgaatatacttgcctctttggtctggcaatctcacgcttcggctgatgtttgtgtcaccattgctgattatttgacacatgcataatgtttggatctgtgtaggctttttctcttgggcatccgactcatgtaaatcgaatcattagttcgttcatattgtgatgtgatgtgcctatgatgtgatcaaaatatttgctactcttgatgggtgttcccgtttgatgatcctaaccaccaagatctctgaggcccatcacattgcaattagaaagacagttcatatgagcacttgagagtcattgcaggagttgctgatgtttaatggctgtgttattttccattgaaatttatcctgctgcgtcctggtatctgattcctattgtttggtgctctatcaggagcttgaggagaagaggaaggagaaggccaaggtggcctatgagaggaggaagcagctggccaagctgcgcctaaaggctgaggctacagccgaggagaagttagggtcccagctggacattcttactccgatcaagtactgaatttgtggaacatctgatccatcgttttaaaattgtgacagtataatcttgagtgctattccgaacacattttttagccggtgaatgtattgtttgttttatcagatgtggttcgcattcacattcttagattttcgtagcactctttccaacgcaaccacatcatcttaagtgctataaaactatgaatgaaacaatgtctatcaattcaaaatttctcatttcacgtcattatttc

SEQ ID NO: 129813 - DNA, 949 bp, Zea Mays
gaaaccctagcgccattcttctattccactcgcttcccccagccgcacgaaaccctaacgccgccgccgcttcacaggtaaaccgccgccatggtctcgggttccggcgtatgcgcgaagcgcatcgtggtggacgcgcgccaccacatgctgggccgcttgtcgtcgattatcgccaaggaactgctcaatgggcagaaggtggtcgtcgtccgctgcgaggagatctgtatgtccggtgggctcgtacgccagaagatgaagtacctccgctttctccgcaagcggatgaacaccaagccatcccatgggcccatccacttccgcgccccgtccaagatcctgtggcgcaccatccgcgggatgattccgcacaagaccaagaggggggaggcggctctggcgaggctcaagacgtacgagggcgtcccgccgccgtacgacaagaccaagcgcctggtcatccctgacgctcttaaggtcctgaggctgcaacctggacacaagtactgcctccttggtgagctttctaaggaggtcggatggaactaccatgacaccatcagggagcttgaggagaagaggaaggagaaggccaaggtggcctatgagaggaggaagcagctggccaagctgcgcctaaaggctgaggctacagccgaggagaagttagggtcccagctggacattcttactccgatcaagtactgaatttgtggaacatctgatccatcgttttaaaattgtgacagtataatcttgagtgctattccgaacacattttttagccggtgaatgtattgtttgttttatcagatgtggttcgcattcacattcttagattttcgtagcactctttccaacgcaaccacatcatcttaagtgctataaaactatgaatgaaacaatgtctatcaattcaaaatttctcatttcacgtcattatttc

SEQ ID NO: 129814 - DNA, 2360 bp, Zea Mays
acgccacgcgcccacgtccgggtccgtccattctgctctcaccctcgggtcttggccatcggggaagagcacgaggctctcaacgcgtcagcgactcagcgtcatatttctgagttctcgcttctcacttgtgcccagatgccggccctttccttttcgggatctcctcggtgacctagatcggatggacccgccgccggcgacgcgcgcggcgtccaggcggcgggaccgccgacggcgcctgcggcagcggcagcgcgcagctgcagccacgaaaacgaaggtcggtgcggccgtgctggccgtggagccgcagagcgcagcagtcacaaccccggtggcttcgatcggtcctgctgccacgccggcgtcgaggggcaggaaacggcggaggcctcgtagacggcgtggccggaacgcgggcgcggctggggtgtcggacgaaccaccggctgcgtcccccgttcccgttccagatgccccgcaagcaagttgcaatttggaagcaatggcatcgcgtctgagcgataatgtgctgcaaactatgactgagaagataatgaggtcagataaaacaagcaagagaaattttcagcacggaaatgaggcgctaaaagattctgtggctgaaggtgctgcctgctcttctcttgcccgtcgtgaacattctaccagagaaaatggagcctcaaggagtaagatacttaagagatccaatgtaaaatccccagttgatagttgcactgaacaaggaactgatatggattatcacaagatgaagagtgccgatttgctagggaacctggaagaagtgtaccaggaaagaacgtgtcttggttactgctcttcgcagaagttggaagaatattgggaaaatgaaaatgtatcttctctcaactccagcagtttacaggcgggaaaaaagagaaagaaaagaagaggcaggaaaaagcacaatcgtcgcaagaaagctaatttacaggattctccagcatcaactgctgctgataattctggtttggtgacgttttctgagaactgtacttcagcccttaaactagaggaacagaggaagaagcaagatcagaacaagacatccatgactaacttacttttaatcaacaatgcaaagagatcagaaccatttgatgtgaatttggaaggcgctattgaaaagagctgtgaactggcaaagaatagttttgacaacacattagaaaataggtatgaactggcaaagaatagttttgacaacaccttagaaaataggtatgaactggcaaagagtaattctgactacataaatatggtaagaaatggattacaagagcaagacttagcatgcttgtcaaacagtcacaatgttaactacctgaagccttcccatttggctgaggaatatacagaaaaactcaaacatgtcttttcactgggaaagtccttaaggcctccgaagaaaaagcttctcatcttagatcttaatggtttacttgtggatatcaacgaagactaccacaacgctcacatggctgatgccaaggttcgaagaaaattagtattccgaaggccttactgcgatgattttctcaacttttgtgctctgaattttgagctaggcatatggtcctcaagaaaaaaagaaaatgttgattcggttgttaatattgttatgagtgaattcaaaccacacctactgttttgttgggacatgtctaaatgcacattcaccggacataaaacactggagaataagcacaagccattagtgctgaaggaattgagaaaactatggaacgtggaagaacaagatcttccatgggaagtgggggactattcaccttcgaatacattactagtggatgattccccttacaaagctctgcgcaatcctccgcatactgccatttttcctcactcctacagttacttaaactggaatgacgattcgctgggtcccaatggagaccttcgtgtgtatctgcagaacctagccgctgcagataatgttcagcattttgttcgtgataatccgtttggtcaacctttcattactgagagcgatccgcattggaacttctatgctcagattgctgatagagggcgtgcacccttgacatgttgcgcttgaactcccaagggtcgtgcttttttctgggagttctgtggttatccatgatcaaaagatcatgatcagtatacagtgatcttctctgagtagtttgcttgtatccctgtactgaagattacagagtttctgctatgggtttaaattgcaggctctacgaaaggtatcagaccaaatgaatgaattgtctgacattatctcagtctcaaactgtttgcagccatgcttttttttc

SEQ ID NO: 129815 - DNA, 2479 bp, Zea Mays
gccgcctgtctcagtcgcggccgtcccccggcttcttggactttgtcgccgcacccgcacggcgctacgcaacaacaaaagcaggtccgctcgtcccgtctcgtgaccctcccgcggctcgtctccctctcacggtctctcacctcacaacctcacggtcctcacctcactccacctcgttcgccgcctcgctgccgcgtcgggccagtgcgtgcgtgggggcgggcgtgagtgactggctctcctcggcgcgcggacccaggggcggcggcgatggggaagaatatgcgcatcaagacggcgcccaaggcgaaccgtgtccccctcctcggcgacggggagacgtcaagggcgctctcggacctggaagagggcagcgacgtccagccagcgaacgtcggcttctgtcgggtcatcaaacttgcgaaacatgacgccggaaagctggtcctcgccacagcggctctgctcgtcgcctccctcagtaaccttctcgttcccaaatatggtggcaagataattgacattgtgtcaagagatgttcggcgcccagaagataaggcgcaagccctggaggatgtgaagggcacaattttgtacattgtgacaatcgtcttagtcggttcagtttgcacggctcttcgggcatggttattcaattctgctagtgagagagtagtcgctcgactaaggaaagacttgttcagccatctcataaaccaggaaatagcgttttttgatgtgactagaacaggagagctcttaagcaggctttctgaagatacacaaataataaagaatgctgctacaaccaacctatcagaggcactgcgcaatgttactactacagctattggtcttggtttcatgttttcaacttcatggaagttaacattgctggcacttgtaattgtcccggttatatcagttgctgtgcgtagatttggacgttttcttcgtgagctttcacatcaaacacaagctgctgctgctgtagcttcatccatagctgaggaatcttttggtgccatccgcacagtaagatcctttgctcaggaatatcatgagatttcacgctatggtgaaaaagtagaggagacacttaaacttggtctcaaacaagctaaagttgttggcttgttttctggagggcttaacgctgcatcaaccatgtctgtggttattgttgttatttatggcgccaacttaaccatcaatggttacatgacaactggctctcttacatcattcatcttatacagccttacagttggttcgtcagtatctgccttgtcaggactatacacaactgtaatgaaagcctctggtgcaagccgtagggtttttcaacttttggaccgtgtttcgtcaatgacaaactctggggacaaatgtccaataaatgaaaaggatggggaagttgagcttgatgatgtctggtttgcatatccttctcgcccatctcatatgattcttaagggaataactctgaagctagcaccaggttcaaaggttgcacttgttgggccaagtggtggtggtaaaaccacaatagcaaatttgattgagcggttttatgaccctctaaagggaaggatcttgcttaatggagtaccgttggtagaaatttcacatcaatatcttcacagcaaggtaagcattgtcagccaggagcctacgctcttcaactgcaccatcgaagagaatattgcttatggactagagggcacaacgaactttgctgacgttgagagtgcagctaaaatggcgaatgcacacaacttcatatgcggctttcccgaccaatataagactgtcgtcggcgagcgggggatcaggttatccggcgggcagaagcagaggatcgccattgcgagagctttgcttatgaacccacgagtgcttctcctggacgaagccaccagtgccctggatgctgaaagcgaatatcttgtacaggatgcaatggactccttgatgaaagggaggactgtccttgtgatagcccaccggctctcgaccgtcaagagcgccgacaccgtcgccgtcatctccgacggcctaatcgtggagagcggcacgcacgacgaactcctggaccgcgacggcatatacacggccttggtgaagaggcagctgcaggggccgaagtttgaggccaccagcagcatcagcgaggcctccgaaattgaagcggaacccagcagtaatgggcaatagcggccccgattattaggaagaccacagttgatttgaatccacacaagtgtatgtaaccctgatgttgacgtatgccactgcgaatcacgcgaaaccattggatatcacatgatgctacggttgttgtaggagtaatttcccacttggttaatccaacacatatggtccagttttgtgtttatgctgttgggattattgggccaagcccgtttgaaattctgaaatagtttctagagaaacacaaaggcccattcataaa

SEQ ID NO: 129816 - DNA, 1059 bp, Zea Mays
atggcgttcgacttcacgccccgtgcaacccctcctcaccgtgtcggcacgctgcccgtctttgtctcatctcgttggtgctcctccctccctcggggcctgcttcctccccatggtgtggatctagatcgtcgacgtctcaaaccacctcgattggcgacggcgacgccccctgccgtgtggatccgatcatggggcggccgccctgccactgcccgctccaacggcggcgcggacctcgccgtcttcgagcagttcgagcggacgattcagtctgttgcaagatatgtaagtatacacaatggtcttagtattgtctatgcatggagtcagggtgtcaatcatgctataatacgtcataaccagcctgaagtttgggcattttgcttgggaaatggctatgctggattgaaggatgctcttggttcaaatgattctagacttcaaagtactctttcagttccaaattatatttcacatgcatgtcgccagccgggatgctacttcagtgagacattgaagcccatatcagaagagcaccagacaagagttggagaactaggagtcttcggctgtcgctacggccttcggattgctcctgtattcttcaatggacaatccttaacacggtcacataagcacaacaagaggagaaccctgaccacagttcctagtccaagggcgacgatggcggatttgcttttattgctgaacaatgggaaccctctgtgggttgtgaaactattcctggtcagcgagaggtacgacagggatctcaactccttgaagctctccggtatccccccccacgagcttgttccttgtaagattcagtgtcctcaacttggtgcacacactgatgccaggagctatagcgccactcagatagttggttccaacatcaaaagtattaagcttcggcagcaagctggagtcgatagcaatctcaccagagagcgagtagttcctcaagctgattaccctcagcagtggacaactttacagggaagcgggcaactcaccgtccagcctattggtggccaggtttacggactctag

SEQ ID NO: 129817 - DNA, 1743 bp, Zea Mays
cggacgcttgagcagcagcaccatgaagacctggtatttctcttcgtggtggttggtggatggttaggaacaaacagtttgatccttcatgcaatctaaggaataggaacagactgaataatatgatgctgctgcacctcaactccagaaagtaaaacgtggaagttcagtatatgggcaacttacttagagcttgggttaccctgcgcccatctgcagagaaaaacttcgttggcctgccaacaatagcacgcccacatgtgtacccagggcctggagtcttaagagtgaaattcttcggcaccttaacagttttattggtagttccagcaagaccaacactgatctggaaggaggaagcagcatttgctgggtcctggttaaagcaatggggggtgttgcccttgaactttgagcagtcaccctgttcagtggtctgagccccaaccattgaccatataacctccttttttgcccatgtccacccaagctgccatccaggtgccccgatgtgccgaaattgttgataattgaacattgtgacaacagcctgcagcaggtcaaactgggctattcaatagaataaaccagggcctaccaagctggagatgaaagagatacagctgttagagtgggcaattctacttacgacatatccgtcaggagtccactgcatgatatcccattttatagtgatgttgccgtttggatccagcgaatcgtaggcctctgcagagagcaatcacagggttgacatcaaacaaagatcccaattatagaaagaagatggataatgaattcacgcaatatatgaagtctatgttacgttcgaggtccgctttcgaaggtccacacactgagtctggcaatggatcccttaatggtgaactacagttaagtaagatcttgaattgcttgttcactcctgaacagatctactaaataccaaggagctccgtatggagcagctcgcggcaggttgagcagacagtggcactagtttttttccccgacaggcgacagaggcaatcctcatttctattatttgcataacagaaatacagctgagttttagaagacagtggcactcgttaataagcctgagatggcatctccatctccatgtatagctgcaggaagctaagccagtaagcctacgtaattggattcgtagctgaggcaagctcgaaaggtcgatctgaattggactgcagtaggaccaaaactagaaggcaccgactctgcactggagccaccgatactgacagtaccaatcaaacggggaccgcatttgtcagcgcgcaacggaagcacccggagcggaagcaccatcgcagctctccgaactccgttgaatcagaagggcgatgggggcgacggatctaaccagctcagtaatccgcgcgcgagcgggagaggcgtagagagacggacgaggagaagcgaagaagccgaagggccgaacctgtggtggtcggtgcggagaggagcagcgcggccgcgagcagcacggcggcaaagcacgcgatggatctgccgcccgccgccattcttccttcccacccgccgccgcctaaccgacacaaccggtctcccaccaacagatagatacagacagagccgcgcccgcccgcctgtcgcccgtccgtccgtccgtctacccgccgatcttgctccggactgcggcggttgcggccgccgggtgctgggcgccggggaatgaggggcagtggtgaggagggc

SEQ ID NO: 129818 - DNA, 1235 bp, Zea Mays
gtttcttggtacagttctatactcattgtctattattaattgctgatcaagtgctgctagatagatgtttcaggcctccaacacggtatgtctaaagacgatttctaatcagcccatgggccgtgagggaaaaaataaccctagcagcccaagaagaccaccaaagcagacggcaagtaccctgtagcacccccacccctccgcctccaaacatgttcttcttccgctacaagatagcaacacaggcgaggatcccaagacccgagccgtgtaggctgctgcagtctcttcctccccggcaagccgcggcggtcgttgccccggcccctcatataatatagtcgccgcctccttgtcaccgccgattcgattaggttgatacagggaggagtcgcgaggggacgtagatgccgacgctgacaaagctgtacagcatgaaggaggctgccctccacaacacgcccgacgactgctgggtcgtcgtcgacggcaagatttatgatgtgaccaagtatttggaggaccatcctgggggcgccgatgttctgctcgaagcaaccggtgctgcttccctggttcacttttcctgcacttattatccatgtggtattagtttctgtattatggtttgtttgactcggtgtcattctgtctgaaggtaaggatgctacagaagaatttgacgatgcagggcacagcaagagtgccaaggagctaatgcaggactacttcgttggggagttggactcggacccaactcctgagattcctgagatggaggttttcagaaaggaacaggacacgggatttgccaggaagcttatggacgacgtggtgcaatattggtcgatcccagccgctgtaattgggatatcagctgttgttgccatattgtatgcgcgaaggaagtgaaagccgatgtgcatgtgccgagcttgggcagatgaccccttttagagggatcagcccatggtgcatggatatatcatatatcatatctcctgtccagaaccaaattacattatgatgttcgattcttaaacacttaatggcaaacatttgccggattgatggcattattttgtcgacacgacaatcaattgatggatttattactcttggaaccaaccatcacgcttgctggcgtaaatatgttccatgccacctttgatgcttttgaacgccatggattggcattcaatctttaacttttatctcaactgaattcggtgtta

SEQ ID NO: 129819 - DNA, 1031 bp, Zea Mays
gtttcttggtacagttctatactcattgtctattattaattgctgatcaagtgctgctagatagatgtttcaggcctccaacacggtatgtctaaagacgatttctaatcagcccatgggccgtgagggaaaaaataaccctagcagcccaagaagaccaccaaagcagacggcaagtaccctgtagcacccccacccctccgcctccaaacatgttcttcttccgctacaagatagcaacacaggcgaggatcccaagacccgagccgtgtaggctgctgcagtctcttcctccccggcaagccgcggcggtcgttgccccggcccctcatataatatagtcgccgcctccttgtcaccgccgattcgattaggttgatacagggaggagtcgcgaggggacgtagatgccgacgctgacaaagctgtacagcatgaaggaggctgccctccacaacacgcccgacgactgctgggtcgtcgtcgacggcaagatttatgatgtgaccaagtatttggaggaccatcctgggggcgccgatgttctgctcgaagcaaccggtaaggatgctacagaagaatttgacgatgcagggcacagcaagagtgccaaggagctaatgcaggactacttcgttggggagttggactcggacccaactcctgagattcctgagatggaggttttcagaaaggaacaggacacgggatttgccaggaagcttatggacgacgtggtgcaatattggtcgatcccagccgctgtaattgggatatcagctgttgttgccatattgtatgcgcgaaggaagtgaaagccgatgtgcatgtgccgagcttgggcagatgaccccttttagagggatcagcccatggtgcatggatatatcatatatcatatctcctgtccagaaccaaattacattatgatgttcgattcttaaacacttaatggcaaacatttgccggattgatggcattattttgtcgacacgacaatcaattgatggatttattactcttggaaccaa

SEQ ID NO: 129820 - DNA, 1045 bp, Zea Mays
gtttcttggtacagttctatactcattgtctattattaattgctgatcaagtgctgctagatagatgtttcaggcctccaacacggtatgtctaaagacgatttctaatcagcccatgggccgtgagggaaaaaataaccctagcagcccaagaagaccaccaaagcagacggcaagtaccctgtagcacccccacccctccgcctccaaacatgttcttcttccgctacaagatagcaacacaggcgaggatcccaagacccgagccgtgtaggctgctgcagtctcttcctccccggcaagccgcggcggtcgttgccccggcccctcatataatatagtcgccgcctccttgtcaccgccgattcgattaggttgatacagggaggagtcgcgaggggacgtagatgccgacgctgacaaagctgtacagcatgaaggaggctgccctccacaacacgcccgacgactgctgggtcgtcgtcgacggcaagatttatgatgtgaccaagtatttggaggaccatcctgggggcgccgatgttctgctcgaagcaaccggtgctgcttccctggtaaggatgctacagaagaatttgacgatgcagggcacagcaagagtgccaaggagctaatgcaggactacttcgttggggagttggactcggacccaactcctgagattcctgagatggaggttttcagaaaggaacaggacacgggatttgccaggaagcttatggacgacgtggtgcaatattggtcgatcccagccgctgtaattgggatatcagctgttgttgccatattgtatgcgcgaaggaagtgaaagccgatgtgcatgtgccgagcttgggcagatgaccccttttagagggatcagcccatggtgcatggatatatcatatatcatatctcctgtccagaaccaaattacattatgatgttcgattcttaaacacttaatggcaaacatttgccggattgatggcattattttgtcgacacgacaatcaattgatggatttattactcttggaaccaa

SEQ ID NO: 129821 - DNA, 1247 bp, Zea Mays
aattaatccaacgtagccatgcacaacacgtcaacacacacgcacgcaggctgctgctgggcgttctcggcggtggcggcggtggaagggctgaacaagatccggacggggcggctggtgtcgctgtcggagcaggagctggtggactgtgacgtcagcggcgtggaccagggctgcgacggcggcctcatggacaacgccttccagttcgtcgcgcgccgcggcgggctggcctcggagtcgggctacccgtaccagggccgggacgggccctgccgctcgtccgccgccgccgcgcgggccgcgtccatccggggccacgaggacgtgccgcgcaacaacgaggccgcgctcgcggccgccgtggccaaccagcccgtgtccgtggccatcaacggcgaggacatggcgttccgcttctacgacagcggcgtgctgggcggggcctgcggcacggacctcaaccacgccatcacggccgtcgggtacggcacggcgaacgacggcacaaggtactggctgatgaagaactcctggggcgcgtcgtggggcgagggcggatacgtccggatccgccgcggcgtccgcggggagggcgtctgcggtctcgccaagctgccgtcctaccccgtctagagcgccgatcgcgtccaccaacgtaaccatcgcacagcatacagtacgcatgatgctgttacgtcatccaagacaagcgtgctcgtgcatggcatatatatttgactcctccatttttaaacaagcgaacgataaatattcgagaatggagataatacttattataagattgtatataggccctgtttgggacaactgctgcttgttgaaaaagcagcttatctgataagctggtaagaagcagcttctgcttgttggctgcttttagttcattttgagaagcagctgaactgataagctgctgcagaagctgactgtttggcaggacttcagcttaaatttgtgaagaagctgaaaataagctgtgccaaacagggccataatcacatgatagatggttatatgtatagtgatatagtcgaaatcacgacccacgccaagcactatgtattgtactcccagccataagaatgtcgctgaggtattagttggacctttacgtgtgatggtcacgtgtattgtaatgtacagattgccttgaatgcaaccaatttagtgtaaacaaatacattcatattctaaatgtgtaatatatatatatatatatatat

SEQ ID NO: 129822 - DNA, 1766 bp, Zea Mays
tttggccaagcaccagctaagctagctaggtcacatgacatgagctaaagacgacgacacactagcattgcacacacaagacacactaactacatagctaaatacactagcatacccccccaaaaaaatatgtccgcgtcacggttcctcctcgccgtcctcgtcgtgggcagcgccgtactgtgcaccgccgccgctccccgcgcgctcgcggcggccgccgccgcgatggcgtcgcggcacgagaagtggatggcggagcacgggcgcgcgtacaaggatgaggccgagaaggcgcggcggctggaggtgttccgggccaacgcggagctgatcgactcgttcaacgccgcagggacgcacagccaccggctggcgaccaacaggttcgccgacctcaccgtcgaggagttccgcgcggccaggaccgggctccggccgcgcccggcgccgtccgcgggcgccggccggttcaggtacgagaacttcagcctggcggacgcggcgcagagcgtggactggcgggccatgggtgccgtcaccggcgtcaaggaccagggagcgtgcggctgctgctgggcgttctcggcggtggcggcggtggaagggctgaacaagatccggacggggcggctggtgtcgctgtcggagcaggagctggtggactgtgacgtcagcggcgtggaccagggctgcgacggcggcctcatggacaacgccttccagttcgtcgcgcgccgcggcgggctggcctcggagtcgggctacccgtaccagggccgggacgggccctgccgctcgtccgccgccgccgcgcgggccgcgtccatccggggccacgaggacgtgccgcgcaacaacgaggccgcgctcgcggccgccgtggccaaccagcccgtgtccgtggccatcaacggcgaggacatggcgttccgcttctacgacagcggcgtgctgggcggggcctgcggcacggacctcaaccacgccatcacggccgtcgggtacggcacggcgaacgacggcacaaggtactggctgatgaagaactcctggggcgcgtcgtggggcgagggcggatacgtccggatccgccgcggcgtccgcggggagggcgtctgcggtctcgccaagctgccgtcctaccccgtctagagcgccgatcgcgtccaccaacgtaaccatcgcacagcatacagtacgcatgatgctgttacgtcatccaagacaagcgtgctcgtgcatggcatatatatttgactcctccatttttaaacaagcgaacgataaatattcgagaatggagataatacttattataagattgtatataggccctgtttgggacaactgctgcttgttgaaaaagcagcttatctgataagctggtaagaagcagcttctgcttgttggctgcttttagttcattttgagaagcagctgaactgataagctgctgcagaagctgactgtttggcaggacttcagcttaaatttgtgaagaagctgaaaataagctgtgccaaacagggccataatcacatgatagatggttatatgtatagtgatatagtcgaaatcacgacccacgccaagcactatgtattgtactcccagccataagaatgtcgctgaggtattagttggacctttacgtgtgatggtcacgtgtattgtaatgtacagattgccttgaatgcaaccaatttagtgtaaacaaatacattcatattctaaatgtgtaatatatatatatatatatatat

SEQ ID NO: 129823 - DNA, 1800 bp, Zea Mays
aaaaactagcgccatggcggggagggataagaggcgacgagcggcgccgctcgaaggcgacgagcagcagttgcggcggaggctggaggaagcggcgctcctcctccgcaggatcaaagggcttgtgcgctggatcgtcgaagaggttgccgccggccgctccccgtctatagtgctccaccggtaccggaactattgctcctccgccgactctgcgtccccgtccccatgtgcctgcagctacgacatccccgtcggcacggacgtcctctctctgctccacaaggactaccacacctcccgcctcaatgtgctcctgagggtgctgttcgtggtgcagcagctcctgcagcagaacaagcactgctccaagagggacatctactacatgtacccctccatcttcgtagaagtagcagttgttgaccgtgccatcaacgatatctgcatactcttcaagtgcagccggcacaatctcaacgtggttcctgtagtgaaaggtttggtgatgggctggataagatttatggagggcgaaaagaaagtgtattgtataacaagcgtcaatgctgctttctccattcctgttgacattgaggcaatcaaagatgttgttagtgttgcccactacatacttgtggttgagaaggagacagtgttccagcgtttggccaatgacaagttctgtgaaagaaatcgctgcattgttattacaggaagaggctatccagatattccaacaagaaggcatgtgctctttattcattaagttcctcttgcatatttctcaaccgctatcccaattttacattctttttccatcctagattcctgcggtaccttgttgaactgctgcatctgcctgcttattgcttagtggactcagatccttatggtttcgacattctggctacctataaatttggttccttggtaggcatgatttatctgatgctgctatgctcatctatatctattgtctatgaacttaacttccttagcagattcacaggttaaaattgcaggtaacgaatccatggacatgatcatatactgcacctttcgtcctaaatcaacagcttgtctggcctctttgcatttgaaagttctattactttatgaagtcccgttagcaataaggctgtgtattagagcagttcatttttcccctcaaaataaacatgattatgctcgttttgctcatcttatcacaagcatgaccaaaatatttctttttgctctttgaaacccaagattatgacatatttacttgtgttaacttaccaacctctgctacttgcgtaatttcattcttcaagcaattggcacatgatgcaaacttgttgcgtgtccctgatatacggtggcttggagttttcacatctgattttgaagaatattgccttccagactgctgcctacttcgtttgtcacctgaagataggaggaaagctgaaggcattcttgctaggtgctatttacacagggaagccccagaatggaggtcagagttggaagcaatgctgcaaaagggtgtcaagtttgagattgaggcactatccgcaaattccatttcctttttatcgcatgagtacattccccagaaaatcaaacaaggcatgcatttataagattggacattcttgtatccgtccaggatgtgtcatagagtacaatctttttttgtctgattatagttatatccggagacatatcatgtgcaaacactaaggatctgtttcagaacataacataatatttccttaatcctaagataatatcgtggtatttgagcataac

SEQ ID NO: 129824 - DNA, 1464 bp, Zea Mays
aaaaaactagcgccatggcggggagggataagaggcgacgagcggcgccgctcgaaggcgacgagcagcagttgcggcggaggctggaggaagcggcgctcctcctccgcaggatcaaagggcttgtgcgctggatcgtcgaagaggttgccgccggccgctccccgtctatagtgctccaccggtaccggaactattgctcctccgccgactctgcgtccccgtccccatggtttagcttccgcgcccgctcccgggatcatctccttcccgaccaattcaccgtcacatccctcgaacaattttcacccaaatgtgtgacatccgtagaccctgggcgcgcgctcgtgcgtgattgcagtgcctgcagctacgacatccccgtcggcacggacgtcctctctctgctccacaaggactaccacacctcccgcctcaatgtgctcctgagggtgctgttcgtggtgcagcagctcctgcagcagaacaagcactgctccaagagggacatctactacatgtacccctccatcttcgtagaagtagcagttgttgaccgtgccatcaacgatatctgcatactcttcaagtgcagccggcacaatctcaacgtggttcctgtagtgaaaggtttggtgatgggctggataagatttatggagggcgaaaagaaagtgtattgtataacaagcgtcaatgctgctttctccattcctgttgacattgaggcaatcaaagatgttgttagtgttgcccactacatacttgtggttgagaaggagacagtgttccagcgtttggccaatgacaagttctgtgaaagaaatcgctgcattgttattacaggaagaggctatccagatattccaacaagaagattcctgcggtaccttgttgaactgctgcatctgcctgcttattgcttagtggactcagatccttatggtttcgacattctggctacctataaatttggttccttgcaattggcacatgatgcaaacttgttgcgtgtccctgatatacggtggcttggagttttcacatctgattttgaagaatattgccttccagactgctgcctacttcgtttgtcacctgaagataggaggaaagctgaaggcattcttgctaggtgctatttacacagggaagccccagaatggaggtcagagttggaagcaatgctgcaaaagggtgtcaagtttgagattgaggcactatccgcaaattccatttcctttttatcgcatgagtacattccccagaaaatcaaacaaggcatgcatttataagattggacattcttgtatccgtccaggatgtgtcatagagtacaatctttttttgtctgattatagttatatccggagacatatcatgtgcaaacactaaggatctgtttcagaacataacataatatttccttaatcctaagataatatcgtggtatttgagcataac

SEQ ID NO: 129825 - DNA, 1335 bp, Zea Mays
aaaaaactagcgccatggcggggagggataagaggcgacgagcggcgccgctcgaaggcgacgagcagcagttgcggcggaggctggaggaagcggcgctcctcctccgcaggatcaaagggcttgtgcgctggatcgtcgaagaggttgccgccggccgctccccgtctatagtgctccaccggtaccggaactattgctcctccgccgactctgcgtccccgtccccatgtgcctgcagctacgacatccccgtcggcacggacgtcctctctctgctccacaaggactaccacacctcccgcctcaatgtgctcctgagggtgctgttcgtggtgcagcagctcctgcagcagaacaagcactgctccaagagggacatctactacatgtacccctccatcttcgtagaagtagcagttgttgaccgtgccatcaacgatatctgcatactcttcaagtgcagccggcacaatctcaacgtggttcctgtagtgaaaggtttggtgatgggctggataagatttatggagggcgaaaagaaagtgtattgtataacaagcgtcaatgctgctttctccattcctgttgacattgaggcaatcaaagatgttgttagtgttgcccactacatacttgtggttgagaaggagacagtgttccagcgtttggccaatgacaagttctgtgaaagaaatcgctgcattgttattacaggaagaggctatccagatattccaacaagaagattcctgcggtaccttgttgaactgctgcatctgcctgcttattgcttagtggactcagatccttatggtttcgacattctggctacctataaatttggttccttgcaattggcacatgatgcaaacttgttgcgtgtccctgatatacggtggcttggagttttcacatctgattttgaagaatattgccttccagactgctgcctacttcgtttgtcacctgaagataggaggaaagctgaaggcattcttgctaggtgctatttacacagggaagccccagaatggaggtcagagttggaagcaatgctgcaaaagggtgtcaagtttgagattgaggcactatccgcaaattccatttcctttttatcgcatgagtacattccccagaaaatcaaacaaggcatgcatttataagattggacattcttgtatccgtccaggatgtgtcatagagtacaatctttttttgtctgattatagttatatccggagacatatcatgtgcaaacactaaggatctgtttcagaacataacataatatttccttaatcctaagataatatcgtggtatttgagcataac

SEQ ID NO: 129826 - DNA, 1216 bp, Zea Mays
gattagctccatggcggcttcgaaaaaatcaaaataaaaaactagcgccatggcggggagggataagaggcgacgagcggcgccgctcgaaggcgacgagcagcagttgcggcggaggctggaggaagcggcgctcctcctccgcaggatcaaagggcttgtgcgctggatcgtcgaagaggttgccgccggccgctccccgtctatagtgctccaccgtgcctgcagctacgacatccccgtcggcacggacgtcctctctctgctccacaaggactaccacacctcccgcctcaatgtgctcctgagggtgctgttcgtggtgcagcagctcctgcagcagaacaagcactgctccaagagggacatctactacatgtacccctccatcttcgtagaagtagcagttgttgaccgtgccatcaacgatatctgcatactcttcaagtgcagccggcacaatctcaacgtggttcctgtagtgaaaggtttggtgatgggctggataagatttatggagggcgaaaagaaagtgtattgtataacaagcgtcaatgctgctttctccattcctgttgacattgaggcaatcaaagatgttgttagtgttgcccactacatacttgtggttgagaaggagacagtgttccagcgtttggccaatgacaagttctgtgaaagaaatcgctgcattgttattacaggaagaggctatccagatattccaacaagaagcaattggcacatgatgcaaacttgttgcgtgtccctgatatacggtggcttggagttttcacatctgattttgaagaatattgccttccagactgctgcctacttcgtttgtcacctgaagataggaggaaagctgaaggcattcttgctaggtgctatttacacagggaagccccagaatggaggtcagagttggaagcaatgctgcaaaagggtgtcaagtttgagattgaggcactatccgcaaattccatttcctttttatcgcatgagtacattccccagaaaatcaaacaaggcatgcatttataagattggacattcttgtatccgtccaggatgtgtcatagagtacaatctttttttgtctgattatagttatatccggagacatatcatgtgcaaacactaaggatctgtttcagaacataacataatatttccttaatcctaagataatatcgtggtatttgagcataac

SEQ ID NO: 129827 - DNA, 1437 bp, Zea Mays
gattagctccatggcggcttcgaaaaaatcaaaataaaaaactagcgccatggcggggagggataagaggcgacgagcggcgccgctcgaaggcgacgagcagcagttgcggcggaggctggaggaagcggcgctcctcctccgcaggatcaaagggcttgtgcgctggatcgtcgaagaggttgccgccggccgctccccgtctatagtgctccaccggtaccggaactattgctcctccgccgactctgcgtccccgtccccatgtgcctgcagctacgacatccccgtcggcacggacgtcctctctctgctccacaaggactaccacacctcccgcctcaatgtgctcctgagggtgctgttcgtggtgcagcagctcctgcagcagaacaagcactgctccaagagggacatctactacatgtacccctccatcttcgtagaagtagcagttgttgaccgtgccatcaacgatatctgcatactcttcaagtgcagccggcacaatctcaacgtggttcctgtagtgaaaggtttggtgatgggctggataagatttatggagggcgaaaagaaagtgtattgtataacaagcgtcaatgctgctttctccattcctgttgacattgaggcaatcaaagatgttgttagtgttgcccactacatacttgtggttgagaaggagacaggtctttttttttttgcatttaataatttccgctctttgtacaatatgcttcagtagtccctttgcagtgttccagcgtttggccaatgacaagttctgtgaaagaaatcgctgcattgttattacaggaagaggctatccagatattccaacaagaagattcctgcggtaccttgttgaactgctgcatctgcctgcttattgcttagtggactcagatccttatggtttcgacattctggctacctataaatttggttccttgcaattggcacatgatgcaaacttgttgcgtgtccctgatatacggtggcttggagttttcacatctgattttgaagaatattgccttccagactgctgcctacttcgtttgtcacctgaagataggaggaaagctgaaggcattcttgctaggtgctatttacacagggaagccccagaatggaggtcagagttggaagcaatgctgcaaaagggtgtcaagtttgagattgaggcactatccgcaaattccatttcctttttatcgcatgagtacattccccagaaaatcaaacaaggcatgcatttataagattggacattcttgtatccgtccaggatgtgtcatagagtacaatctttttttgtctgattatagttatatccggagacatatcatgtgcaaacactaaggatctgtttcagaacataacataatatttccttaatcctaagataatatcgtggtatttgagcataac

SEQ ID NO: 129828 - DNA, 4025 bp, Zea Mays
cgcattgcagttgctcccttcggtttctttcgtgttccccctcctcaagagcagggcaacgcccaagagtatcgtcgctgccgctgccgctgcctcgcccgcgcgcaggccgctcgctgaaattccctcttcttcctcagtgcttatccgcggcggaatccaatcacctccctcatcacgtccttctcccgagcaaagcctcccctcgcttttggcgtatgcccccgctggcgcgcccatgattcccgccgattcctccgcccgttcggtccagcaaaccttgctgctgctgctgcgctgcggctagttcggtggcggggaaagaggaggagggatcttggagtagggcgaagcggaaatgtcgtcgccgtcgaacaaccgtgggacgtgctcccggagcagctctgcgcggtccaagcacagcgcgcgggtggtggcgcagacgcccgtggacgcgcagctgcacgccgatttcgagggctcccagcgccacttcgactactcatcctcggtgggcgccgccaaccgcccgtcggccagcacgagcaccgtctccacctacctccagaacatgcagcggggccgctacatccagcccttcggctgcctgctcgccgtccacccggacaccttcgcgctgctcgcctacagcgagaacgcgccggagatgctcgacctcacgccacacgcggtcccaaccatcgaccagcgggacgcgctcaccatcggcgccgacgtgcgcacgctcttccgctcgcagagctccgtcgcgcttcacaaggccgccaccttcggggaggtcaacctgctcaaccccatcctcgtgcacgccaggacgtcggggaagcccttctacgccatattgcaccggatcgacgtcggccttgtcatcgaccttgagccgttcaacccagcagacgtgccagtcacggccgcgggcgcgcttaagtcgtacaagctcgccgccaaggccatctccaggctgcagtcgctgcccagcgggaacctgtcgttgctgtgcgatgtgcttgtccgtgaggtgagcgagctcacgggctatgaccgggtcatggcgtacaagttccatgaggatgagcacggtgaggtcatttctgagtgcaggaggtccgatctggagccgtatcttggcctgcactacccagccaccgacatcccgcaggcgtccaggtttctgtttatgaagaacaaaatgcggatgatatgtgatttctctgccactccagtgctgatcattcaggatggcagccttgcacagcccgtcagcctctgtggttctaccctcagggcttcccatggttgccatgcacagtacatggcaaacatgggttctgttgcatcgcttgtgatgtcagtcactataaacgacgatgaggaggaagatggggataccgacagtgaccaacaaccgaaaggcaggaagctgtgggggctggtcgtctgccatcatacaagcccgaggtttgtccctttcccgctaaggtacgcttgcgagtttctcttgcaagtatttggcatacagctcagcaaggaggtggaactggctgctcaggcaaaggagaggcacatcctcagaacgcaaacccttctttgtgatatgctcctgcgggatgctcttgttgggatatttacccagtcacctaatgtgatggatctagtaaagtgcgatggagctgcattgtattatcagaaccaggttttggtgctcggatcaacaccgtccgagtcagagattaagagcattgccacatggctgcaggagaaccatgatggttcaactgggctgagtactgacagcttagtggaagcgggttatcctggtgctgctgcactccgtgaagtcgtgtgtggcatggtggccattaagatctcttccaaaaattttatcttctggttccgatcacacacaacaaaggagatcaagtggagtggggctaagcatgaaccgtttgacgcagatgacaatggcaggaagatgcatccacgatcttcattcaaggccttcttggaggtggttaaatggagaagtgttccctgggaggatgttgaaatggatgctatccattctttgcagttaatattacgtgactccctgcaaggtgaagatgccaacagaaacaacatcaggtccattgtaaaagctccatctgatgatatgaagaagttacaggggctacttgaactaagaacagttacaaacgagatggtccgcttaattgagacagcaactgcccctgtcttggctgttgacattgccggtaacataaatggatggaacaaaaaagctgcagaactaacagggttacctgtaatggaagccatagggaggcctctgatagatcttgttgttgctgattctgttgaagtggttaagcagattttggactcagctttacaaggaattgaagagcaaaatctggaaatcaagcttaaaacattccatgaacaggagtgttgtggtccagttatcttgatgattaactcctgctgtagtcgggatctttcagagaaagtcattggagtttgctttgtagcacaagatttgaccaggcagaagatgattatggataagtatactaggatacaaggagactatgttgccataataaagaaccccagtgagctcatccctcccatatttatgatcaatgatcttggttcctgcttagagtggaataaagctatgcagaagattactggtatgaagagggaagacgcgataaataagttgttaattggggaggtcttcacgctccatgattatggctgtagggtgaaagatcatgctactctaacgaaacttagcatactgatgaatgcagtgatttctggtcaggatccagagaagctcctgtttggtttcttcggcacaggtgggaagtatattgaatccttgctgacagtgaacaagagaacaaatgctgagggtaaaatcactggcgctctttgctttctgcatgtggctagcccagagcttcagcatgctcttgaggtccagaaaatgtctgaacaagctgctacaaacagctttaaagaattaacttacattcgtcaagaattaaggaacccactcaatggcatgcaatttacttataacttattgaagccttccgaattgacagaggatcagcggcaacttgtttcatctaatgttctgtgtcaggaccagctgaaaaagattttacatgacactgatcttgaaagcattgaacagtgctatatggagacgaacacagtagagttcaaccttgaggaagctctgaatacggtcctgatgcaaggcattcctttgggcaaggaaaaacgtatttctattgaacgtgattggcctgtggaagtgtcacacatgtacatttacggggacaatataaggcttcagcaggtcctagcagattatctggcttgcgcccttcaattcacacaaccagctgaaggacatatcgtgctccaggtcattcccaagaaggaaaacattgggtctggcatgcagattgctcatttggaattcaggattgtccatccagctccaggcgttccagaggccctgatacaggagatgttccagcacaacccaggggtgtccagggagggtctcggcctgtacataagccagaagctggtgaaaacgatgagcggcacgttgcagtacctacgagaagccgacacctcttcgttcatcatcctgatagagttcccggtcgcccagctcagcagcaagcggtccaagccttcgccaagtaaattctgacactgatgctcctggaactgcagtgacggttcggccgtgtcaaattctcgggtgtagggtgtacctctggccaagtgactgatattctgaaaaacatacggacttctagtataggagaagaggaatcctaatcctagtaattatatcttagtagatatgtgcttagtctcttgttaattttttgtcttgagaggactatatatactgataaagtgataatttattcagagaataaagaatgggctccatgctttgtcta

SEQ ID NO: 129829 - DNA, 1099 bp, Zea Mays
tgcgcattcacgccacagcgtcctcccctccccgtcctccctcttcttcacaccactcacagctcacaggtcctccccctcctcctcccgggctgccattgctgccgcccggccagctgattcaagatgccgaccatcatcgtctcggtggacctggaatgcagccgctgccgtgccaagatcgagaaggtgctcaacaggatccaagagaagggtgagttctgcatcgacgacatcgacttggacgagaagagcaacaaggtgaaggtgacggggcccttcgacccggacaagctcgccgacaagctgtgctgcaaggcgtgcaagatcatcaagcagatcgagatcgtggagccgccgccgccgccgccggagaagcccaagaaggaggaacccgccccgccgccgccgaagaagaaggaggagccggccccgccgccgccggcgaaggtcgagccgccaccgaaggagaagcccccgccaccagcaccgaaggaggagccaaagcccgccccggcgccggcgccgccgcccaaggtggtggaggtcccctacccgtggccgtacccgtgcccgtacccgtacccggcgtggccgtccgactgctgctgccaccacgggcacggcggctgccactgctgctcctgcggcaaggcccccgaggccccggcgccgcccccgatgccgcagtacgtgccccagccgtacccctgcggcggcggcggcggctaccggatcgtctgcgatgaggacccctcctacgcctgcgccatcatgtgattcattgtcccgttacgcgcccacaacccaccacaccagtgtcagtcatctcgtcatgccgtgccgtgccgtgcctcccgtataatcgccgtacagattcatcatacacacacacacactcatattatatatatatacacagcatcatgtataccgtacgtacgtccgtacctgtaccgtctccttagcttgcgtgttatgttgtgcttcaattaagtacggagtatcatatagtagtacatatatgttaggcaaagtgagagaataaaataagcgatgatgatgttggttttccgtgtataaagaagaagaaaaaaaa

SEQ ID NO: 129830 - DNA, 2366 bp, Zea Mays
gtggacccgagtggctgagtccacctctgatgctctgacctccgcctcctcctttctctcgtcgtcgtctccacgacacctcaaccccaatcagaacccggacccagatctctaaaaaatccccaatcccaatctgccgtacgccgttgcgatcatacctccaaatccgcccccaagtctgttcgatgcgaatagcacctgcgatttagcgaaccgtgcgctcgctaggtttagggtttcgagggtttgcgttagggtttgggcgcacgatggggcggtcgcgaggggtgctgagttccggcgacgacgacaccgggcacaggtcgaagcggaggagagtctcgtcgggcggggatgcgacggactccatttcagcctccatcgggggagctggagagggagggggcaagaaggcgctctatcactgcaactactgcaacaaggacatctccgggaagatacggatcaagtgctccaagtgccctgacttcgacctttgcgtggagtgtttctctgtcggcgctgaagtcaccccgcaccgcagcaaccatccttacaaagtcatggacaacttgtctttcccacttatttgcccggattggaatgcagatgaagaaattctcctccttgagggaattgaaatgtatggtctgggaaactggcttgaagttgcagagcatgttggtaccaagtctaagttacagtgtattgatcattacacatcagcatacatgaactcaccttgttatcccctcccggatatgtctcatgttaatggcaagaataggaaggaacttctagctatggctaaagtacagggtgagagtaaaaaagggactttgctgttacctggagaactcactcctaaggttgaatctcaattttctccctccagggtcaaggtggaagatgcacttggagaaggtccagcaggtcgatcaccttcacacatggctgttggtgcaaataaaaaagcttcaaatgtgggacatattaaggatggcgctactgtatcaaaagtcgaagatgttcatgtagatagaagtgttggtgtgaagaagcccagatattctgcagatgaaggcccttcgttgactgaactgagtggatacaatgcaaagagacatgagtttgacccagaatacgataatgatgccgaacaagctcttgctgagatggaatttaaagaaactgattcggaaactgatcgtgaactgaaactccgtgtgctgcgtatttacctctccaggcttgatgaaagaaaaagaagaaaggagttcatattggaaagaaatttgttgttccctaatcccttggagaaggatcttacgagtgaagacagggaactttaccatcgctataaagtcttcatgcgttttctttctaaggaggaacatgaagccctcgttaggagtgttattgaggagcgaaaaattcggaggagaattcaagaactccaggaatgccgttctgctggatgccgcacactggctgaagcaaagatacacatagagcaaaagaggaaaaaagaatacgagctgaatgcgcaaaaagctaaggatagcagtcaacttaatgcaaataataaatcagtacaaaagatgaatcgacctatgaaaattgagtccgatgggaatttggatccaaagaaaggtggtgctggcttggattctcctaagacaacaggacctacaagtgttaagcagtgggatgactgggatatagttggtcttcctggggcagagctattaagtgctagcgaaaagcttctatgctgtcagaacagattgctacccagccattacctgagaatgcaggaggtgctgatgcaggagatattcaagggtagcgtcctaaagaaggaagacgcccacgtcttatttaaggtcgatcctaccaaagtagatagtgtttatgatatggtatctaaaaaactgggcaaccatgaggaggccccaaccgtctagcttacgcttttgagcttgcctgctgtgacatgccgaaggaaacaaatcttggtctggcccttcgcagcgtgtctgaatcagggctgaaggtggtggaaccatactaaatcgaatcggccatagttagctgaaattcatatcagctgtcagtagcacagtaaggcattcccgccaagctgtaaaattattgccccgacgagaatgtgtagcatgaatttgaatttcttttctgctattgctgtgtactgttgcagggtagtgccttattgtagtatatgtataggtgcctgagttttatgtatcatcgtgtatgtaccatttgggcgctctatttatgccattgtaccaaccccaaacatcgattattataattcatctcgcagccaaattcttgtctct

SEQ ID NO: 129831 - DNA, 1631 bp, Zea Mays
ctgacctccgcctcctcctttctctcgtcgtcgtctccacgacacctcaaccccaatcagaacccggacccagatctctaaaaaatccccaatcccaatctgccgtacgccgttgcgatcatacctccaaatccgcccccaagtctgttcgatgcgaatagcacctgcgatttagcgaaccgtgcgctcgctaggtttagggtttcgagggtttgcgttagggtttgggcgcacgatggggcggtcgcgaggggtgctgagttccggcgacgacgacaccgggcacaggtcgaagcggaggagagtctcgtcgggcggggatgcgacggactccatttcagcctccatcgggggagctggagagggagggggcaagaaggcgctctatcactgcaactactgcaacaaggacatctccgggaagatacggatcaagtgctccaagtgccctgacttcgacctttgcgtggagtgtttctctgtcggcgctgaagtcaccccgcaccgcagcaaccatccttacaaagtcatggacaacttgtctttcccacttatttgcccggattggaatgcagatgaagaaattctcctccttgagggaattgaaatgtatggtctgggaaactggcttgaagttgcagagcatgttggtaccaagtctaagttacagtgtattgatcattacacatcagcatacatgaactcaccttgttatcccctcccggatatgtctcatgttaatggcaagaataggaaggaacttctagctatggctaaagtacagggtgagagtaaaaaagggactttgctgttacctggagaactcactcctaaggttgaatctcaattttctccctccagggtcaaggtggaagatgcacttggagaaggtccagcaggtcgatcaccttcacacatggctgttggtgcaaataaaaaagcttcaaatgtgggacatattaaggatggcgctactgtatcaaaagtcgaagagatatgctttctcaagaacgtctttttctgtaatttgagttctattaagaaatgaaatggtgatagtctcacgttacgacatgatgttcatgtagatagaagtgttggtgtgaagaagcccagatattctgcagatgaaggcccttcgttgactgaactgagtggatacaatgcaaagagacatgagtttgacccagaatacgataatgatgccgaacaagctcttgctgagatggaatttaaagaaactgattcggaaactgatcgtgaactgaaactccgtgtgctgcgtatttacctctccaggcttgatgaaagaaaaagaagaaaggagttcatattggaaagaaatttgttgttccctaatcccttggagaaggatcttacgagtgaagacagggaactttaccatcgctataaagtcttcatgcgttttctttctaaggaggaacatgaagccctcgttaggagtgttattgaggagcgaaaaattcggaggagaattcaagaactccaggtgttatgtttgctcattcgctctcttacaaaatcaactatattaatctattcttcttactagcaaacatatccgtgtattgcaatggaacgttgagcttgttacataagttacctggact
